United States Patent Application Publication US 2005/0208558 A1 - sequence listing, part 27

SEQ ID NO: 27052 - DNA, 11984 bp, DROSOPHILA
atccattacggcgtaagtacactattcgccttatcatccggttcgcctcacccaccggctgctccttactgcagatgcgttctggccacctcggctaatgtcacctcccagcgtttggcgggcgccaagaccctcaaccagcagagcgtattcgcctacggactctttggactgatcttcggcggtagtgtgccgcactacttctacacgacggtggagcgactcttcagccaggatgtgcgcttccgaagattcttcctgttcctgtccgagcgactggtctatgctccgatttaccaggcactgtccctgttcttcttggccctgttcgaggtgagaatccataatccgcaatctcagttcctagaactataatttgtaatcccttacagggcaagtctcccagcactgcattgaagaatgttgagaagctctactggcctctgctgaaggccaactggcagtacctgtccgtgttcgtgtacctcaacttcgcctacgtgcccccgatgttccggtccatcagcatggccatcatctccttcatctgggtggtgtacatcgcccagaagcgtcgccgcttccaggacaagctggccgccaaagaggcagccaaataggctatacgacccttaaaccctgtggtagtcgtcttggcctaatattccaattactgcttagattacggctgaactgcttcaagttctttatcttcccgcgttccggcggattgcaaaaagtccgtgtgtatttgaacactttagataagctaaaactaactggaggggcgccttatcaaccgactgttgttataccttaaaccctaaattttgtaaacttttcttaccaaaataaactaatatacaatgtataagatatctagatatccatggccaaatttggccaacagaaatgcttaacaagtagcgacaatcgtcgatctaacatcccatttccattgcgcacaatggatcccaatttgagaaattccaaggcaaccttttgagatgcaacaaataatgtctgttttttttttattaaaacgcagcttagaactagcaaataatcgagcaaaggcttacaaacgagaattattggctttttatcggcgctacaatataatttcgctagtaaattcatgggcagatgactaacttagggctacggaatgcagtgtaaaacaagttaaatgcgcataacaactatcttaaaactaggattctgactagaggaggtgactacgatgatggtgatgattgtggggggcacctgtgcctcaagactcgccgcacatcctgcgcagcgacgcggttaacactcagaaggcggccatcgacggactccggctgttgcgcaggggcgtgagaaggggcgtggcaggactgctggcgcggctaaagcaactggagcagcaactagaggcatcctccacctcgccctcggcgttcgccttgtggtgatagggaatcggtcgcttgcgagcgctgaaagcataatgaatagattagtatgggattcgtgtagcaagcttaaaaaccaaagggcaaatatgaaagtaactcaccaaactgaaaatcgtaaggaatagaaaagcagtggctaaaaatcaaacaaaagaaatcctataaaaccatataatcggtaaagtgacaaagtttatttgcggcttggctaaattacgaaaaatcaggatgacacacaatttgatagctacaaatatataaaagaagattggcgagtagttaagataatcaaattataagtagttcctgagtcagctgaaaaaataaaaccatttagaagaaatcaagagttcgtgctgtataaataaggtgtaaaattattgtaactcaatcgtgtaatggatataagcagtcactagcgtcttgtgctgcgcggcgatcgacggctacgaaataaaatgtaaagaacaaataaaatgtaaaagaaaacgattattcaaagaaataatgaggtcaaccaaggcggggcaggaatcctgccaagttacctcgttatgcgacgtctgtccagaaagcttggcgagccgcgacgccttgggatggagggcgatcgagagccggactgtgatgatccggagccgctgccggaggaggagctgcccgagctgctgttcgtggagcagctggtgcgggaggagtgcgacccagaccttgagctgtgcgatccgctgcgactgctggacgagctgtaccgcctacgaagagggataagatttagcattagtctacatttagaaacttgctcagccaagtacttacgatctcgactcgctgctggagtcatgtcgatgatggctggtgctggtgcgcctcttgctgcgactacgacgctcgcgactgcggctcctacgggccgcactctccgccgccgccacggtggccgtggataccttggagacgatagcatccaccagtgagctgtccgcgagcgccgcgactagaggctgtggatcgtgaattttgaagggttttataacgattttcggtttttgttggtgttgatggtgatgatgaaggtagctaatactattggcggccacagccgcagccgctgccgccgcattgaagctaatgggcccgccaccaccccggacatgcgacggatggcccaacagcggagcacctggcccactcatgcccacaccagctcccgtcagggacagcagtcccggatggcgctgtccatggccgaagagagccgagttgtagaccaagccacgagccaggtggtgcgcctgctgctgctgcaggctgtgctggtggtttttgcagatgttgtagtgtgtggcggttagaaggggaccgtggttgaggcggtttgtggtgcgattgtatgtgcccggagtacccgccagaaacgggagcatggccgcgttgttgttgttcccgccgctattgctactgttggaattcgaatgaggtaccccgccaccaccacatgcatgagggttgttagtactatgtctactgttagggttattgttcagcgtgcggttgtggaagatacgcttccccggcggatgctggtgatgttgctgctgctgcgagtggtgatgcatatgctgtggaggcggcctgttgtggtgcacgtggttcttgtgaaccaatgtcggactctttgcgtcgccattcgccgtcacttggggcgtcttgcaaatgggcggtgtgctagtgtccctttttttgaccgtatcctccacaggcacagacagctctcgatccggatcccgctgctgaggctgctcctggcgctgctccagcggcacaaccaccgccaaaggcggcgggggcgtcgtcgttagtgttaccgtggttgtagtcagtgtgttaattaaagcggtcacgttgttagcaacaaggaattcgcttagcgagttacgtttggtagccgtcacctggtcactgccacttacttcgctaccctctttggccgggtctttctccatgatcttgatcttctgcttggccttggccgctataccagacttcagttgctccagcatgcgcagctcctgctgttcctcgcgttcgcgcctgctctgctggaattcctccaaggcggcaccatctactcctgtttccgcatcgctgccgtcgtcgctttgtgccctcaggcggaccactggagcaggttttgtcgagtgggcttcccttactttggacggtcgctttttgtcctgcacaatgtcgtggtagcgttccggatgacgttcagctggcgagtagcgcagctcagaggaaatagagcgagaacgacggctcgtacgcttgggacttgattcgtccaccttgctctttgactttgacttttgcggggagtttgattgctcccgtttcacgctaacgcggctctcctttctggggctaatctccttcttcacctcttttagctctggggtcttgctcctcttcttttgtttcctaggtgtgggcttaggcgatggcgtacgcgaggaagtcgagctactaccggagctgtcggaatccgagctagagctggaagccgcccgctgtcgcttagtctgttccagggccaccatcaccgactttgtgccaaggatgtcgttaacagtatcctcggccgccttaaagggattgaaggctggcgttggcaccgacttcttcggtggcgcctctggggaatgggctggagatttgaatcgggcattgcggcttaatttagtgtcatctttttgcttcctgctagcattggtaggagaccgatgtcggcggtcgtctcttgatttggaactgcgctctcttggcgatcgtgtgggccgggcttccttggctggacgttctctagaacgctgccgctccttggaacgttgcctgtcctttgattgcagtggctccctagagcgctgcctctcccttgagcgctgtttttccttggagggctgtctctcctttgatcgcttcctctcgttagaacgctgcctttcctttaacccttgcctatccttggaaagttgcccctccttagagcgtcgcctctcccttgaacgctgtctatccttcgagcgctctctctccttcgagcgctgcctctccttcgaccgttggcgctcgttggaacgctgattttcctttgaccgatccgtggatctatctcgccttttgtctactgattgttgttcatccttgggcctgtgtttttccttggatctttgcctatccttggactttgatcgacgtctttccctagatctttctttttcgttgcactgcggtttctccttgcatctcagtgcgtccttcgacctagaccgctgtctttccttagatctttgtctttctttggatcgctgtctttcaatagagcgctgtctttcttttgaccgctgtctttccttagaccgctgcctctccctagatcgttgtctttccctagaccgctgcctctctctagaccgcagtctgtccctcgatctgtgcttctccttggagcgctgtctatccttagagcgctcccgatgcctttccggctccttgcgcggtggagtagccgctgaccgttcccgcggctttcgttgacgactgtctatggaggcttcgagtggccgggatgatctcgtatccttgcgctcgcgagaacggcttcgcatgacattttcctgttgcggagccttctcatcggacttggaagcctttgccccacgggacctgtccgatttgttctccttccgcgagggagagctaggttatataaacataagttatacgttctagcgttataagactttaaacttacttcgtgcgctccgagtccgaggaactggcccgtgcgcgtgacttctttttcagcttcttgtcgcgttttttctgcataatagaagagtatggagtgttagtatagagcgacttaagtgctaggcgctcttgctaagagtctaactgttagcagtaatgtcaaacatagttcattctttatggcatgatagacatatgaagttagagtttggtgctttcaatttggcagcatttgactttcgcaagcattctctctaggactgaaaacagttttgcattttgcattctgtatttgtacaacagtttcgatcggctatcactgcgcactaggtatcagtatcatatggttgtaatacaataagtagcttaaagagaacagtcaaatgaaagtacttacaaaactacaagagagccattgaaagctatcctatattaatgaagcgccaagggttttcataaacaaaatataaatttttcgtttcttgaatttacttaaatatcttggaatgattttgttgttcgaaagacaatctacgtgtaacgaaaatttggaataatcaaataaaatgttggaaccatccacagcacatggtatttcactcggaaggagtgggtgtggatagttccatggcaataatgatattcttctaagcatctatacgaacgaaagaaaagttggtagaaaattaagggaaatcataaggttatactagaatgcgtttgcagcctttttaccttttacaatatttgtgggtgagttttggtaatttttgattactaattaagtagtatgctttagtatttataaggtagagaacggtttatgcaggattatagttcagtacttggttatttggtcaatcgatattttgaatgttcatttggtggaaaaagaagtaaataagcaagagaagaaatggcgtatgtttaatatttggtgaacaattataacaacgaaacgaaaagtcagacgagttatcatcatatacaggtaataataatatcatatgtaaatatatagagagagaggcagtacttccattcggattagattgttgggtcagacgtaataattagttggttgttagtcaagggatgagtcgtacaataaaggaatagaaatatgcatatgttacaatatttgcagtcaggtgtctcggagaaggagccccagagatcagagccctttgttggagcgttcgattcacccaatctcgctctactttcgtccaacaatgacctccgctcatgggctcttcctcttcgcacctttctccagctcctgatagctaatgtgcacaggttgggagctctagctcctgcctaccttgtccttcttggccttctttcggacattcttcgactcgcgtcgctcctcctcgctgctgtcatcctcctcatcgctatcccggtcgctgtcccggccactctcgctgtgcttgcgcttgcgcgaccttttcttctttgacttactgcaagtagaagggtggagttcgataagaatgagtggatccgtaagggcacgttcattcgacagctaatcgaaagtgttctttggtgctggctacgagacacagattggaaagggcgctttcggtagccgaaagcctagagctccaaagtactggttagcagcaatgtataaataggttggtttacttgtggttcagtgctttaccttcatcgaaaactgcgcaaatggctttgtcttaacattatagaaggtaatcataataatagaaagaaagatgagaaagtaattcgcttttaattgttgcaacacacagagagacctcttaacgttatcgtttattgtatggttgtaagttctagtagttctttacttgtggtttttggtattgtagttttagttggcaatgcaatttctatggttttattgtagattgtagaatcgaattattacttaccgccgggcagagttttggggaatgtgaatgggcgaattttgggcggggggagtatctgtgagcagttgtatcaggttagatggttagtttggatctgatgggatgggttgggttgggatttcgagtggttggtaggtaggtgcgtgtaaagtgttggctagtggagaacccatacgtacttagatccctgatcactctactcactctcgctgcacacggattcaaataaaagattgtcttggcaagtgttaggatatcgaaagtatatattgcagaaaggcatttgaaacatttcacttgattggattggttcttatagcttgttgaatagtgttagctttgttaaaactaagtgtgagtcatttgtacgtggcttttcgcttctttttactttctttctcatatgagtcccttttgtggtttcaaatgcaatgtaaaagaaggagtagagacgaaaaacaaaatgtattaagcagttgattgatagttacatagtatcattggttttcacgctctaagcgcacgtgtttacagtttactatgtacgataaggaacaaatcaaaagtcatgactgtagagtccaaagaaagagcaaaggaaacaaacacaaagctacgattgtcgagggtttcaagtttcggattccggccaggactcttacctctctttcttgtgcttcttcgacttcttcttcttcttgcgctcaggactggccgaactgaaatccaaatccgaaagtaaatccaccagtacagtacaagtcgctaccatctacccacctctctctggcgcgcttcttgcgcttcttcttgtccgtcttggagacatgatcgcgttcgtcgccattggctgccgcatcgccagcatcgcgatcccgttcgcgggaaggagtacgcactagggcataccgcttcccggtctccttgtccttgccggctgctgcggcagctgccgccgctgccaggctctcgcgctgggcgtccagttccttttggagagccacgcttttggccaggtcctccttcgccttgcgatcaccgtcgaagctgctgccctcgacaaagtactcggatatgttgaaggcctcgcgcagcctggcgttcttctgctgttgagcctcggctatttgatgggtgtcgcgagcactggaagagaaagttgtgcgtttagttaatgaagtactaagaaaaagtatgtgcctcaatcataaaatctaaaatgtatgtattttctggttccccccttcattaagtggctaccttgtggccacagcactgccggctcccagcagtgtccccagcagactgctcgaggagtacttgagcagctcgagcaggacgctgccatcgatattgattttcatctgtgacgaaggcagctccttctggatggagtgctcagctgttcggtgggccggctcaagtgccggctccgggtccttctgttggcaggcgcaagcgcagtccgggtgagtcctcttggagactgctggtcgcctggtcttgttggcgccgcttgccaacgccggccgcaagggcttaaactttctggccaccgccgcgtagttccacgtgtgggcggtcaaacggaagctctcgtacttggccaggtactcgcggttgtcgtgctggaagtagggagccttggtcttcctggccccatttgaggtggcagacggagcagaggaggcgggctccccggtttgggtgcggggactgctggttttgctaccgggagtgctaatggcggcgctcttttcggtggtggtggtggtgattgcgtgacctgcgcgtttgcgtcgcttgcgtcgtttcttcggtttcgccaccttcaccgtggtggcttccgtcgttgttgtcatcgttgatgcagtggccgccgaggcagtcgctgtggttcttactgcagccgttgccgtggatgtggtggtgttgctatagatctccgaggagagcatttttgcctttaaggataagtatttcacttatgatatctttggatctgcttttatacaagattattcgtatttaacgtaaagttttaatccatgtgtgtggaagacagtggatattaggctttagttttttttattccgcgggtattttaactttaatttgtatttattctgaaaagacgttacttcaacttcatatatccatgttattggaagacgatggattttaattatacttgttttcggatttttgattcgcgtttgttttatatatatatatttttttatgttgtatataatatatgtttaaatccatgtaattggaagacaatggattcgcagaatgtttatgctttatataaatacaaaaatagttttcctttacaatatactttgctataatttcatcggttacgattggaagacgatggattagcatatatttggttttactttcggctacatttcgtagagcccgtgatgttttaataaatccttattcatctggaagacgttggatagttttatagaaatattggattatatttgctatggttatttaatttactccgctgaagcaactacgcgcacttgtcttcttcacttcgcgacttatactaattaattactgactatgtttggaagacttatttagtgatttgttgcattcattcggcttatgtattgagcattactcctactggccctgctacctcatttaaggggctccactcttagcacttgcaacaaccactacaataatccgcagctcgaaagcggctggcaatgctgagttaggggtgaaccaagagctatgcgacaccaccaccaccggcgctgggttttcatttatcgggtgcgtatgcagagctactcctcctcgggcacacttgaagggcttttgctggctgggtgccaagccctccctccaggtcattgggatctcgtgttttattttaattttttttcttttgattgctaggcttatggatgcatttgctgctgagctcctgacggggcggatatcgatttttccagcgattttccagcgcttatcgtgccttttttaccaggtcccctgagacggctcctctgcgccacctccatcgccagctcctcgccaagggcacttagtgggtcgttttagcaggcggttattgcttttaatttgtgtgtaaatatatctggctgctacgcggcgtttcctgagcgctttggccaacttgctgtggctttggaagacttgaagtgactgaaagccgtgcgcatcccggaaaatctttgcagcagctttttctctaccatgcgacgcctgtgattggcccccgaatgaatgaaagaaggggtggcgagttgggcgctgcggcggcgcatgtcttttcttggatgtggtttacagctgtcgtgcgctggccgagatttgagcaggccttcggtttgtttaagagcttattgatttgtccactgggcgcacgttttgctttaaattacataagctattaaaagcgtggtacttacgctacgcgtccgaattcatctttggccagatctgttttgccctgtcccatcaacttctggcggaaggagtccacctgcgacttaatttcctccggggtgcgtctgtaataattcaattttaatggataagataattagcgtggctctatatctaaagttcgtaattctacctttaagactagcttgattagctcaaaaaaggcttaaatatggatgatgtttcacctatctagattgttaaattagctaaggagtgcttagatttcagtccgcttgcccggacatgcggatgtctttcactcaaaataatctctacaactgaaatgcacttttttcaccaccagccgagttcgtgccaccggaagagtgctcacatgtgacgcaccgagcgggtggaggaagccctgcccgcgtaggggtggctcgccaacgggctgggggtagttcagtgctcagttcggcgcgtgtgcgtccgctctctggcgtgcaggagcagctaccaggcgccaatgtaaacataaacagcgaaggaagcaacagccccaggccggcgttatataacccggattgacattacatactggcatgtaattgcccatgtcccctgctcacccctgcttctcgagaatgtcctccaattccaggcacttgacttcgatcttgcgcttgcggtcgtggtccaggatctccttgttcggcggccggttcagctgggcgtccagcttcttcgtgtcgtcctcggcgcggtagtccttgtccttcttcccgggccgcacacatgcccaattccgctgcacgtgcccattggtgccggagccacggggcgtggtcaggccaatgccgttgtacatgctggtctgcgatgtcctgcaaattcctcttaactatcaacgactcccggcggccactgggtgctccaccaacgctgcaattgcaccacacgaaaaatcgatttcagttgcagtgcaagtggtgttcgacttgtctggctttctcacctctgttatatgtcctgcggcgctgctatccaagcgctggctttactaggctgcctaacttttcagtagtttattcctttttgtcaaaatattcgactagatatgcgacaatatgccgccctcagtgtgaccagatgacaaatgtcgcctaaatgctccctagctgtcaattccacaatgaagctaacatgagtggatcctgttcaaagcaacgaagtggatgttatcagtgaagtgaaaatcggcgaaacgggcacactaatagctaaacgtaaacaacaatattacacttattttatcttaagaaat

SEQ ID NO: 27053 - DNA, 4509 bp, DROSOPHILA
attttgagtgaaagacatccgcatgtccgggcaagcggactgaaatctaagcactccttagctaatttaacaatctagataggtgaaacatcatccatatttaagccttttttgagctaatcaagctagtcttaaagacgcaccccggaggaaattaagtcgcaggtggactccttccgccagaagttgatgggacagggcaaaacagatctggccaaagatgaattcggacgcgtagctgctcgcgacacccatcaaatagccgaggctcaacagcagaagaacgccaggctgcgcgaggccttcaacatatccgagtactttgtcgagggcagcagcttcgacggtgatcgcaaggcgaaggaggacctggccaaaagcgtggctctccaaaaggaactggacgcccagcgcgagagcctggcagcggcggcagctgccgcagcagccggcaaggacaaggagaccgggaagcggtatgccctagtgcgtactccttcccgcgaacgggatcgcgatgctggcgatgcggcagccaatggcgacgaacgcgatcatgtctccaagacggacaagaagaagcgcaagaagcgcgccagagagagttcggccagtcctgagcgcaagaagaagaagaagtcgaagaagcacaagaaagagagtaagtcaaagaagaaaaggtcgcgcaagcgcaagcacagcgagagtggccgggacagcgaccgggatagcgatgaggaggatgacagcagcgaggaggagcgacgcgagtcgaagaatgtccgaaagaaggccaagaaggacaagaaaaaacgcgacaagaagctgaaaaagaagtcacgcgcacgggccagttcctcggactcggagcgcacgaactctccctcgcggaaggagaacaaatcggacaggtcccgtggggcaaaggcttccaagtccgatgagaaggctccgcaacaggaaaatgtcatgcgaagccgttctcgcgagcgcaaggatacgagatcatcccggccactcgaagcctccatagacagtcgtcaacgaaagccgcgggaacggtcagcggctactccaccgcgcaaggagccggaaaggcatcgggagcgctctaaggatagacagcgctccaaggagaagcacagatcgagggacagactgcggtctagagagaggcagcggtctagggaaagacaacgatctagggagaggcagcggtctaaggaaagacagcggtcaaaagaaagacagcgctctattgaaagacagcgatccaaagaaagacaaagatctaaggaaagacagcggtctaggtcgaaggacgcactgagatgcaaggagaaaccgcagtgcaacgaaaaagaaagatctagggaaagacgtcgatcaaagtccaaggataggcaaagatccaaggaaaaacacaggcccaaggatgaacaacaatcagtagacaaaaggcgagatagatccacggatcggtcaaaggaaaatcagcgttccaacgagcgccaacggtcgaaggagaggcagcgctcgaaggagagagagcgctcgaaggatagacagcgttcaagggagaggcgacgctctaaggaggggcaactttccaaggataggcaagggttaaaggaaaggcagcgttctaacgagaggaagcgatcaaaggagagacagccctccaaggaaaaacagcgctcaagggagaggcagcgctctagggagccactgcaatcaaaggacaggcaacgttccaaggagcggcagcgttctagagaacgtccagccaaggaagcccggcccacacgatcgccaagagagcgcagttccaaatcaagagacgaccgccgacatcggtctcctaccaatgctagcaggaagcaaaaagatgacactaaattaagccgcaatgcccgattcaaatctccagcccattccccagaggcgccaccgaagaagtcggtgccaacgccagccttcaatccctttaaggcggccgaggatactgttaacgacatccttggcacaaagtcggtgatggtggccctggaacagactaagcgacagcgggcggcttccagctctagctcggattccgacagctccggtagtagctcgacttcctcgcgtacgccatcgcctaagcccacacctaggaaacaaaagaagaggagcaagaccccagagctaaaagaggtgaagaaggagattagccccagaaaggagagccgcgttagcgtgaaacgggagcaatcaaactccccgcaaaagtcaaagtcaaagagcaaggtggacgaatcaagtcccaagcgtacgagccgtcgttctcgctctatttcctctgagctgcgctactcgccagctgaacgtcatccggaacgctaccacgacattgtgcaggacaaaaagcgaccgtccaaagtaagggaagcccactcgacaaaacctgctccagtggtccgcctgagggcacaaagcgacgacggcagcgatgcggaaacaggagtagatggtgccgccttggaggaattccagcagagcaggcgcgaacgcgaggaacagcaggagctgcgcatgctggagcaactgaagtctggtatagcggccaaggccaagcagaagatcaagatcatggagaaagacccggccaaagagggtagcgaagtaagtggcagtgaccaggtgacggctaccaaacgtaactcgctaagcgaattccttgttgctaacaacgtgaccgctttaattaacacactgactacaaccacggtaacactaacgacgacgcccccgccgcctttggcggtggttgtgccgctggagcagcgccaggagcagcctcagcagcgggatccggatcgagagctgtctgtgcctgtggaggatacggtcaaaaaaagggacactagcacaccgcccatttgcaagacgccccaagtgacggcgaatggcgacgcaaagagtccgacattggttcacaagaaccacgtgcaccacaacaggccgcctccacagcatatgcatcaccactcgcagcagcagcaacatcaccagcatccgccggggaagcgtatcttccacaaccgcacgctgaacaataaccctaacagtagacatagtactaacaaccctcatgcatgtggtggtggcggggtacctcattcgaattccaacagtagcaatagcggcgggaacaacaacaacgcggccatgctcccgtttctggcgggtactccgggcacatacaatcgcaccacaaaccgcctcaaccacggtccccttctaaccgccacacactacaacatctgcaaaaaccaccagcacagcctgcagcagcagcaggcgcaccacctggctcgtggcttggtctacaactcggctctcttcggccatggacagcgccatccgggactgctgtccctgacgggagctggtgtgggcatgagtgggccaggtgctccgctgttgggccatccgtcgcatgtccggggtggtggcgggcccattagcttcaatgcggcggcagcggctgcggctgtggccgccaatagtattagctaccttcatcatcaccatcaacaccaacaaaaaccgaaaatcgttataaaacccttcaaaattcacgatccacagcctctagtcgcggcgctcgcggacagctcactggtggatgctatcgtctccaaggtatccacggccaccgtggcggcggcggagagtgcggcccgtaggagccgcagtcgcgagcgtcgtagtcgcagcaagaggcgcaccagcaccagccatcatcgacatgactccagcagcgagtcgagatcgcggtacagctcgtccagcagtcgcagcggatcgcacagctcaaggtctgggtcgcactcctcccgcaccagctgctccacgaacagcagctcgggcagctcctcctccggcagcggctccggatcatcacagtccggctctcgatcgccctccatcccaaggcgtcgcggctcgccaagctttctggacagacgtcgcataacgagcgctcgcaagcgaccgattccctatcaccacaaggcgaacgccgagggcgaggtggaggatgcctctagttgctgctccagttgctttagccgcgccagcagtcctgccacgccccttctcacgcccctgcgcaacagccggagtccgtcgatggccgccttctgagtgttaaccgcgtcgctgcgcaggatgtgcggcgagtcttgaggcacaggtgccccccacaatcatcaccatcatcgtagtcacctcctctagtcagaatcctagttttaagatagttgttatgcgcatttaacttgttttacactgcattccgtagccctaagttagtcatctgcccatgaatttactagcgaaattatattgtagcgccgataaaaagccaataattctcgtttgtaagcctttgctcgattatttgctagttctaagctgcgttttaataaaaaaaaaacagacattatttgttgcatctcaaaa

SEQ ID NO: 27054 - protein, 1333 aa, DROSOPHILA
MGQGKTDLAKDEFGRVAARDTHQIAEAQQQKNARLREAFNISEYFVEGSSFDGDRKAKEDLAKSVALQKELDAQRESLAAAAAAAAAGKDKETGKRYALVRTPSRERDRDAGDAAANGDERDHVSKTDKKKRKKRARESSASPERKKKKKSKKHKKESKSKKKRSRKRKHSESGRDSDRDSDEEDDSSEEERRESKNVRKKAKKDKKKRDKKLKKKSRARASSSDSERTNSPSRKENKSDRSRGAKASKSDEKAPQQENVMRSRSRERKDTRSSRPLEASIDSRQRKPRERSAATPPRKEPERHRERSKDRQRSKEKHRSRDRLRSRERQRSRERQRSRERQRSKERQRSKERQRSIERQRSKERQRSKERQRSRSKDALRCKEKPQCNEKERSRERRRSKSKDRQRSKEKHRPKDEQQSVDKRRDRSTDRSKENQRSNERQRSKERQRSKERERSKDRQRSRERRRSKEGQLSKDRQGLKERQRSNERKRSKERQPSKEKQRSRERQRSREPLQSKDRQRSKERQRSRERPAKEARPTRSPRERSSKSRDDRRHRSPTNASRKQKDDTKLSRNARFKSPAHSPEAPPKKSVPTPAFNPFKAAEDTVNDILGTKSVMVALEQTKRQRAASSSSSDSDSSGSSSTSSRTPSPKPTPRKQKKRSKTPELKEVKKEISPRKESRVSVKREQSNSPQKSKSKSKVDESSPKRTSRRSRSISSELRYSPAERHPERYHDIVQDKKRPSKVREAHSTKPAPVVRLRAQSDDGSDAETGVDGAALEEFQQSRREREEQQELRMLEQLKSGIAAKAKQKIKIMEKDPAKEGSEVSGSDQVTATKRNSLSEFLVANNVTALINTLTTTTVTLTTTPPPPLAVVVPLEQRQEQPQQRDPDRELSVPVEDTVKKRDTSTPPICKTPQVTANGDAKSPTLVHKNHVHHNRPPPQHMHHHSQQQQHHQHPPGKRIFHNRTLNNNPNSRHSTNNPHACGGGGVPHSNSNSSNSGGNNNNAAMLPFLAGTPGTYNRTTNRLNHGPLLTATHYNICKNHQHSLQQQQAHHLARGLVYNSALFGHGQRHPGLLSLTGAGVGMSGPGAPLLGHPSHVRGGGGPISFNAAAAAAAVAANSISYLHHHHQHQQKPKIVIKPFKIHDPQPLVAALADSSLVDAIVSKVSTATVAAAESAARRSRSRERRSRSKRRTSTSHHRHDSSSESRSRYSSSSSRSGSHSSRSGSHSSRTSCSTNSSSGSSSSGSGSGSSQSGSRSPSIPRRRGSPSFLDRRRITSARKRPIPYHHKANAEGEVEDASSCCSSCFSRASSPATPLLTPLRNSRSPSMAAF

SEQ ID NO: 27055 - DNA, 4283 bp, DROSOPHILA
catctagttggagcggagtattagtatgggttttgcgttggagcaggagcaaaatgaaacgtagaatgcaacggcctaaaatcccagccacgaaaaataattgattgcattctgcctttcattttgcctgatcctcggccagaagtttgtgccgccaaagaggccccttcgtccacttacaggggacccgtgaaaccgggagcacactggcattcgccggacacgtggtgacacttgccgccgttctcgcatcggcacttctccgagcagttggccccgaaaaagccctccggacagatgtccgcgcagcgtgctccggtgtagcccttggcgcactcgcagtcgcctgaaaagggctcacataccgcgttgttcaggcagtcgcactgcatcgagcagttccggccataccagccgggtgggcaatctaccgaagagtgacacaaacatggttagctgcggttacggatcacaaggtacgggttcgacagttagttgcttttttcttgcttttgcctttcgcttgctagccacgggaaacccaggagccggaagaagttccgctcccggaagctcccgttttggtggtggggattagtgaccgatagcctgcttgcacctgtataactgagccggagtgaactgcatgggtgcatgagagagagagagtggagtgtaggttgtgggtggtcggagttagatttcgggttaagatggcataaacaaaaaaaaaaacaaacaaaagctacaaagcaacatataacatatagcagaaatatagctacaaagacactacgtgcagatctttggtagtccaaagacggaatgcccttgcagaggctataaactatatacatttaaaccttaataataatcttgttttttgatattattattttgactagaatagcatatggttttcagacaaatttgatcatttccttcttgctgattgtaaaaacattcaattttgatgaaaattaaaaagtcagcgagcagattagtaatccattcgcctttctttcatgaagtaggagtgcctgtttctcgtccccggcagaaaaacgtgagctcggaactcgtctatgttgaattcgttgggtttgtagacaaaaggttccttgatcaccgacactgaactgacttttttcactagctcttcgaccggaggtgcgtccttggtcactttttttgtgatgccaagcatctgccaaatatcgtactccgactcctccgctactagtgactgtgccgcgaggctttggacacttggcgatggggtcgggcagaacggcaagcactccttcttcctcgccatgtcgttctctaccttttgcaccatcggatgcttcagcgtcttggcaaactccaaaacatcgccaatgctggggaagcgctgtgtatcggtgacaaagccgttttcgcccaagaaaatgtttcgcctgactgccacgttcgcctcgaactcttcttgctcgtccaagtcgcagtcgcgacagtcaaaatgggtgaccttcatgttggcggtgagggcgcatataagtcttgtacctagcttagcacctaaaggaatggccaccattatcagccgacgaagtggatcgtgatgacgcagaagatcgcctagttggtccacaattgtccgaggattcgcctcgatgccggacacattaagctcctccacgtgctcggtgcccttgataccgttgcacaaaatggacagggagtcgccgctcaacttattgtgggccaatcccagatactccagtctggagaggttcggtcgctgcagtgcctctccgatagccgacattgcccgcgtgtccagtcggttgtactccagctcaaggatctttagcatttgcggccgctccagcagaattcccaactcggggccacagtcgtcagtcatctggttgtacccaaagtccactacctccagcaaaggcaataggcgcagagcccggcacacggtgtatagcttaaagctattaagtctgctgtttcgaagccggaagatctgcagctgctgcagtgccactaaacctctagccaggcgaaccatgtccttgatcgaaaagagcacgttccgcttgtggtactttctacccaaagccggacccagaaactccaggttcagcgataccagattgacaaagtggcgcacaaagctaagatcgatgtgaacgcagtcgtcctccggatattttaattgttgtagatgcgtcagatatctttgcttgttgcgtttgtccaaaaccttgtcatcgccatcgtctggttcaggctccacgcggatatcaaaggtgccctttatacgctgccttcgcttctttttctttcgtggctctggttccttgggcttccgcatctcggaccgtcgtcgcctgcgctcctcatgctccgcctccctggcagccttcagatcacgcaatcgttggcgggcgacgttgcgttcatgtcgacgtttgcgacgctcgttgccggagtcatcttcatcgtcggaagcattcagcgtaaattttgtattgaatccaattgcccttttctggtcagaggcgattgaacccgccccctcctcttcttcctccccctcctcatcgacgtcttctggtgtcattggctcatcactggagatttccatgccaccagactcctcggatgttatttccggttccgagtcgtcttcctcacgttttgttttccgaaaggcatactccgacagcggctgcaggtgccgaatgtccatgcagcgaacatgatcctttattagctcggctagttcggtcatctctttctctggccaaagggcggccggacaggcctccaccagctccatgtacttcaggctcagtcccttgccgcgccagtcgtaatcctgcaaccccttcagtgcaaggcatgtctcggaactcttagctaggaccacccgcctccagtagctcgcatcctctacgcagtagcactcacgcagtggcagatccacatcgagtgaatcgtagtggatgcgcatctttcgcggatcttgaagcacctcgtcgggcacgttggcatttccacgtttagccatctgtcggacgcagagatccgccaaagtgggcacttggtcggcatcgttaaacgcctctgcgaagaattcccgattacgctccgagagtaaattccgattggcggtcaggggcggcttgtaaagctcgtacacggccagcatgaccggatcattcggaatactcaagctattggtgttcggcagcggcaagtaatctgagtcctcatcctccatcctatacgttccaagatgtgtgtggtgtagagctatttatggtattttttattttttcctattttttttttttgtttgtatgctttttgtttgaggagtatttgtttgactttaatgtgttgtcatattggaagattattttcctctggctttagtgggatcattgataactgaatacatttcaggtgtcttttttgggtctgagaatcgactaattcggttctgtagtatgtacaaaatattttagctttgcgttgtctgatactttatatacttaaaagaacataatctacagtcgagcagcagaacaattaaacgtacagttaatttctaatctttgcaagggcatttagaactacagagcttcaaagctgcttaagtgattatacaagctcttatctacggggctcggctcatcgcaggcaatccggggatatcgtgaacttgaagtttcaaaattgaaaaaccgccgtttctgggataagccgcacccttggaacacccaaggcgattcattaggggcaaattacgattagcttaaaggatcaacgaacttatatcgcaggcgggtcctccgtaaccatgatcacacttgcacttctccggggagatgcatctaccgtgctggcagggttccgaacaatgcggcacgcattctcctgcgctcgcgatgtagccatctaaaagcggttaaaaatggtaatatgtaaagtaaagtcaaacatccagactcatccaactcaccacaacagtccctcacaatacggttctttgcaatcgtcttggttttgttgaccactcggtgtttaatgcgataggtggagcacctcggcgggaatgtgacgcaccaggtggagccccgttcctggaacgattgcagttctgtgtagacaacgtctacgttatatctaaaggtaaaagtattcattaatttagttcatttgtcgtgataggggataagcttacagttctcttcttttgcagatattgggtccatcca

SEQ ID NO: 27056 - DNA, 2283 bp, DROSOPHILA
atggaggatgaggactcagattacttgccgctgccgaacaccaatagcttgagtattccgaatgatccggtcatgctggccgtgtacgagctttacaagccgcccctgaccgccaatcggaatttactctcggagcgtaatcgggaattcttcgcagaggcgtttaacgatgccgaccaagtgcccactttggcggatctctgcgtccgacagatggctaaacgtggaaatgccaacgtgcccgacgaggtgcttcaagatccgcgaaagatgcgcatccactacgattcactcgatgtggatctgccactgcgtgagtgctactgcgtagaggatgcgagctactggaggcgggtggtcctagctaagagttccgagacatgccttgcactgaaggggttgcaggattacgactggcgcggcaagggactgagcctgaagtacatggagctggtggaggcctgtccggccgccctttggccagagaaagagatgaccgaactagccgagctaataaaggatcatgttcgctgcatggacattcggcacctgcagccgctgtcggagtatgcctttcggaaaacaaaacgtgaggaagacgactcggaaccggaaataacatccgaggagtctggtggcatggaaatctccagtgatgagccaatgacaccagaagacgtcgatgaggagggggaggaagaagaggagggggcgggttcaatcgcctctgaccagaaaagggcaattggattcaatacaaaatttacgctgaatgcttccgacgatgaagatgactccggcaacgagcgtcgcaaacgtcgacatgaacgcaacgtcgcccgccaacgattgcgtgatctgaaggctgccagggaggcggagcatgaggagcgcaggcgacgacggtccgagatgcggaagcccaaggaaccagagccacgaaagaaaaagaagcgaaggcagcgtataaagggcacctttgatatccgcgtggagcctgaaccagacgatggcgatgacaaggttttggacaaacgcaacaagcaaagatatctgacgcatctacaacaattaaaatatccggaggacgactgcgttcacatcgatcttagctttgtgcgccactttgtcaatctggtatcgctgaacctggagtttctgggtccggctttgggtagaaagtaccacaagcggaacgtgctcttttcgatcaaggacatggttcgcctggctagaggtttagtggcactgcagcagctgcagatcttccggcttcgaaacagcagacttaatagctttaagctatacaccgtgtgccgggctctgcgcctattgcctttgctggaggtagtggactttgggtacaaccagatgactgacgactgtggccccgagttgggaattctgctggagcggccgcaaatgctaaagatccttgagctggagtacaaccgactggacacgcgggcaatgtcggctatcggagaggcactgcagcgaccgaacctctccagactggagtatctgggattggcccacaataagttgagcggcgactccctgtccattttgtgcaacggtatcaagggcaccgagcacgtggaggagcttaatgtgtccggcatcgaggcgaatcctcggacaattgtggaccaactaggcgatcttctgcgtcatcacgatccacttcgtcggctgataatggtggccattcctttaggtgctaagctaggtacaagacttatatgcgccctcaccgccaacatgaaggtcacccattttgactgtcgcgactgcgacttggacgagcaagaagagttcgaggcgaacgtggcagtcaggcgaaacattttcttgggcgaaaacggctttgtcaccgatacacagcgcttccccagcattggcgatgttttggagtttgccaagacgctgaagcatccgatggtgcaaaaggtagagaacgacatggcgaggaagaaggagtgcttgccgttctgcccgaccccatcgccaagtgtccaaagcctcgcggcacagtcactagtagcggaggagtcggagtacgatatttggcagatgcttggcatcacaaaaaaagtgaccaaggacgcacctccggtcgaagagctagtgaaaaaagtcagttcagtgtcggtgatcaaggaaccttttgtctacaaacccaacgaattcaacatagacgagttccgagctcacgtttttctgccggggacgagaaacaggcactcctacttcatgaaagaaaggcgaatggattactaa

SEQ ID NO: 27057 - protein, 760 aa, DROSOPHILA
MEDEDSDYLPLPNTNSLSIPNDPVMLAVYELYKPPLTANRNLLSERNREFFAEAFNDADQVPTLADLCVRQMAKRGNANVPDEVLQDPRKMRIHYDSLDVDLPLRECYCVEDASYWRRVVLAKSSETCLALKGLQDYDWRGKGLSLKYMELVEACPAALWPEKEMTELAELIKDHVRCMDIRHLQPLSEYAFRKTKREEDDSEPEITSEESGGMEISSDEPMTPEDVDEEGEEEEEGAGSIASDQKRAIGFNTKFTLNASDDEDDSGNERRKRRHERNVARQRLRDLKAAREAEHEERRRRRSEMRKPKEPEPRKKKKRRQRIKGTFDIRVEPEPDDGDDKVLDKRNKQRYLTHLQQLKYPEDDCVHIDLSFVRHFVNLVSLNLEFLGPALGRKYHKRNVLFSIKDMVRLARGLVALQQLQIFRLRNSRLNSFKLYTVCRALRLLPLLEVVDFGYNQMTDDCGPELGILLERPQMLKILELEYNRLDTRAMSAIGEALQRPNLSRLEYLGLAHNKLSGDSLSILCNGIKGTEHVEELNVSGIEANPRTIVDQLGDLLRHHDPLRRLIMVAIPLGAKLGTRLICALTANMKVTHFDCRDCDLDEQEEFEANVAVRRNIFLGENGFVTDTQRFPSIGDVLEFAKTLKHPMVQKVENDMARKKECLPFCPTPSPSVQSLAAQSLVAEESEYDIWQMLGITKKVTKDAPPVEELVKKVSSVSVIKEPFVYKPNEFNIDEFRAHVFLPGTRNRHSYFMKERRMDY

SEQ ID NO: 27058 - DNA, 3493 bp, DROSOPHILA
gcgcatccttgtccgtaggtgtctgtgggacaggactcgttgcagttggaacctgtccaccctggcaggcactggcactggcctgtaacgtggttgcactcgccgccgtgctcgcaattgcacttgagcttgcagccgggtccgtagagtccagcaggacatgggtgctcgcaggtgagacctatgtaacccgtgcggcagagaatttcacctgtgatgtgatcgcagctcttgttgcctgaaaaatatgtgagtattagggggtgttttgctttcgccttgtaatcttatccaatatagcttaccatggaggatctccgggcaccgttccttgcattccatgccgtagaatccaggtgggcagggttccgcacagtcggcgccagtccaaccggctgagcagatgcagttaccggaatcggggtcgcaggaggagttattcaggcatctgcaaactttatcacaattttcaccatagtaaccgctccgacagttggtctcgcaatgaacgccttgggttgttcgatcgttgggtatcagacaaggccaacaaaaaccagaaacacaaaggtgcagaaacagaaaagcaaattaaattaaggaaatgaaacgtggccatgcaaaataggtgcgatagatgcaaaaatgaaagtaagtgaaatgagttcagtgcgcactaataaggatataagatggaactgattaacatgttataggtagaaaatcattcatcagatttacactttgtcttacaaaattgtaaatatttaatagaaaactgccttcttaatatcaacagtttggtttaaaaaaataaacaaattttaaggggttccttaattactgttaaaagaaaatcatgcaagctctacaatttggatattttatctaaattattcaagaatacacgtaacccctttcttattgaactatcaattgatggaaatcacgccttttttctatgattttagatcggggcaacctataaatctcgctaatgtcaacagtgatctatgaacttgatgagctgaattcaatgaggtatatagaaatcccgctagtacctccccaatcctgcttgcacacgcatcttccattggtggcatcgcaggccaggctgttgttgaagtcgcactggcacttctgggcgcagtcgtgtccgaatttgccggtatcgcacttcctttcgcaccgctcgcccgtccagccggcggcacaggtgcagcttccgttctgcggattgcaggcggcgttattgtggcagtcgcacaccttggcgcagtcctgtccgaagtggttcagatcacacggccggtcgcacttgatgtttttccatccggccgtgcacaagcactggcccgtctccggctcgcacttggctccgttctggcagtcgcagcgcagggcgcagtcctgaccaaaggtgcccggctcgcaactctcctcgcaggtgggtccgcgccagcccggcgcacataggcacgtaccattgaccggcgagcacttggctccgttcttgcagttgcaggtcagctcgcaattcgggccgtagcgcaggaaggtgcagggtctggtgcactgagcactgctccatccgatgctgcactggcaattccccgtctccgggtgacacagatccgtgtgctccatgtcgcactcgcaggtgcggttacagtccagcccgtacttgttcgcctcgcagatccgctcggcgcacttggcacccgtccagccgggattgcagatgcacgttccgttcgcccgatcgcacatggcatcgttcgcgcagtcgcaggtcatgctgcagttgaatccgtacgtgttcagctgacactcgtcgaagcagcgttctccgcgatatccgggcggacactcgcactggccggtgatgtggtggcagggcgctcccttgtagcactcgcagctctcttggcatccagggccgtagctgcccaccggacacttgtttgcacacacgtcgcccgtccagcctggattgcacatgcaggccccggtctctggctgacactttccgtcgttctggcagggacagtcctgctggcactgggcgccatgctttccatccggacagcgcatatcacatctagttggagcggagtattagtatgggttttgcgttggagcaggagcaaaatgaaacgtagaatgcaacggcctaaaatcccagccacgaaaaataattgattgcattctgcctttcattttgcctgatcctcggccagaagtttgtgccgccaaagaggccccttcgtccacttacaggggacccgtgaaaccgggagcacactggcattcgccggacacgtggtgacacttgccgccgttctcgcatcggcacttctccgagcagttggccccgaaaaagccctccggacagatgtccgcgcagcgtgctccggtgtagcccttggcgcactcgcagtcgcctgaaaagggctcacataccgcgttgttcaggcagtcgcactgcatcgagcagttccggccataccagccgggtgggcaatctaccgaagagtgacacaaacatggttagctgcggttacggatcacaaggtacgggttcgacagttagttgcttttttcttgcttttgcctttcgcttgctagccacgggaaacccaggagccggaagaagttccgctcccggaagctcccgttttggtggtggggattagtgaccgatagcctgcttgcacctgtataactgagccggagtgaactgcatgggtgcatgagagagagagagtggagtgtaggttgtgggtggtcggagttagatttcgggttaagatggcataaacaaaaaaaaaaacaaacaaaagctacaaagcaacatataacatatagcagaaatatagctacaaagacactacgtgcagatctttggtagtccaaagacggaatgcccttgcagaggctataaactatatacatttaaaccttaataataatcttgttttttgatattattattttgactagaatagcatatggttttcagacaaatttgatcatttccttcttgctgattgtaaaaacattcaattttgatgaaaattaaaaagtcagcgagcagattagtaatccattcgcctttctttcatgaagtaggagtgcctgtttctcgtccccggcagaaaaacgtgagctcggaactcgtctatgttgaattcgttgggtttgtagacaaaaggttccttgatcaccgacactgaactgacttttttcactagctcttcgaccggaggtgcgtccttggtcactttttttgtgatgccaagcatctgccaaatatcgtactccgactcctccgctactagtgactgtgccgcgaggctttggacacttggcgatggggtcgggcagaacggcaagcactccttcttcctcgccatgtcgttctctaccttttgcaccatcggatgcttcagcgtcttggcaaactccaaaacatcgccaatgctgggga

SEQ ID NO: 27059 - DNA, 1316 bp, DROSOPHILA
atgcagtgcgactgcctgaacaacgcggtatgtgagcccttttcaggcgactgcgagtgcgccaagggctacaccggagcacgctgcgcggacatctgtccggagggctttttcggggccaactgctcggagaagtgccgatgcgagaacggcggcaagtgtcaccacgtgtccggcgaatgccagtgtgctcccggtttcacgggtcccctatgtgatatgcgctgtccggatggaaagcatggcgcccagtgccagcaggactgtccctgccagaacgacggaaagtgtcagccagagaccggggcctgcatgtgcaatccaggctggacgggcgacgtgtgtgcaaacaagtgtccggtgggcagctacggccctggatgccaagagagctgcgagtgctacaagggagcgccctgccaccacatcaccggccagtgcgagtgtccgcccggatatcgcggagaacgctgcttcgacgagtgtcagctgaacacgtacggattcaactgcagcatgacctgcgactgcgcgaacgatgccatgtgcgatcgggcgaacggaacgtgcatctgcaatcccggctggacgggtgccaagtgcgccgagcggatctgcgaggcgaacaagtacgggctggactgtaaccgcacctgcgagtgcgacatggagcacacggatctgtgtcacccggagacggggaattgccagtgcagcatcggatggagcagtgctcagtgcaccagaccctgcaccttcctgcgctacggcccgaattgcgagctgacctgcaactgcaagaacggagccaagtgctcgccggtcaatggtacgtgcctatgtgcgccgggctggcgcggacccacctgcgaggagagttgcgagccgggcacctttggtcaggactgcgccctgcgctgcgactgccagaacggagccaagtgcgagccggagacgggccagtgcttgtgcacggccggatggaaaaacatcaagtgcgaccggccgtgtgatctgaaccacttcggacaggactgcgccaaggtgtgcgactgccacaataacgccgcctgcaatccgcagaacggaagctgcacctgtgccgccggctggacgggcgagcggtgcgaaaggaagtgcgataccggcaaattcggacacgactgcgcccagaagtgccagtgcgacttcaacaacagcctggcctgcgatgccaccaatggaagatgcgtgtgcaagcaggattggggaggtactagcgggatttctatatacctcattgaattcagctcatcaagttcatagatcactgttga

SEQ ID NO: 27060 - protein, 434 aa, DROSOPHILA
MQCDCLNNAVCEPFSGDCECAKGYTGARCADICPEGFFGANCSEKCRCENGGKCHHVSGECQCAPGFTGPLCDMRCPDGKHGAQCQQDCPCQNDGKCQPETGACMCNPGWTGDVCANKCPVGSYGPGCQESCECYKGAPCHHITGQCECPPGYRGERCFDECQLNTYGFNCSMTCDCANDAMCDRANGTCICNPGWTGAKCAERICEANKYGLDCNRTCECDMEHTDLCHPETGNCQCSIGWSSAQCTRPCTFLRYGPNCELTCNCKNGAKCSPVNGTCLCAPGWRGPTCEESCEPGTFGQDCALRCDCQNGAKCEPETGQCLCTAGWKNIKCDRPCDLNHFGQDCAKVCDCHNNAACNPQNGSCTCAAGWTGERCERKCDTGKFGHDCAQKCQCDFNNSLACDATNGRCVCKQDWGGTSGISIYLIEFSSSSS

SEQ ID NO: 27061 - DNA, 3569 bp, DROSOPHILA
tatcttgatacttggaagtagttaactttctttatcttgattattggaaacagtaagctttaatgagtattgagcaattgagattcaacacgttcgattaggcacaaggaagattagaaagtacctagatgtccgacccaggttacttcctatccctgatcgtggcactcaccctggtccagtttcaggaccttaagcagtccatccgttccggccactgcgatgtagccctcctccttattccaagcgatgcaattgagcttcacattattgggtatggcaatctggaggagagaccttgtagaccatttgttggtaccctaagtgaagcctacctttttgctgaggtaaacgaacatcttggagttgcaagtgcacttggattctttcagttctcttcaatgtttttccgcatttgctgtggcagcaaaactaattggtttccatggtgatcccaacttcggtttgtcagctggccaaagacccaagcctgttttgggcccaaaaagtggttcaattggtattggtggcaagtggcagtgaagcacctgctgccacctgttgctatcgaagcacctgtgtgtgttatcgagggcggcacatttaaaaagttgatgttctaccaagtagattaaaatgtttaattatgtcaaaggaacagactatgtttacttaaaataagatataggcaatacaaaaagttaagcttcttaaatgcaatagcttataatttaaacattgtagtttatgacaactgataaagttttccacatgaaataaaacctacccattatgacctaatcgatttgaaaacctttccaattgcgagtctagttacacagcattatcaagtaaataagtaggaattaaatcataaagataatatataactgaagtggactgtaatagattcctaatttcacaattccctacataaattgcatttctaatagttacttctacattaaattcagttaaatcacagggcacgcgggggatatcaggccagtcgaatacccctctttagcaattcgtgaaccagcttggtggccagaaacatgtagaccagcagaatgatgacggactcggaatgagagcgatcctctggcctgagaaagatgttcaccatgccggtcagaatgttggccaccaggaagaatgtcaatccatttttgttcagagcctggctaatcgtgaacggaacaacggatccgccccttttcttgaccacagcctcccccgatagaagacccttctcatgatcctcccacggattcggatcccacggcatgacgctgttgatcgcaaagtctatggctccgaaactggcacacaaagtggtgctcccgatggccagcatccatatgacatagcccagattgcaggtcacccgggagataccaatttcgtaggcactgatgacgaacgaggtccacaggataagcaccagatagaacagacgcctcagcttcctgacaaactcggagtaggtgagcagacttttcgccaccatccaacggttgacgtaaatggacagcaggaacagtccaacgaatcctggcaaggaaaccagaccttcgcgatttgcattaaggaaactcgagcgctccacatcctcgttcatcacatagtcggagatgcccaggacactcaggccaaactggtggatcaccaacaaacctgcaagcgaaactgtttagaacgaagtttggacgaagatccatggtctagtaccgaatcccaatggcagcaaatggagatccttgcgggccagaatgctgaccagagagcccaggaacttggtgaagcccagggtaaagaaggcattcagatgctggccgtactcatgggcatcctgcccgtaactcagagtcaaaattgacaccgtgcgcgccagtcccagcaggatgagcggcagggcagagtagatcacactccggcggagatctgaccagtgacgcgttctccgcgacaccatggccatggtgaaaacaaacagaccgatgccggtgtccatgagcttggctccgaactgcctgctcttgcggtatggcctatagaaactgccaaagtcgatggccagaatgcagacggcggtgatcaagtgggtcagcgcacggaggatggacaagcacatgggcctattgccgcccaagtcgaactgaacgcgggtgcgagcccgttccagagccctgctcgtgcgcagaaaccacaaggtggccacgagcattagcagtcctatgtagccactgtagtccacggccacggagacgagcagaatgcagggcaggatgaccaggaggaactccgtggcatagcagaggtcggcagagccatgaagcctcagcttttggcaaaccactcgagcgagcaaaatgcaccacaaggtggacaggattagcaggagggattcgccgctctggaccagggttccccaccagtcccagtcgtagacttgtactagatccaatcccaggcgctcctcgagggtttggttgaccgcactcggattcggaaatggactcgggctcacatggggaatgggttctgctgccgctcgactgtccatggcgactggcggcgggataccacttggactcgctcgtcggtggcctgataaaggtagaacttaatctgcccgttgatagtcgccacttatcggaaaccgtgagataggcatagtcatagccgatcgattcggggctccagtaaaaagcacgaaattctaaacaaaattcgttaaacttcaaacatctgaatgtcgctgatagcgactgaagtatttcgccaatgaatcgaggcattccgttggaagccactatatccgcatagccagcgcagtgataaggaagtccactcaatcatctcctatttggatcacttgtgtcactactacagcccttcaagattagggataacaatttcggaactcgtgccttgtttctcacggtgtacttacacacaattcctatctatgctctatttactttattcagcatttcgaagaccttggctactgataaattcaaaccacaatttgcttttatgggctgatatggtgtaggaaatcgtttggaaatgcacaagaatttacacaaaattatttatttacttgcatttgtattagtatttgacacctacgacatttacttcaaacataattataacttatttaccttgactaacactcattttaaatctaactttacaagccgatccattagtgtttgaactaggcgccacaataatcgattgctgacgttcgatagctggacaagtgaccacgaacaaaatcgtccagtctggcatcgcctgagcagttggtattttttagtgcttcgttaaattggcaaaaaagaggctcgtctgcggtcgcaaagtgataaaaccgcaaaaaagtccataaaatgttgtttatccagcaaataaagtgctctgactcaatgtcggatgcctagtctaagcgttcgcgaccaagtcagctggaactaaagttggggcagtgctaatgtgggtgagtattttcactttgccggcacgtgtttacttattttctatttattacccaa

SEQ ID NO: 27062 - DNA, 1515 bp, DROSOPHILA
atggacagtcgagcggcagcagaacccattccccatgtgagcccgagtccatttccgaatccgagtgcggtcaaccaaaccctcgaggagcgcctgggattggatctagtacaagtctacgactgggactggtggggaaccctggtccagagcggcgaatccctcctgctaatcctgtccaccttgtggtgcattttgctcgctcgagtggtttgccaaaagctgaggcttcatggctctgccgacctctgctatgccacggagttcctcctggtcatcctgccctgcattctgctcgtctccgtggccgtggactacagtggctacataggactgctaatgctcgtggccaccttgtggtttctgcgcacgagcagggctctggaacgggctcgcacccgcgttcagttcgacttgggcggcaataggcccatgtgcttgtccatcctccgtgcgctgacccacttgatcaccgccgtctgcattctggccatcgactttggcagtttctataggccataccgcaagagcaggcagttcggagccaagctcatggacaccggcatcggtctgtttgttttcaccatggccatggtgtcgcggagaacgcgtcactggtcagatctccgccggagtgtgatctactctgccctgccgctcatcctgctgggactggcgcgcacggtgtcaattttgactctgagttacgggcaggatgcccatgagtacggccagcatctgaatgccttctttaccctgggcttcaccaagttcctgggctctctggtcagcattctggcccgcaaggatctccatttgctgccattgggattcggtttgttggtgatccaccagtttggcctgagtgtcctgggcatctccgactatgtgatgaacgaggatgtggagcgctcgagtttccttaatgcaaatcgcgaaggtctggtttccttgccaggattcgttggactgttcctgctgtccatttacgtcaaccgttggatggtggcgaaaagtctgctcacctactccgagtttgtcaggaagctgaggcgtctgttctatctggtgcttatcctgtggacctcgttcgtcatcagtgcctacgaaattggtatctcccgggtgacctgcaatctgggctatgtcatatggatgctggccatcgggagcaccactttgtgtgccagtttcggagccatagactttgcgatcaacagcgtcatgccgtgggatccgaatccgtgggaggatcatgagaagggtcttctatcgggggaggctgtggtcaagaaaaggggcggatccgttgttccgttcacgattagccaggctctgaacaaaaatggattgacattcttcctggtggccaacattctgaccggcatggtgaacatctttctcaggccagaggatcgctctcattccgagtccgtcatcattctgctggtctacatgtttctggccaccaagctggttcacgaattgctaaagaggggtattcgactggcctga

SEQ ID NO: 27063 - protein, 504 aa, DROSOPHILA
MDSRAAAEPIPHVSPSPFPNPSAVNQTLEERLGLDLVQVYDWDWWGTLVQSGESLLLILSTLWCILLARVVCQKLRLHGSADLCYATEFLLVILPCILLVSVAVDYSGYIGLLMLVATLWFLRTSRALERARTRVQFDLGGNRPMCLSILRALTHLITAVCILAIDFGSFYRPYRKSRQFGAKLMDTGIGLFVFTMAMVSRRTRHWSDLRRSVIYSALPLILLGLARTVSILTLSYGQDAHEYGQHLNAFFTLGFTKFLGSLVSILARKDLHLLPLGFGLLVIHQFGLSVLGISDYVMNEDVERSSFLNANREGLVSLPGFVGLFLLSIYVNRWMVAKSLLTYSEFVRKLRRLFYLVLILWTSFVISAYEIGISRVTCNLGYVIWMLAIGSTTLCASFGAIDFAINSVMPWDPNPWEDHEKGLLSGEAVVKKRGGSVVPFTISQALNKNGLTFFLVANILTGMVNIFLRPEDRSHSESVIILLVYMFLATKLVHELLKRGIRLA

SEQ ID NO: 27064 - DNA, 7602 bp, DROSOPHILA
ctgcagcttctcgtggatccacgactccaactcgtcggcatcgcgcttgaagtactggaagcggcgcgagtcctcgagcttttcacgcttctggcgcgtctcgatcttgaagtcattgtagcgggacagaacctgctcacgtcgctcctggatgtcctcgactgtctcgaggatcttcacctctttgggtgtaaagttctccatttcgctggttcgtttacttgtctaattgcttaagtgtttcgttcgttttgatattgaaaagctgtaaaggtgttacgcaattaattgaaattgttgttttggtttctttacggactttaccttaagttgctctgggcgctggattgtttttaatttaatactgctgctgctgctaacccttcatcaaatgtttgaccgtgcccaactgtaaagaaaatgaagggggaacaattagtttaattctgtttaatcagcttcatgcgaacgcaatcagtcaattacttaattgttgggtcattcgtaaagtggaaaaaacaaaatcatgaaactgaatggctgactatcgtactacaagctttactctcctcaacgttgattttatatttcattcttatttcgtaatattttagtagtttaatgaatctaattttatttttaaagagtaatatgcaaatacctccttctgtaaactattttaactttttgactggcttggcaacaatcgtagaattctcatatggaatttccacttgcttgtcgactgttgctcaggtcgatgatcacatcgatcgacaacctcgtccccttatggtggcctcagtgttcgcacacactaaccaaactaaaagcgcgaatgtgacgcattctcgcgctgattaggttccatcagctaacgctatcttatcgggtacatagcgtggaccccgtttccattccatttccagcagacacatacaaaaagggaacactttattcgaaacataaacgttaaatgacataaccaacagttttaaacttaaaagttatccagatcccgcgataagtcggccagcatctccatgaagagatgcgacttggcctcgtcttcgggactatcgccagaggcgtaatgggcttcggaatcctttccggacagagagagttgctgcagaagttcggaaagcatgcaccacactttcggcgaccagttctcggcaaagagcggcatgaagagttcgttgagatgatcggcccgtatagctccagactgtagcatggatctaaggatcgtctccagcatccgaaagctgtccgcactgtttgccatctcctgcacaaaactaatgctgatcaagccgtcaaagattccgggtgaagctttactgtccataagctgctgtgatcgccacaccgaacagctggctgaaattatatccttgtcgaggaaattcggttttctggtaatgagcaactgaagcaaatgaactaatccagacccaatgaggtgatagaaaacagtgggcattttaggcaacaggaccgccttttgggcttttcgaagcagctcggccagatcttcttgactgcccacatattctggccgcaagctgaggcagtgcaaccactgctggagctgatagagaaactccgacaggctgaatccaatatccggactgagctggagctcactggagccgccgccacctgcagctgctgcatctgccttgttcctattgcagttgcacactttggtggctaactcctgaaggtcgccatgataaaatgtggactgaagcacgctcgactggagccactgttgcagctgagtctgggcttgcacccggattaaatgagcatatgtagaccgcaataccgcattggtgctggagggcagaaggccatccaaggagtgctctatgcgcctgtccagcatttggtgcacatgctccttccaacgctgacacgcattctccctggcatcttgaaagatctcatgcagctcctgaaacacctcctcgagcatcgtggatttaatttcgttgactttggcatccgcggaggccttcgacgggagcagaatctcctgctgggcgtccttaacgacacacttaaaagtgcgctccgtgacgaactcgatcaacctcctggtggacgcgttttgggattggagataggcatcgaccaatttgcgctgctgctgctccgcgggactcagttcgcttgccactatcgcgtccttggaaatggaactgctgttctgctgcaactgctccaaccgagtggttatgtaccggaaccgcccacttttcgcttgcctagagggcgtgatgctcacccggaattcctgcaggaaagggcaagccacgggcagaagttcgtccaacaagggggcgtgcgatttatcgtgacacgagaggtcctttaggcagatatccacaattgccgaaatgcttccgactccggcttcctgtgccctgtaattgtagtagccattaaccaactgcggctgtgcatccaaaagccatccaatgcagctcctggctatgaacacagctgctggttgcaattttgccatacgtatgtcggcatacaatccgtacagcagctccaaagtggccactgcgtccggaaggtgcaggctgaccaagtcgagcatcgccaggtattgaactaaccacggaagcgtaatcagcagcttgccctggcgcatggaacgttcgagtatctcgcggagattgaagtccggacgaaaatggttacgaagctgcaactgctgtggacaaagatatggcggcgttgggtttccatgttgcgtggtgccgctaaagggcatcacagttacgtagcccaagaacttggccaggataagcatgttagccatggtctggacgcgaacaatgtatggtccctgctgagcggactgctcctcgacagccacatcgtcagttagctggagcagatcaaaggtggagtcgttgttacgcattagttgcacaaagagctccagcttcaggtgcaccagaaatgctaccgatgagcatacggcgataaagtcgcggaagaaggcctgagagcgaggaaactgaccttccacactggaactggatgtcaccaagcgctgtgccagcttattgtgcctgaggggatccagctttaagcccagttcttcgggagattcggtggtctcggtagcggagatcaataattggttgacaaataattttgccaggtgcgtcatgttaactgggtgctccgatttcttatagatatccataatacgcggccccagttcgctgggaaagttgaaaccccgattcagatggctcacctcccaacgcttaagggctttgtaaaagaggtccctttgggacttgaaggccccgaactcattctgcgaaggaaagttatcccgcgagtcgttctccacgtgatagtatacattctgctgggaggacgaagaggtgtccatagcgaagggtgtggtcgaatcctgcctccgctgacagtgagtttccaattcttggacaactccttgcggcagcaggctcaatctctcgttttgtagcaagacactcaaagtccgtttgtcaagctgcagaagtaactttttctgattctccagcagttttgcggcaaagtatacacaacttttgtgctgggtgagtccctccaaagcactgggtacatacgatttgacgggtgattggccaaaatctcgcacatttagcagatggaccacaaaactaagttcacgtagtacgttgggcaccaaattgaggtccattaacaggctgtaaatggttgataggagctgcaagtgattggcattagccacaccctccaagctaatggcttcctcagggaaaacctcatcttcgggtgtcctctcctgttgactaacattcacaggcgcttcgcttttgatttcctgctttttgagcaacaggaacttgcgggcctccatttccagggctgcttcttggcttctatcgaagatttcgctgctctgcgagattcgccaaaagttattttcattgctaaaggaactggtgtctccgaaagaggagctggccgaaacattcttgctaatggtcatgggtaagacacgtcgccgcggcttggattgtggcgtggctccagctccagttcctgaacccaatgatgcatgttgattttgctgctgtttttggggcgtgatcttcttcttagatcgctgatggctctggataggtgtattgaccagaaagttgcccaagcagatgctgtgccctcctcctgctcccccaccgccgcttctgttaggcgtgctgcaaaactgggcgccacttcctggcgttgatcttctgccctgcggctgctggggagccggagtagtattcgaagtggaggacatactgcagctgctccggctaaggatcgaggactcattgagctgctgctgttcctcctccttgaccacatcggcgaccggcggcttgagctgatggatgggggtcaagggaaacacgggtgtctccgagttttgcgaatagtagtacctctttgtgctttgacgcagtgcacctaaaaagtaggtggcgaagtcctctagtgtgcagttactctggttatcacccttgccaacctttttaaaataggcgacgaacttttgctccagctggtggtgcggcaccttctccagttgcgcaagcagctgcagcagatgcctctcttccggcttcgtcatttctgtatctgacgctttgagctctgcagtcatgttccggtgatctattttctgtgccttagctcgagctattttcaacctttggccctcctccaatccctctctcccttttgtttccctgcaacggaagaggagagaagggaaatgttggctcggcttttgtgggtttcgttttctaagttatttttagagttgtttggatgggttgaagttgcaggattttcttttttttctgtataaacaatatgttttcacacaataaactaaatcaacgtaaacgacacgtaaaatgctacgagttgtgatgacttcatcacctgtactaaaagttgtaataaggttatagttaggcgggaaattatgaggaatatatttgtaggtcaggtttggaaaaacgcacatgtatgctaaacaaatttgtaaaggtattaaccttaacaataaaagaatagtaggtttctaaaagtatctaaatattgcatcaacaattttttgttgttaaagtataaatattttctatgaattcttataagatatcatttattttaatttccaaacttagttgatagcccataaaatcacatttctaatagtttccaatttttagtgctaaaaaaaaaaaaaaaacaactcagataagaaaagcagagaaatatctgaaattctcagctacactacacagaaggtaaaatagttaagattggccaagaatgattaatagagaaaagccaaggagtgaatttttgtcaatagagtaacatgaaatacaattagcactaacgataaggaaatccgtggaatgtccggattttaatacttaatacttcaaaatcgcccctttagaaggggtcagcagagcaagcaatgacatcatttaggggagagggtgggtcagcatgcagagaaacaaacaaacaacactctttgccacaggaaattgaaataaatcagagggagatggcaacagcccagggcttggcagccatacaatgttggagctcacatacaaacacacaggcaggccaatttaactgtttatcgcggtggcaaacaaaaacaacatcagaaacggcaattgcgagagatcgcacctcaaaaagagagcgaatagaaagagacggagagagcgaaacattaattgaagtgtctatcagaaaatagcagaggatgacgtaatgcgtacgctttggaattatgagcaatcaatgaagaggcacaaaaaatcaactggtacgcaagactactacgaacacggaatcgcctggcaagcaaacaaaaatatcctatgcaaacacaggccttcaagaaagtcaaggacacttgcccacccaaaactttggcatatgtaaggcaagcactttgctttttttttattcgtacttaaatatcttggaaacacaaacaagcaaagagagggagagtgtgctctcccgctttctctcatctgaagttgccgcaccaccaccaccacccgatgacgtacacacacacagcgttctctactcctgcgtaaccgcacacacacatgcacaacaggagcaccagatactttttcttaagttgcaattggagtcaagaattttgaaagaaattcaaaatttctattactaatcaagcagtgacattgcacagcatagcttttcagttatggccaagacttttctctcactttagccccgttaattggatttttgtgttgccttcgagggtgtggcgttgacccgaaaaattttcactttgcacgcacaccgaatttcaattgcattttgaacccaactaacagtgagctacggacgaaaactatgtagaaacttacactttgatggcaatctatttgttcacagttactttgttaatttaactattgatttgcagtagttattcgtaattttcacggagcgcctctatttcacgggaccgcagtttttttcaatatgtcggccgattggcgcagaacattgacatcaatatcgcgatttctatcgatgtcaatcgattataaacatagttctctttctggtcgctttggcgccttagtcatctcattatttttctagtagatgtagatgagtagtagtagatgatgtaaataaattaaaaacgacagggtatttcaattcaatctggtgcactcatgcatgactactatttcctagcgcggccccagagtaagcggggcttattatggtattattccgcaatagccctgcggtcacactaatttccagagcaatccaaaaaaaggaagcagccgaaaaagaacaaaaacctgcagcatttacattcaaatataaatccgaagcaaagaaacagcaaaatggtggactacagcaagtggaagaacatcgaggtgagcccactgctgggtgccaacccaaaaagtcctcctaatcggcacactaccttttagatttcggatgatgaggacgacactcacccaaacatagacacgccttctctgttccgctggcggcaccaggcgcgcgtggagcgcatggcggagatggaccacgagaaggacgagcttaagaaaaagcgccagagctaccaggcgcgcctcatggacgtcaaggagcggatctcaaagaaggatggcgacgaggaggccctgaaggtgggtcattgcaccgaatgcactgcgcacttgttgcttaggctaatgcctggtctgggagttccctatgttctcaatccatctaatttattcttattgtcaagcttatgattgactatcatcctaagtggccatccatctttcatcgcaatgcttaatccctaatttgtatcgcctacagaaagagctcgaaaagatcgaggccgagggcaaagagctggaccgcatcgagagcgagatgattaagaaggaaaagaaaacaccctggaacgtggacaccatcagcaagcccggcttt

SEQ ID NO: 27065 - DNA, 3904 bp, DROSOPHILA
tgaaatagaggcgctccgtgaaaattacgaataactactgcaaatcaatagttaaattaacaaagtaactgtgaacaaatagattgccatcaaagtggaaacaaaagggagagagggattggaggagggccaaaggttgaaaatagctcgagctaaggcacagaaaatagatcaccggaacatgactgcagagctcaaagcgtcagatacagaaatgacgaagccggaagagaggcatctgctgcagctgcttgcgcaactggagaaggtgccgcaccaccagctggagcaaaagttcgtcgcctattttaaaaaggttggcaagggtgataaccagagtaactgcacactagaggacttcgccacctactttttaggtgcactgcgtcaaagcacaaagaggtactactattcgcaaaactcggagacacccgtgtttcccttgacccccatccatcagctcaagccgccggtcgccgatgtggtcaaggaggaggaacagcagcagctcaatgagtcctcgatccttagccggagcagctgcagtatgtcctccacttcgaatactactccggctccccagcagccgcagggcagaagatcaacgccaggaagtggcgcccagttttgcagcacgcctaacagaagcggcggtgggggagcaggaggagggcacagcatctgcttgggcaactttctggtcaatacacctatccagagccatcagcgatctaagaagaagatcacgccccaaaaacagcagcaaaatcaacatgcatcattgggttcaggaactggagctggagccacgccacaatccaagccgcggcgacgtgtcttacccatgaccattagcaagaatgtttcggccagctcctctttcggagacaccagttcctttagcaatgaaaataacttttggcgaatctcgcagagcagcgaaatcttcgatagaagccaagaagcagccctggaaatggaggcccgcaagttcctgttgctcaaaaagcaggaaatcaaaagcgaagcgcctgtgaatgttagtcaacaggagaggacacccgaagatgaggttttccctgaggaagccattagcttggagggtgtggctaatgccaatcacttgcagctcctatcaaccatttacagcctgttaatggacctcaatttggtgcccaacgtactacgtgaacttagttttgtggtccatctgctaaatgtgcgagattttggccaatcacccgtcaaatcgtatgtacccagtgctttggagggactcacccagcacaaaagttgtgtatactttgccgcaaaactgctggagaatcagaaaaagttacttctgcagcttgacaaacggactttgagtgtcttgctacaaaacgagagattgagcctgctgccgcaaggagttgtccaagaattggaaactcactgtcagcggaggcaggattcgaccacacccttcgctatggacacctcttcgtcctcccagcagaatgtatactatcacgtggagaacgactcgcgggataactttccttcgcagaatgagttcggggccttcaagtcccaaagggacctcttttacaaagcccttaagcgttgggaggtgagccatctgaatcggggtttcaactttcccagcgaactggggccgcgtattatggatatctataagaaatcggagcacccagttaacatgacgcacctggcaaaattatttgtcaaccaattattgatctccgctaccgagaccaccgaatctcccgaagaactgggcttaaagctggatcccctcaggcacaataagctggcacagcgcttggtgacatccagttccagtgtggaaggtcagtttcctcgctctcaggccttcttccgcgactttatcgccgtatgctcatcggtagcatttctggtgcacctgaagctggagctctttgtgcaactaatgcgtaacaacgactccacctttgatctgctccagctaactgacgatgtggctgtcgaggagcagtccgctcagcagggaccatacattgttcgcgtccagaccatggctaacatgcttatcctggccaagttcttgggctacgtaactgtgatgccctttagcggcaccacgcaacatggaaacccaacgccgccatatctttgtccacagcagttgcagcttcgtaaccattttcgtccggacttcaatctccgcgagatactcgaacgttccatgcgccagggcaagctgctgattacgcttccgtggttagttcaatacctggcgatgctcgacttggtcagcctgcaccttccggacgcagtggccactttggagctgctgtacggattgtatgccgacatacgtatggcaaaattgcaaccagcagctgtgttcatagccaggagctgcattggatggcttttggatgcacagccgcagttggttaatggctactacaattacagggcacaggaagccggagtcggaagcatttcggcaattgtggatatctgcctaaaggacctctcgtgtcacgataaatcgcacgcccccttgttggacgaacttctgcccgtggcttgccctttcctgcaggaattccgggtgagcatcacgccctctaggcaagcgaaaagtgggcggttccggtacataaccactcggttggagcagttgcagcagaacagcagttccatttccaaggacgcgatagtggcaagcgaactgagtcccgcggagcagcagcagcgcaaattggtcgatgcctatctccaatcccaaaacgcgtccaccaggaggttgatcgagttcgtcacggagcgcacttttaagtgtgtcgttaaggacgcccagcaggagattctgctcccgtcgaaggcctccgcggatgccaaagtcaacgaaattaaatccacgatgctcgaggaggtgtttcaggagctgcatgagatctttcaagatgccagggagaatgcgtgtcagcgttggaaggagcatgtgcaccaaatgctggacaggcgcatagagcactccttggatggccttctgccctccagcaccaatgcggtattgcggtctacatatgctcatttaatccgggtgcaagcccagactcagctgcaacagtggctccagtcgagcgtgcttcagtccacattttatcatggcgaccttcaggagttagccaccaaagtgtgcaactgcaataggaacaaggcagatgcagcagctgcaggtggcggcggctccagtgagctccagctcagtccggatattggattcagcctgtcggagtttctctatcagctccagcagtggttgcactgcctcagcttgcggccagaatatgtgggcagtcaagaagatctggccgagctgcttcgaaaagcccaaaaggcggtcctgttgcctaaaatgcccactgttttctatcacctcattgggtctggattagttcatttgcttcagttgctcattaccagaaaaccgaatttcctcgacaaggatataatttcagccagctgttcggtgtggcgatcacagcagcttatggacagtaaagcttcacccggaatctttgacggcttgatcagcattagttttgtgcaggagatggcaaacagtgcggacagctttcggatgctggagacgatccttagatccatgctacagtctggagctatacgggccgatcatctcaacgaactcttcatgccgctctttgccgagaactggtcgccgaaagtgtggtgcatgctttccgaacttctgcagcaactctctctgtccggaaaggattccgaagcccattacgcctctggcgatagtcccgaagacgaggccaagtcgcatctcttcatggagatgctggccgacttatcgcgggatctggataacttttaa

SEQ ID NO: 27066 - protein, 1240 aa, DROSOPHILA
MTAELKASDTEMTKPEERHLLQLLAQLEKVPHHQLEQKFVAYFKKVGKGDNQSNCTLEDFATYFLGALRQSTKRYYYSQNSETPVFPLTPIHQLKPPVADVVKEEEQQQLNESSILSRSSCSMSSTSNTTPAPQQPQGRRSTPGSGAQFCSTPNRSGGGGAGGGHSICLGNFLVNTPIQSHQRSKKKITPQKQQQNQHASLGSGTGAGATPQSKPRRRVLPMTISKNVSASSSFGDTSSFSNENNFWRISQSSEIFDRSQEAALEMEARKFLLLKKQEIKSEAPVNVSQQERTPEDEVFPEEAISLEGVANANHLQLLSTIYSLLMDLNLVPNVLRELSFVVHLLNVRDFGQSPVKSYVPSALEGLTQHKSCVYFAAKLLENQKKLLLQLDKRTLSVLLQNERLSLLPQGVVQELETHCQRRQDSTTPFAMDTSSSSQQNVYYHVENDSRDNFPSQNEFGAFKSQRDLFYKALKRWEVSHLNRGFNFPSELGPRIMDIYKKSEHPVNMTHLAKLFVNQLLISATETTESPEELGLKLDPLRHNKLAQRLVTSSSSVEGQFPRSQAFFRDFIAVCSSVAFLVHLKLELFVQLMRNNDSTFDLLQLTDDVAVEEQSAQQGPYIVRVQTMANMLILAKFLGYVTVMPFSGTTQHGNPTPPYLCPQQLQLRNHFRPDFNLREILERSMRQGKLLITLPWLVQYLAMLDLVSLHLPDAVATLELLYGLYADIRMAKLQPAAVFIARSCIGWLLDAQPQLVNGYYNYRAQEAGVGSISAIVDICLKDLSCHDKSHAPLLDELLPVACPFLQEFRVSITPSRQAKSGRFRYITTRLEQLQQNSSSISKDAIVASELSPAEQQQRKLVDAYLQSQNASTRRLIEFVTERTFKCVVKDAQQEILLPSKASADAKVNEIKSTMLEEVFQELHEIFQDARENACQRWKEHVHQMLDRRIEHSLDGLLPSSTNAVLRSTYAHLIRVQAQTQLQQWLQSSVLQSTFYHGDLQELATKVCNCNRNKADAAAAGGGGSSELQLSPDIGFSLSEFLYQLQQWLHCLSLRPEYVGSQEDLAELLRKAQKAVLLPKMPTVFYHLIGSGLVHLLQLLITRKPNFLDKDIISASCSVWRSQQLMDSKASPGIFDGLISISFVQEMANSADSFRMLETILRSMLQSGAIRADHLNELFMPLFAENWSPKVWCMLSELLQQLSLSGKDSEAHYASGDSPEDEAKSHLFMEMLADLSRDLDNF

SEQ ID NO: 27067 - DNA, 8670 bp, DROSOPHILA
gaccaaggtgtgtaaaatcgatgcagctgctcctcgtcgctcagccaggtgagcacatggctatgcagtcgcttctcgttcagtgtggcgcgtatgaaggcacgtcctctgcccacattcgtccagatctgcttaaggtccatatacctctgacgttcgtggggcgtcaaatgcgtctggcagaattcccagaaagtggcgtcattgttgttgctgcctccgcccgcatttccggacaccatctcctgcatgttctggatgaagctggcggcgctgaaggaggaagtgcctgccgattgcctaagtccgtaggacattagttcctcgagggattcgcacagttcctgaacagattcatcccgctcagtggcaagttctttgccactgaacttctgtgagattttatgcgcactttcctgtagacgtcgaaagatgtcctcgcgccgttggccaaaggtgctgcccgccagttggctgcgcatgctccggaagcctgcctctgtgggcatcgagctggatgcattttctggcattatttgtggctattattcaactaattatattttctactcatttttctcactccgttgtgtgccaacactggttgcttgacaacaaaacaagccaaacagtgttgataagcgttggaatgggcgcattcagatcaccgattaatgattttaagtgactgtgactcagcattaggtgatttattaaaataaaaaaattgtttgtaaataatttatggtacctaaaaaacttataaaactataggttgcgttatcaaaacaaaccaattataactgaaagcgcttaatttctccaattcatattggtaaggtacaacgatttcgattaaaattgtgtttttactgagataagcagtattgtacacttatcgataacaatcactctgcattatttctcgctgaacgcgaccacttgtgcatccctggtgatttagcgggcaaaataatgccaaaacgctgttgtgcgactgtgtagccctggcgtataattgccatccctgctcgcgcaaatgcgaaagaagttagcacacaaaaatctgttaaaaactattgttaaacgattgaagatccaataatatgtcataccgcaagtgctagcaactggggaaacccaatccgaacgcgtccaacgtgcaaaagtgtaagtttgcatccaggggcagcaacgtcgtaaattttcttttctgttcgcgttggctgtctgcgcaaacgcttcattgacttttcgagattgaacccatgaaatgtaaccaaaaattctgataaatcggatatatgctcgaaccttattcagttgtgtgaaactccacgcggcggctgaaattccgaccgttacgacaggcttcaatcgcatttccgtacgcttccctcaccgcgcagcatctgcgtgcagaaaaggcaaaagtagaatgaaaaaaaaaggaaaacgggaacagaaggaggcaaacaaaacgaacaacgaggaacactgggattcggtcaggatttacagcccatatggccggaacattcgccggttccaggagctattcgtaaccaaacaaactgggagcattctatgttgcattgtccataaaattgcagcaagattagcaatcagcgtcaaatagatacggagatttctaaatatgaacataatattcttttaaaaattcgaattagcaggcagcttaaaaagtactaagtaaataactacgtagtttttagataggaataaatagggatttactttttaaattcgccccatcttgaccaatttttattatttcaaaacactaaactatttcaatgtttgttttcagtcaatgcgagttcgaaaaacaaaggaacgcgacacgcagcagtagaaagcaatactttttgaagagaacccagaaagctgtcccataaatgcttttgccatactgaccaatccggaatcgatagcaccattggcttaaaatgaacccatccgagctgcgcatgatgtggatgagtagtcagtacaactcggagcgcattacactggaggatgcggccactctgctgggtcatcccactgttggactctctgtcatggaggacctctccgcccatcagccaactttggtgagtgcagacggtttgattcagaagccaatctctcaattcgaagactaataaatataaaatgctttcaaatgagcatcgcgaaaacgagatacgtgtctatcactaaggcaccccattatatttgatagtcctcggagtcgaaaacaaacccaaattctttaggtttcaacgtgtactccttggggattggccaaatttccaaactatcttttttgtctgtctcagttataaacaattggaatttgtttacttatttcttctactttcttttctttgatttatatattggttacaatttaaatctcgacacaaaaacacacataaccaatggtcgatcctcaacccgaaccacctccaatctccaaaacccacaatgctcaaaaaaaggacatgaatccgatgatgagcctaatggggggagatttcactggtcaagcggcggcgactgctgcggcactgggtgtacagccgggcaccctgattgccaccaactcgaacaacctgtacggatttgcccacatgggcggcctgcagcagcaactgctccagcagtcggcggcggcggcagtcttccagaactatgcggaggcaatggataacgatgtggagaacggcatggttggcatggccatggaggcggtcgtggacgatgacgaccaagtgtacggtcagagggacaataactttgatgataatggatccgagttggagcccaagcaagagattatcaacatcgacgactttgtgatgatgaacgaggacaataattcgtacgatggcaccgactttatgacctcctccgataaggacatttcgcagtcctcctcctcctgcatggcacagatgcccggaagcttgggcgtccctggagtcgagcacgatcttttggttccactgcccgatggcctgctgcaccacaagctgctgggcacaactctggtccctgcgatgggtacgctaaatggcaatgcctttggcaacataatggtcagcactgaaaacacatccagcaagcaaatgcagcgcacctatagtacggccaagggagccaattccaccgcaaccaccgccacctgcagtgcctccacgtcctccgcattgcgatcacagcgcaagacgcgcaagatcgagcccgttaacaggccaggactggtgctgaagacacccatcgcctacaggggcaacattgacccttcggtgatccccatacagaaagatggcatgggtaaggttgctgtgcactagagtgggtcgattcttaattagaacattgcgggcagaaaagtaaacgataagtaacgataagtggtagagatcttagttgagatcatatattattaaacatcatcagtttgatgtacattgaacttatctaaaattccaaaagcctttgccttgtatttacaatctttcaaggcttgctctgtctactagcttatgtatttgataaagtaaatagttatttctttctaagtaattagtaatgattcgtttatttaaacaatgaaaaccacctgtaaatctgcaatcgatccactctacacgatattaattttcaagctttttattttaaatcctactcttagtttcacttatctttatggttttgggtttgttttgcaagaatttgggtttgtataccatgatagcatttaaattaaatacgaaattaacgtttacattaatatgcacttaaacgattcgttttttcttcttctacagctgtctgtaaacgttgtggcgccattggagtgaagcacacattctacacaaaatcgcgacgtttttgcagcatggcctgtgcccgaggcgaactatattcgttggtacttaacactaagatggagggagaccaggcaaccactagttccccggatcctggagcgggttcggagtcagccgatttgcctggcgatcagcaacagtcgcagtcggatattgagctcgatctgcatgcggcgcacattaagaatgcgaattatcgttttcgcattacggatcaatcaaagattacccagttgaatagcttcggcgaacccatgtcaatgggcggcgacgcagctgccaataatgtacaaatggcagcagatgaaacaattgctgcgttaaacggcggagcagtgggcgatgccactgctccgggcagcaccgaggagggtgcatccacacccaattcttatctgagcgcagcacccacgcccaaggccttgcgactttttaaggacatctacccacaggatgacctgccgcaaatacccaaatacgagcgccttcccgtaccgtgtccgcaaatggagaagataatcagcattcggcggcgcatgtatgatcccacacactcctacgactggttgccccgccttagcaaggagaacttcaatgcggcacccgtcacttgttttcctcatgcacccggttgcgaggtatgggacaatttgggcgtgggcatgaaggttgaagtggaaaatacggattgcgatagcatcgaagtgatccaaccgggtcagactcctacctcgttttgggtggccaccatcctggaaatcaaaggctataaggccttaatgagctacgagggtttcgatacggactcgcacgacttctgggtgaacctctgcaatgccgaggtgcattcggtgggttggtgcgccactcggggcaagccattaattccgccccgcaccatcgagcacaagtacaaggactggaaggactttctggtgggacgtttatccggagcccgcacccttccctccaacttttacaacaaaatcaacgacagcctccagtcgcgcttccgccttggcctgaatctcgagtgcgtggacaaggatcgcatttcgcaggtgcgcctggccaccgtcaccaaaatcgtgggaaagcgcctcttcctgcgctacttcgattccgacgacggcttttggtgtcacgaggactcgcccatcatccatccagttggctgggcaaccacagtaggccataatctggctgcaccgcaggactatctggagcgcatgttaggtaataatatttactttttctgcatacatgtttttacattaccattttaacattttacataccattcctacttccagctggtcgcgaagccatgattgaggttcatgaggacgatgccacaatcgagttgtttaagatgaacttcaccttcgacgaatactacagtgacggcaaaaccaatagctttgtggagggcatgaagctggaagcggtggatccactcaacctttcatccatatgcccggctacagtaatggcggttcttaagttcggatacatgatgatacgcattgattcctaccaaccggatgcctcagggtcggattggtgagctttaaaagcttcaatttaagtcggcaaatctaaatagcttctgttgtatttttttttaggttctgttaccatgaaaagagtccgtgtatctttccggctggattctgttccgtcaacaacatttcggttaccccaccgaacggctacgactctcgtacattcacctgggagggttacctccgcgacacgggagccgtagccgctggccagcatctatttcatcggattattcccgatcatggatttgaggtgggtatgagtctggagtgtgcagatctcatggatccccgactcgtttgcgtggccacggtggcgcgagtggttggtcgactactcaaggttcactttgacggatggacggatgagtacgaccagtggttggattgcgaatcagccgatatatatccagtcggatggtgtgtactggtcaaccataagctagagggcccaccgagagtagcacatcagcaggccccgaaaccggcaccaaagcccaaaatacagcgaaagcgaaagcccaaaaagggagcagcgggaggcaaaactccaaccgataataatactcagtcgggtaagttttttttttctaatcaaagtcattcgaattcctgtatatcatcatgcatcttcaaatgttattccagtcaaatcgcgtacaattgcgctcaagaccacgccgcacttacccaagctgagcatcaagctggagctaaagccggagcatcacaatgctgccttttacgagaacaatcagcccgaggaggaaggcgacgaggaggatcccgatgcggatggcgatggagacggaagcaccagccacatctccgagcagtcaacgacacagtcgtccagtgatctgatcgctggatcgggcagtggaagtgggtccgcctcgctggtaactctcgccacgggcagtaacaaaacggtaaagaaatctactactaaatctcctgcgccaccaactgtgggtcgcaaagccactagctacattgcggtgagtacttagcggaataatagtgcgtagagtcatccatctagccagccagcctgcttgcccgcctgaagttcagctcacgcatctaaacgggaggtccaaagagcatagtggtttttgttttaaacattaattaaattttatttagaggaattcccctttaatttatttgcctttttttttcgaaatagaagcatcagcttatacaccaaaatactccatattaatccaagtttgccttgtttagcttaagtttttgttatttcatatgaaatagattgtccgacccaacttaaaccactgtgctaaagctccgtaacacaactgcataaatgtatataaccaaaatcaaatcgttcataaaacgccaatttgtatataatttaatttacgcactgttatttttggtacttgcaacagccccaatagccccaacacaccgacatccaatcgttccgtcacacacccaaccagcaatgcaacatcatacgttaactaattaagtccttattttttaccccactatagaactcctctgcgacgaataataagtacattccgcgtctggccgacatcgattcgagtgaacctcacttggagctggtgccggatacatggaacgtgtacgacgtatcccagttcttgcgggtgaacgattgcacagcccactgtgacacgttcagccggaacaagatcgacggaaagcgactcctgcagctgaccaaggacgatatcatgccactgttgggcatgaaggtgggcccagcactgaaaatttccgaccttattgcacagcttaagtgcaaggttaatccgggcagagccagatcccacaagaccaacaaatcaccgtttttatagtgcgcggattttagttttttcaaagcaaaacgaaagttatcaccgatagaacacacacacacacttttatacgtgtacactactgcgtatgcatatataatatatatatatatatatatagatatatagatattgaagtattttgttagccctggaaatcgaaacccaaacgttgcctagaatggatcaaccatccatgatacaattgtataactaactcaagtctcacagcgcgttattttataccgattaaattgtaaaccgtagaccttaggcgtacgctcatgttatatcagtcagagttctatatcaacaattgtataaagatgattgaattgatgacagtgactttttttaaatcacgcatatttttataaaaataagagtaataacaatgcatgcaacacatgtattcacatgaatatatggggagattgcatagcatgggcttgtacagtgtacataaaataagccgtcgccgattatataggacccaagaatatcatattttatatagaagcaagcgcaagcaaataacccaggcagcatgccctcaactttcagtcgtaaacggagcgattggaagtcgctcctagtctgtaagatccacgattaactagccgctctctccttcggttaacttcgttccggtgtcacacatctctgcaaggagggcattattggtgtaaggcaaacttttgaagaaggcaaccttaatgataaaatatgtatttagatatccctaaggtaccagctaatgtcaagatactttaataaaaccgaattcaaaattgcaagtattgaaatatcgccgactaacttttatatgtgttggttttctttgggtttatatgtgctctacagtcaaaactcattttcatttctgttttttttttttttagattggtttatattctggatattaatacacttttaagacatatagactaaattcttactgctatgtttacactgcgtttggtggctatatatttatgctaggtttcgaataaacatttcaaacacgcacaccaaatttccaactcttatgaatattttgaaatccatgcgctgttacattttgatgtgggtgcgagtgtataaatgttaaaaaatagttgccataaccgatagaaatataaaatggtaaggagataacacaaaaaagtagaaaaagaatcatgtacaatacaaattaggggcgagtgcttatatacagagtgtttgtgtctagtttttaactaaaactaacgtatttttccgtttgcatttgcatagttttgaatatgttacgcttagaactagatttaaagttgaggcgctgcttctctttgaata

SEQ ID NO: 27068 - DNA, 4379 bp, DROSOPHILA
tgtagccctggcgtataattgccatccctgctcgcgcaaatgcgaaagaagttagcacacaaaaatctgttaaaaactattgttaaacgattgaagatccaataatatgtcataccgcaagtgctagcaactggggaaacccaatccgaacgcgtccaacgtgcaaaagttcaatgcgagttcgaaaaacaaaggaacgcgacacgcagcagtagaaagcaatactttttgaagagaacccagaaagctgtcccataaatgcttttgccatactgaccaatccggaatcgatagcaccattggcttaaaatgaacccatccgagctgcgcatgatgtggatgagtagtcagtacaactcggagcgcattacactggaggatgcggccactctgctgggtcatcccactgttggactctctgtcatggaggacctctccgcccatcagccaactttggacatgaatccgatgatgagcctaatggggggagatttcactggtcaagcggcggcgactgctgcggcactgggtgtacagccgggcaccctgattgccaccaactcgaacaacctgtacggatttgcccacatgggcggcctgcagcagcaactgctccagcagtcggcggcggcggcagtcttccagaactatgcggaggcaatggataacgatgtggagaacggcatggttggcatggccatggaggcggtcgtggacgatgacgaccaagtgtacggtcagagggacaataactttgatgataatggatccgagttggagcccaagcaagagattatcaacatcgacgactttgtgatgatgaacgaggacaataattcgtacgatggcaccgactttatgacctcctccgataaggacatttcgcagtcctcctcctcctgcatggcacagatgcccggaagcttgggcgtccctggagtcgagcacgatcttttggttccactgcccgatggcctgctgcaccacaagctgctgggcacaactctggtccctgcgatgggtacgctaaatggcaatgcctttggcaacataatggtcagcactgaaaacacatccagcaagcaaatgcagcgcacctatagtacggccaagggagccaattccaccgcaaccaccgccacctgcagtgcctccacgtcctccgcattgcgatcacagcgcaagacgcgcaagatcgagcccgttaacaggccaggactggtgctgaagacacccatcgcctacaggggcaacattgacccttcggtgatccccatacagaaagatggcatggctgtctgtaaacgttgtggcgccattggagtgaagcacacattctacacaaaatcgcgacgtttttgcagcatggcctgtgcccgaggcgaactatattcgttggtacttaacactaagatggagggagaccaggcaaccactagttccccggatcctggagcgggttcggagtcagccgatttgcctggcgatcagcaacagtcgcagtcggatattgagctcgatctgcatgcggcgcacattaagaatgcgaattatcgttttcgcattacggatcaatcaaagattacccagttgaatagcttcggcgaacccatgtcaatgggcggcgacgcagctgccaataatgtacaaatggcagcagatgaaacaattgctgcgttaaacggcggagcagtgggcgatgccactgctccgggcagcaccgaggagggtgcatccacacccaattcttatctgagcgcagcacccacgcccaaggccttgcgactttttaaggacatctacccacaggatgacctgccgcaaatacccaaatacgagcgccttcccgtaccgtgtccgcaaatggagaagataatcagcattcggcggcgcatgtatgatcccacacactcctacgactggttgccccgccttagcaaggagaacttcaatgcggcacccgtcacttgttttcctcatgcacccggttgcgaggtatgggacaatttgggcgtgggcatgaaggttgaagtggaaaatacggattgcgatagcatcgaagtgatccaaccgggtcagactcctacctcgttttgggtggccaccatcctggaaatcaaaggctataaggccttaatgagctacgagggtttcgatacggactcgcacgacttctgggtgaacctctgcaatgccgaggtgcattcggtgggttggtgcgccactcggggcaagccattaattccgccccgcaccatcgagcacaagtacaaggactggaaggactttctggtgggacgtttatccggagcccgcacccttccctccaacttttacaacaaaatcaacgacagcctccagtcgcgcttccgccttggcctgaatctcgagtgcgtggacaaggatcgcatttcgcaggtgcgcctggccaccgtcaccaaaatcgtgggaaagcgcctcttcctgcgctacttcgattccgacgacggcttttggtgtcacgaggactcgcccatcatccatccagttggctgggcaaccacagtaggccataatctggctgcaccgcaggactatctggagcgcatgttagctggtcgcgaagccatgattgaggttcatgaggacgatgccacaatcgagttgtttaagatgaacttcaccttcgacgaatactacagtgacggcaaaaccaatagctttgtggagggcatgaagctggaagcggtggatccactcaacctttcatccatatgcccggctacagtaatggcggttcttaagttcggatacatgatgatacgcattgattcctaccaaccggatgcctcagggtcggattggttctgttaccatgaaaagagtccgtgtatctttccggctggattctgttccgtcaacaacatttcggttaccccaccgaacggctacgactctcgtacattcacctgggagggttacctccgcgacacgggagccgtagccgctggccagcatctatttcatcggattattcccgatcatggatttgaggtgggtatgagtctggagtgtgcagatctcatggatccccgactcgtttgcgtggccacggtggcgcgagtggttggtcgactactcaaggttcactttgacggatggacggatgagtacgaccagtggttggattgcgaatcagccgatatatatccagtcggatggtgtgtactggtcaaccataagctagagggcccaccgagagtagcacatcagcaggccccgaaaccggcaccaaagcccaaaatacagcgaaagcgaaagcccaaaaagggagcagcgggaggcaaaactccaaccgataataatactcagtcggtcaaatcgcgtacaattgcgctcaagaccacgccgcacttacccaagctgagcatcaagctggagctaaagccggagcatcacaatgctgccttttacgagaacaatcagcccgaggaggaaggcgacgaggaggatcccgatgcggatggcgatggagacggaagcaccagccacatctccgagcagtcaacgacacagtcgtccagtgatctgatcgctggatcgggcagtggaagtgggtccgcctcgctggtaactctcgccacgggcagtaacaaaacggtaaagaaatctactactaaatctcctgcgccaccaactgtgggtcgcaaagccactagctacattgcgaactcctctgcgacgaataataagtacattccgcgtctggccgacatcgattcgagtgaacctcacttggagctggtgccggatacatggaacgtgtacgacgtatcccagttcttgcgggtgaacgattgcacagcccactgtgacacgttcagccggaacaagatcgacggaaagcgactcctgcagctgaccaaggacgatatcatgccactgttgggcatgaaggtgggcccagcactgaaaatttccgaccttattgcacagcttaagtgcaaggttaatccgggcagagccagatcccacaagaccaacaaatcaccgtttttatagtgcgcggattttagttttttcaaagcaaaacgaaagttatcaccgatagaacacacacacacacttttatacgtgtacactactgcgtatgcatatataatatatatatatatatatatagatatatagatattgaagtattttgttagccctggaaatcgaaacccaaacgttgcctagaatggatcaaccatccatgatacaattgtataactaactcaagtctcacagcgcgttattttataccgattaaattgtaaaccgtagaccttaggcgtacgctcatgttatatcagtcagagttctatatcaacaattgtataaagatgattgaattg

SEQ ID NO: 27069 - protein, 1243 aa, DROSOPHILA
MNPSELRMMWMSSQYNSERITLEDAATLLGHPTVGLSVMEDLSAHQPTLDMNPMMSLMGGDFTGQAAATAAALGVQPGTLIATNSNNLYGFAHMGGLQQQLLQQSAAAAVFQNYAEAMDNDVENGMVGMAMEAVVDDDDQVYGQRDNNFDDNGSELEPKQEIINIDDFVMMNEDNNSYDGTDFMTSSDKDISQSSSSCMAQMPGSLGVPGVEHDLLVPLPDGLLHHKLLGTTLVPAMGTLNGNAFGNIMVSTENTSSKQMQRTYSTAKGANSTATTATCSASTSSALRSQRKTRKIEPVNRPGLVLKTPIAYRGNIDPSVIPIQKDGMAVCKRCGAIGVKHTFYTKSRRFCSMACARGELYSLVLNTKMEGDQATTSSPDPGAGSESADLPGDQQQSQSDIELDLHAAHIKNANYRFRITDQSKITQLNSFGEPMSMGGDAAANNVQMAADETIAALNGGAVGDATAPGSTEEGASTPNSYLSAAPTPKALRLFKDIYPQDDLPQIPKYERLPVPCPQMEKIISIRRRMYDPTHSYDWLPRLSKENFNAAPVTCFPHAPGCEVWDNLGVGMKVEVENTDCDSIEVIQPGQTPTSFWVATILEIKGYKALMSYEGFDTDSHDFWVNLCNAEVHSVGWCATRGKPLIPPRTIEHKYKDWKDFLVGRLSGARTLPSNFYNKINDSLQSRFRLGLNLECVDKDRISQVRLATVTKIVGKRLFLRYFDSDDGFWCHEDSPIIHPVGWATTVGHNLAAPQDYLERMLAGREAMIEVHEDDATIELFKMNFTFDEYYSDGKTNSFVEGMKLEAVDPLNLSSICPATVMAVLKFGYMMIRIDSYQPDASGSDWFCYHEKSPCIFPAGFCSVNNISVTPPNGYDSRTFTWEGYLRDTGAVAAGQHLFHRIIPDHGFEVGMSLECADLMDPRLVCVATVARVVGRLLKVHFDGWTDEYDQWLDCESADIYPVGWCVLVNHKLEGPPRVAHQQAPKPAPKPKIQRKRKPKKGAAGGKTPTDNNTQSVKSRTIALKTTPHLPKLSIKLELKPEHHNAAFYENNQPEEEGDEEDPDADGDGDGSTSHISEQSTTQSSSDLIAGSGSGSGSASLVTLATGSNKTVKKSTTKSPAPPTVGRKATSYIANSSATNNKYIPRLADIDSSEPHLELVPDTWNVYDVSQFLRVNDCTAHCDTFSRNKIDGKRLLQLTKDDIMPLLGMKVGPALKISDLIAQLKCKVNPGRARSHKTNKSPFL

SEQ ID NO: 27070 - DNA, 3438 bp, DROSOPHILA
cggaacggcagtcatcaaattctggagcccccgtaagtagtacagattctccacatgcactacaaaatccggcgaaaaggggcgtccgaagacgatctccagatacttggttagggacaccccataaatttccaactgccctagactaatccgtttcactggtgctgcatctcgtgcatagtgttcaaatttcatatctgatttgtacatttcttgtatggcattatccagaggcgctatctcctttgccaattttggtggcagaccaatattttgcagcgactctatgaaacggaatagagaatcgtactttttttcaaaaactactatgggttggccactgtcactgttcggatcctgtcttatactcattccaaacatgatgtcattgaagccgtaccgacgcagtcgagccagtgcctccatccactgaaacttctccttgggccacttgcctcctcggggcgtcagaaagggccagttgagatcttctcccggcttcaccagctcaaaatacctcagaagactgggtctctccatggtcgaacagattttgtatagacgctgcaacttttcctcgaagctgtgcttctcgaacacctcgttctcaattccgtcgaagaggagttggaactgatcgctcaccgtcgcaaatgcatgccacttgagattcttttgggaggagttgtagaaattgtgacatggttcgactttttcatccatgtcgtctagcattcgcttcatgatctcgagattgggatttgcagaacatactgtactgcacagaagaagaagcagccagcttaggctgaggtacgatctggattccatcatcttaactcatcaactgatgcggcatttggaagtaatcagcaatgacttctaagaaacctgatgaaattatacgaaattttaaatctgttgttttggcgaattgcggtgtgaccctaaatcgttttgtaccatatgcttaattatgctttttcgtgtcacgacgcacttttttttttccaaactcaccaatcattttatacttgaattatgaaaactataaacaaaactcccagttgttgtaacgaaataaaaaacgaaattcactttgtgtaaaactctgctctgaacaaaagcctttttttttatcagttaatacgtttagcttagcgatttgtgggtatgaagggaaattggtttgaggagagcaaatgcataaattcacttaaagactatggtgtccagcatggcgcccaggcactgcacaatattgttctgcataaccttgtccaccttctcctccaaatgccgcttggggtcctgcttgcccacgttcttgatcgccagctgctcgggcgtcattttctcctcgtcctccagtgactgcaagaaaatgagggaaatcaatgaaaatccaaaaaaattctagtttttcattaaattggctaaccaaccaataaattaatatctaatgagatgatgaatcacccaccttgttgtagttcttggcgagatccagcatctcggccacggtgtcctcgttgatggaacagtgctcattgtagtcggacaacgtgaggccgtccttccacgactttttgtgcagattgagaagcatcttctgctccagttcgttcttgcggtagtttatgctaatcgagtagtagtggcgattgagcccgtggatcagggcctgtacggagggcttttgcagatgacccaaattggaggttgtctgccggggctcctgtcccagcacaagcatgttgggattgatcaggcggaaggcatcgatgaccactttgcccttgacagactgaatgggatcgacgacgacggctacggctcgctccgacagcgcctcgaaggattgctgcgtattgatgtccacgccggacagccagcagccgaaaccgggatgcgagtgataccagccgacgaccatttcgggtcgacccgtctgcttcagcatgtccaacatcttcgcctgaaagacgggatccacggcctctacggatactccagtacccgtttgcggcatggcgaacacatcgatgacctgcaccgtgtagtcgtccacgaattcgcccaacatcagacccatcacctccatgggcacgccggcccgtccgtgcttaagcatcttgagcagggccaaggacgagatgtacacctgctcggcggtgtctacgacgggcgcatctgtgggcggggcggcctgtggcatagcacctccaagacgtagcagacgatccattttatgcggctacccgggcacaaggatacgaatcggggttagaaacaatcgaaaagcgctgactaagccaagtgctcacctctgggatttgtagacactctgtgatcgggggcaagtatcaactatttcctactgttttacgtgtaatttacgttcctcgtcgaaagcagcaacaaaaaacacaaagccgtctcgtttgattttgcagaattgcaagtaatactcgcaacagggttgtatcgctcatcgcctatcgaaaagctatcggcgggaggagatgacgatttgcctaaattttagcttgattatagcaaagctataaaaatatttcaattacgttcaatgtgtaatcaaagctaagctttagttgttgttatgtaaataatatgagaatacgtaactatagtagggaataatgaaattaactagttgttgtcaaggatgtattggaaaggctacttctaccaaagttatttcatataaaaataaaattaacctaattataaagagtccgctgtaatattttattctatattcttcagattatttgtagtagtcaatttgtttgtggaatattttagcatatatttaagtctgctatttgccagcactgatcaacactgtctttatatcgatacataaaactatcgataatgggaattggcgccaagctcgaaatttttaagcggataaaacttaaaaagcaaactcaaaggacttgaaagtactggaaagagtgtattccgatgttatatttggtacaacaatagaatgagtgtgtagtgtggtcgaaagtgaagtgagctgaggaaaactaagactttccgcaagaccgaacaccacaaaatttataatgcaccatccatccgcccgtcaaatgccatgggaaatgaggtcttcgccggcaaaaccgaaacaatttgagcaagtacaatgcagagccgccttttgtttttattgtgccaattaattgcaccaaaaaccttttgccttttggatgcggcgccttctttatgcctttcacctcgctcttggcgatggggattccgattaagagattcccagaccgccagacgctcgaaaattcgcttaaaatgccatcaaaaggtgggacgacgccacacaccggctacaaaatccaaagcccaaaatccatccgattgcaacacacggactactccattttccgt

SEQ ID NO: 27071 - DNA, 1176 bp, DROSOPHILA
cggctttgtgttttttgttgctgctttcgacgaggaacgtaaattacacgtaaaacagtaggaaatagttgatacttgcccccgatcacagagtgtctacaaatcccagagccgcataaaatggatcgtctgctacgtcttggaggtgctatgccacaggccgccccgcccacagatgcgcccgtcgtagacaccgccgagcaggtgtacatctcgtccttggccctgctcaagatgcttaagcacggacgggccggcgtgcccatggaggtgatgggtctgatgttgggcgaattcgtggacgactacacggtgcaggtcatcgatgtgttcgccatgccgcaaacgggtactggagtatccgtagaggccgtggatcccgtctttcaggcgaagatgttggacatgctgaagcagacgggtcgacccgaaatggtcgtcggctggtatcactcgcatcccggtttcggctgctggctgtccggcgtggacatcaatacgcagcaatccttcgaggcgctgtcggagcgagccgtagccgtcgtcgtcgatcccattcagtctgtcaagggcaaagtggtcatcgatgccttccgcctgatcaatcccaacatgcttgtgctgggacaggagccccggcagacaacctccaatttgggtcatctgcaaaagccctccgtacaggccctgatccacgggctcaatcgccactactactcgattagcataaactaccgcaagaacgaactggagcagaagatgcttctcaatctgcacaaaaagtcgtggaaggacggcctcacgttgtccgactacaatgagcactgttccatcaacgaggacaccgtggccgagatgctggatctcgccaagaactacaacaagtcactggaggacgaggagaaaatgacgcccgagcagctggcgatcaagaacgtgggcaagcaggaccccaagcggcatttggaggagaaggtggacaaggttatgcagaacaatattgtgcagtgcctgggcgccatgctggacaccatagtctttaagtgaatttatgcatttgctctcctcaaaccaatttcccttcatacccacaaatcgctaagctaaacgtattaactgataaaaaaaaaggcttttgttcagagcagagttttacacaaagtgaaaaaaaaaaaa

SEQ ID NO: 27072 - protein, 308 aa, DROSOPHILA
MDRLLRLGGAMPQAAPPTDAPVVDTAEQVYISSLALLKMLKHGRAGVPMEVMGLMLGEFVDDYTVQVIDVFAMPQTGTGVSVEAVDPVFQAKMLDMLKQTGRPEMVVGWYHSHPGFGCWLSGVDINTQQSFEALSERAVAVVVDPIQSVKGKVVIDAFRLINPNMLVLGQEPRQTTSNLGHLQKPSVQALIHGLNRHYYSISINYRKNELEQKMLLNLHKKSWKDGLTLSDYNEHCSINEDTVAEMLDLAKNYNKSLEDEEKMTPEQLAIKNVGKQDPKRHLEEKVDKVMQNNIVQCLGAMLDTIVFK

SEQ ID NO: 27073 - DNA, 5776 bp, DROSOPHILA
ggagtacttcaccgtgggttatgccatatatgtggccaccgccaccgattcctaccctgtgatttacgtggcagccctgcgaactcatattctcttgctcaaggaccgtatcatttacttgggcgatcccagcaacgagggtagcagcgacccgagctacatgtttaaatcgttggtggattgtatcaaggcacacagaaccatgctaaagtaagtcagtttcattatcctaccggaaatatcaacaaccgtgaattatgttttcactcaacggatctgaatttattcggaaaactgaataaaagtacaacttttataagaactcgctattgatatttctgaatatataagagtatatttttacattcaggataaaataaatggtatatcaaacgattcgacataaaactattttatttcaaataaattagcttacattttttaaaatatatgcattaatttaaattttcaatgttaaaaacccatcccactgtttcccatgcagtttttgtgatgccattcaaccaatcatctctggcacgatatttgcccaattcatcatatgcggatcgatcctgggcataattatgatcaacatggtattgttcgctgatcaatcgacccgattcggcatagtcatctacgttatggccgtccttctgcagacttttccgctttgcttctactgcaacgccatcgtggacgactgcaaagaactggcccacgcacttttccattccgcctggtgggtgcaggacaagcgataccagcggactgtcatccagttcctgcagaaactgcagcagcccatgaccttcaccgccatgaacatatttaacattaatttggccactaacatcaatgtaagtccactgctctcggttagaacggggaaggaagcaaagtccgaacttcaatccttgcaggtagccaagttcgccttcaccgtgtacgccatcgcgagcggtatgaacctggaccaaaagttaagcattaaggaatagaaaggaatactcaatacaattgaccgcaccagaggtaaacgtacatagttttatgaacttaacacttttttgcttcgtagaattataataattgtatatgcatacagcgaattatgaataaacataatctagttaaaacaaatattgatcgaacaatgggaagtaaagaaaatcgctacatatgtataccgtacagcccctgcagaagtctatttgtaggctgggaacctggaaccttgtcctcggcaattggaatatgttcctacagaggccggattcatcggctgtgatctggtcaataggttcacttgatccctgcgactggccttttctttgaatgaggtgctgggtgtcggaagatggagttagtgacgcgttggcgagaattgcacattttatgcgaagcatggagtatttttagctcgcttctagttcgaatgtttcggcggcagtttatttcgggctaggaggaagggtagcggagggtcgacacgaatctaagtttattgatgatatttttaatggctggcatagatgaaacagcgaaagttgttcatttaacaaaaacttaggcgagataactatatgtgtctttgtgtccctccattcgctctagatactccttctcgatcaggatgtctatgcacttcttgatcacgggcaccttaggcttaaagcgcgttgacagctgattaagcacctccgatatgagattggtgtggttgagtcgtttgcgcatcttcatgatgcggacgatcgccgcctggatcagtaattttcggtcctcctctatgtgcttatgtacagtctcctgctccactttaagttcagtcttcaaaggctggttgatgttaattcggcgcttcttgtttttgtaatcgaggaacagctccaccgtcgactctggcgtcagcgagttctcattgtcgctggaggtcagcaccttcgccttgagcagtatttgcaatacctgaagaaattcttacataagtctctattaattctatctattgacactactctcacctgaatcaagttctcctgctgcgtctgtgtgttgtcctgcagttgctggactgtaaaactgagctgatcgttaaactggagcagcactgacatttggaaggtgctggcctgcagggtgtaggtggaggaattattgcggttgacgttcattatcagttcgcccttgcacatctgatacaaccagttgagcttgcggccagagtggcgggcggcgtagaactcattgaactgtcgcactgaccgctccagctcagatggtagcaggaagttgttgctcagctggaaaggccaagagcctgaggacaggacttcgatgccaaagtctatttccatggtcaagttcttttcggccaggtactgcttaaagtacgagttcaagtcctttgagacgccaatgtcctggaacatcctctgaagcttgacggtgtattcgtaaccacatgtctgcttcagtttggagatcatcatagcctcggcgtcatccgaagccgatgtgtggttaaccaagcgcttagcaagcatcttggagtaatatttttggaagacgtccttatcctcgatatacttgaacacgaccatcacctggttaagattgtcctcgagctccttgtcctcgggatttttcgaggatttttttaataacagatcgcagtacttggccagcaattcgggcgacttgctagcactgtttgcgatcgtgaccacgttcgagtttatgaactttccacacgccttgtccaaagcggccacaaatccgttgtcattgttgaacgccgtcagaacgagggcgttgtacttcttgtgcacgtccaggatggtctgtacgtacgtcttgggatcgttggccgcgtcggtagtgcaacacttggcaatggcctccgtgccctggtggagtatatggttctcaaggatggacttgagatctgtcaggtttttggacgagagggcgaccaaggagtacatccgtttcagatcatcgtttcggtctgcgttgagcagattctgaaactcggtgtgaaagattttcagatgtttttcgataagaacctgaaagacattgattcggttagtaggcggctttaaagttggacacggtaggcaatcccacctcttcgcatgtggacttcagcacatccgctgtggtctcgtgcagataggaaagaccgttctttgaattaaagccgcggacgcgctgcgtctcctcctccagcctgttttcgacgtgcttcagatactcggtgaccgtgttggtggacagaaaggcgtccgactccttctcgtagaaggctgatgtgtctgcgatgaacttgttttcaaagttttgcttgtagacggataacttctgctgctcggcatcggtatcctcctcgttaaagctgagctccacgtagcactcgataacgtcgcggaccagcgaccggttaatgagcttgccttgacgctcctcctcaatggacttgagcactgccttggtgaccggctcatttagcacttggaacaaatgtcccttccaggcgacgagggccagtcggtagatcttgtagatacccttctgcccctcctcgcactcgcgcttcacccagttccgattcaggtagttgcagatgccgtccagaacggtactggagaactgatacgacttccactgtttggtgtagcgcgacaggagtacctcctcgccgctgatggccttgaacttggtgagcagctcgctcaggtatgacttgagaaattgttccagccggtcgtacagcttcttgcccaccagctgcgctccgcctgtctttccgctgctccgtccgcttggagccgcgctcacgctggtgcagtagtcatagacgtgagtgtagaaacgcatgtactggctgcgggtgagggacttctcgtgctcaaacacctgcataatgccctcgaccaattcgctccagatatcgtccaggttgacgagtttctgtgtggtctgggaattgccggagcggttcattctggcggcggtgggttgtggcaacggccttctgccttcttccactggaggatgctgtccctgcagtggcgctgggctggagaaggcaatgaccctaggtggcgaatgctgcgcgggcgacaggggattgctgctgctttccaggtggcgtcgtttcgcggctctcgtccttggagttgtggccggaatcttggcgaatcggtgttccaattttggaatttaaagtgtcaatctgcagatgagagaatcggtacaaaaacggaatgggattgggaatgtagtaggcctcgccacgttaaaagcgacgacccgaaggtcgcctattatgatccaatgtcacagcaataaaagagaggcttgcggaatacacacacacacacacatgcacgcacaagctgtaatgcaatgcgcggtggtcggacatgccctgcaatgtagggtattggccaatcgcatggcaggtgaagccccaccaccgcccccgctatcgttagatcgtgttcgaaaacccaacttcctggttaaataaacactcgcatgcacacatatgcagtcgccctcgccttcacacacacacccgcacccacacaaaggcacataaagccaagagaaaagatagcggacataaccatttcacaactaaattgttaacatttttttcgatttttcacatagctccctccaaacgaaatttattttcctggtaaattgagccgtgcgactgagttttcttttcgtgacgtcgtgatggatttgatttccccttggagcacacacactttttctcttttgttcgccattttcaaagcacgaaatcccgtctctttgcatttccctcattttgctttatattacctgttgccagacgctgctaaaattaaaactaaaactaaattaaaattgtgtttcactgctttgcttataattaaattaattttttttttctgtgaaaattgctaactttcgtttattcctaactattaaaatgtgtgaccgttcggccattgcgctgcaaggccctcgacggtggtatcgcttaagaccagctatcgttggcgatctatttattgggcgccactattggtggcgatctcatttttcagggaattctttacacggaaagcagttatattatagtttataatatcaaatatcgctgttaggctcttcaaagcgtgatgtaaaatatcggcaacgcggttcgtatcttagattttacaaatccgttagcggttacagaaaccttcttatagatgtcattttcctgggcacacttcctggaacttgagaacaatctatactttatataaaacgattggtcttagcacttgcataataaaacccttttcaaataattagggtatgcttatatagtcttatacaggttcaccctaatgcccgtacgaaacacaactcctccaggactcaaaccaatgtgaccgtgtatagaaggcatacgcatttacttcaatttcgattcgtttgctttgacatgtgcggcaactctgacgccaagcaaaacaaaaacagtgcagcaaagaaatttaaaaggtcattgtttatgcttagaagcggctatatttagtaattttgatagttggatacgaaaagatgtcctgtcgctgcttctgcttagtggctgcagcactgctgctgctgttcttccaccagcaatcctgtgacgcagccacccagacgccccaaaagacggtggtaattgcggagcagagtgcgccggctgctgaggtggaggccaaaaagc

SEQ ID NO: 27074 - DNA, 3262 bp, DROSOPHILA
ggaaatcaaatccatcacgacgtcacgaaaagaaaactcagtcgcacggctcaatttaccaggaaaataaatttcgtttggagggagctatgtgaaaaatcgaaaaaaatgttaacaatttagttgtgaaatgattgacactttaaattccaaaattggaacaccgattcgccaagattccggccacaactccaaggacgagagccgcgaaacgacgccacctggaaagcagcagcaatcccctgtcgcccgcgcagcattcgccacctagggtcattgccttctccagcccagcgccactgcagggacagcatcctccagtggaagaaggcagaaggccgttgccacaacccaccgccgccagaatgaaccgctccggcaattcccagaccacacagaaactcgtcaacctggacgatatctggagcgaattggtcgagggcattatgcaggtgtttgagcacgagaagtccctcacccgcagccagtacatgcgtttctacactcacgtctatgactactgcaccagcgtgagcgcggctccaagcggacggagcagcggaaagacaggcggagcgcagctggtgggcaagaagctgtacgaccggctggaacaatttctcaagtcatacctgagcgagctgctcaccaagttcaaggccatcagcggcgaggaggtactcctgtcgcgctacaccaaacagtggaagtcgtatcagttctccagtaccgttctggacggcatctgcaactacctgaatcggaactgggtgaagcgcgagtgcgaggaggggcagaagggtatctacaagatctaccgactggccctcgtcgcctggaagggacatttgttccaagtgctaaatgagccggtcaccaaggcagtgctcaagtccattgaggaggagcgtcaaggcaagctcattaaccggtcgctggtccgcgacgttatcgagtgctacgtggagctcagctttaacgaggaggataccgatgccgagcagcagaagttatccgtctacaagcaaaactttgaaaacaagttcatcgcagacacatcagccttctacgagaaggagtcggacgcctttctgtccaccaacacggtcaccgagtatctgaagcacgtcgaaaacaggctggaggaggagacgcagcgcgtccgcggctttaattcaaagaacggtctttcctatctgcacgagaccacagcggatgtgctgaagtccacatgcgaagaggttcttatcgaaaaacatctgaaaatctttcacaccgagtttcagaatctgctcaacgcagaccgaaacgatgatctgaaacggatgtactccttggtcgccctctcgtccaaaaacctgacagatctcaagtccatccttgagaaccatatactccaccagggcacggaggccattgccaagtgttgcactaccgacgcggccaacgatcccaagacgtacgtacagaccatcctggacgtgcacaagaagtacaacgccctcgttctgacggcgttcaacaatgacaacggatttgtggccgctttggacaaggcgtgtggaaagttcataaactcgaacgtggtcacgatcgcaaacagtgctagcaagtcgcccgaattgctggccaagtactgcgatctgttattaaaaaaatcctcgaaaaatcccgaggacaaggagctcgaggacaatcttaaccaggtgatggtcgtgttcaagtatatcgaggataaggacgtcttccaaaaatattactccaagatgcttgctaagcgcttggttaaccacacatcggcttcggatgacgccgaggctatgatgatctccaaactgaagcagacatgtggttacgaatacaccgtcaagcttcagaggatgttccaggacattggcgtctcaaaggacttgaactcgtactttaagcagtacctggccgaaaagaacttgaccatggaaatagactttggcatcgaagtcctgtcctcaggctcttggcctttccagctgagcaacaacttcctgctaccatctgagctggagcggtcagtgcgacagttcaatgagttctacgccgcccgccactctggccgcaagctcaactggttgtatcagatgtgcaagggcgaactgataatgaacgtcaaccgcaataattcctccacctacaccctgcaggccagcaccttccaaatgtcagtgctgctccagtttaacgatcagctcagttttacagtccagcaactgcaggacaacacacagacgcagcaggagaacttgattcaggtattgcaaatactgctcaaggcgaaggtgctgacctccagcgacaatgagaactcgctgacgccagagtcgacggtggagctgttcctcgattacaaaaacaagaagcgccgaattaacatcaaccagcctttgaagactgaacttaaagtggagcaggagactgtacataagcacatagaggaggaccgaaaattactgatccaggcggcgatcgtccgcatcatgaagatgcgcaaacgactcaaccacaccaatctcatatcggaggtgcttaatcagctgtcaacgcgctttaagcctaaggtgcccgtgatcaagaagtgcatagacatcctgatcgagaaggagtatctagagcgaatggagggacacaaagacacatatagttatctcgcctaagtttttgttaaatgaacaactttcgctgtttcatctatgccagccattaaaaatatcatcaataaacttagattcgtgtcgaccctccgctacccttcctcctagcccgaaataaactgccgccgaaacattcgaactagaagcgagctaaaaatactccatgcttcgcataaaatgtgcaattctcgccaacgcgtcactaactccatcttccgacacccagcacctcattcaaagaaaaggccagtcgcagggatcaagtgaacctattgaccagatcacagccgatgaatccggcctctgtaggaacatattccaattgccgaggacaaggttccaggttcccagcctacaaatagacttctgcaggggctgtacggtatacatatgtagcgattttctttacttcccattgttcgatcaatatttgttttaactagattatgtttattcataattcgctgtatgcatatacaattattataattctacgaagcaaaaaagtgttaagttcataaaactatgtacgtttacctctggtgcggtcaattgtattgagtattcctttctat

SEQ ID NO: 27075 - protein, 774 aa, DROSOPHILA; identical to SEQ ID NO: 2640

SEQ ID NO: 27076 - DNA, 3916 bp, DROSOPHILA
atttttatgatattaattttatatttaatcgagtgtttggcagtattaaaccatttacgcaaactgtttacatatttaaaattcgaagttggaatataaaaagctttagtagaataaattaaaaattaaacagccaaattgtatagccattttacaatgcttaagactaaaacggaaaaagatatacctcgtcataactttacaagtttttattttaaaaaatattacaatttgctagataaattgtgcctaaagtaatcagatttagctgcgaaacaatatgcattaaaatacttttacaaaatactatagaaacagcgaacgggatttgaatttaaatggttggttcgggtattcaactggatagatattcttgccattctcagttcaaagctatttacgtgcagatttcataaattaagcattaaagcatgagcatctttgttgtttgtcttcgctaaactaaatgactgtcttgtgcgtggaacttaaaacttaggaaaaacatacacacgggctacattcaaaagataagggggctatgctaattccaaatcactcggttacagctcgattcaaacaaaacatcataagactatttacagcagtagtgaacagatagatatcttttaaaacgtaataatacacttagcgaactatgttacaactttcaacttatgcctttgatgttgttctttgctagatcttcttctccttctccttctcgtctcacatcttctctattagcttccgtataaaaacgtaatgattctgcggaggtgttgcctaacatttataatgaaggtgtgtctgtctgtggtggtgattgggtgccatagtacatataaatgtttgtgtttgtttgtgtttctgtttctgtttatgctcgacgggatgacataatgcggcggacacactcatcatcgccctcaaagtgctcgtgtgtctaggaaggatgcgtgtatatgcctggccagtgcttgtgctgcgccgtcgagattcactcgataaagttgaagcgagtgagcagcttgtggtagaaccaccgcaccacctgctggactcgtccggccagccaggcgcaaaggctgctggtgtggcgcaccatcgacgcgtagtgcttgatgtgatctgtgcagtagagagttaagagggcaaccaaaagtatagcgaaatcatagagagaaaagcgatacagcctagggcgtatagatattttgaaaaaggatataataaagtccagggtggatggccgccgttaatgtagttcacataggtgaatccgtccttgcccttgccccgtatattgtagtagtagggcaggaatgagtgaagcgtaaatctaaagagacaaaaaacagtttgcacactattaatagaacaaggccacgacgacagaggtggtggaataccttctcttctcgtagaaaaatatggcaggttgattggtggtcagcgtgtgcaggaagatcgccttcaccgaatgccgctcggccgtcgtcaggtggttcattagcgcgtccaacagcagcgatccgatgccattgcgtcgatgcgaacgatggacgcccagcgacagtatataaccgacatcggcggaacgacccatcgagtccggcaggatgcccttgtcctgcatgggaaaaccgctcagcctggtgtacaactcatcactatcactcatattggctattacctccttgttcacatttcgatagggtttgatttcggcaacgattaaaccaattatggccagattatatacagctgccagcgcaaagaagcgcgtgcttgaggtaatatcctcataccatgatagtggatagtcgattggaaaccattcttggcacagctgtcgcacctacacacacgatcatcacatggagatgtaaatgtggggggattatctgcattagatgatgaactttattcactaacctccgtcagatcgtcgggcaccaggaaccttagctgcacatcgttaatcgagcacagcggtacgtgttcgcagtccacacgcgtactctcgctactgggcggcgcactgtgtttgttgtagctgcaatgctcgcaatggtatgataatgtttcatgatcctcatgtattagtcaagccaaaaggcggcgaaacattgagttcccttgcataataccgccgaagcgccgtcaatagataaacaaaagcggcccattgacggggctccggtgtccgcataagcaggaaatccgtgagcagcccgactgataaccaaatagttatatgtacgtatactcacagtgtgaattgtgccatcctattgcaagggggggtgctgctgctgctgatggtgctggtgctggtgctcctccgttcccactgccactgccactgcgtctgctgctgctctgtccaattagagcaattatgtccatttattgcagcaccaccgccaccgccgttgtcgcctgtacaggttaagcgcgaaatcttgtccaacggagccttctcctccgggtgagtgattcgtattcgtattcgttttcagtttggtgcgtgtttttgggtgtgcgctcaattggctttaattaacatttacattgagctggagcatggagcatgcagcacggagaggggggcagcgtgtcgccggatcatgtagaaaccacttgctctcgctggtgtgcgggtgctccgctgattttgattttggttttaaactgggacttttgggtctcaagtggaatcgttggctctttggggagggtgggagaatcccttacaacgctggccaggtggtgctgatgcgctgatggtgtcggtgtcgcatgccgctgctgctgcccgctggtcacaattcagttggcccgcgatgatgcctcatttgtcctaatttattcgccaagccaaaaagaattaatgaaaacaaatcagcagtagtgagaccgcactcggggctttcaaacataccacgcgatgggggtggacccacctgtttcgatagtatcgatacattgtctaattcaaagagcatttaacactccgattggaaattaatatttatttttgttttgaaatattattatctgatttttggtgcacattttcttaacgcttatcaatattttacataaatagacatttaagaaaacacaatttcttgatgaaaaacgtatatttccactttggatgtaatgcctaaactaatatttatatttttaaaaatatttaatcttaagacatatagaaacccgtttttaatgtttaaaacctcctcgtctgtcccactgcctgggaagtgctcggcgctggagcgccctgcttgctaggatcctccagcacccgcaccaccatcgaggatttggggccagtgcaccaggtaatgccattctcgtccaccacgaatgtttccagcgtcacctggaagtgcccgccattggagatgggcaacaggaagctgccggagaggaaatcgcgctggggctttacaatctgattgagggtcacagtatcgttggcgccctgcttgggcagctcttgcgaggatcgcggtggcggcgtgattagctgtgaggtgaggcttaattgaacggactccacgcgacggaagtgtttcttctgcttgctaaagtgctgcaggacaccctcgaccttgataaccagattactgcccgactggacattcacgggttcggtggcgctccttggctgcggactcaccgatagcttgatctgtgtggactgcagaatctggaagaagtaacgcggcaggcagagcggtgtctttgttatgatctcgatctgcgcaatgatgacatccaaatgtcggttactaatggtcttggcattggccggctcctgtggcaggtttttttgcatctgctccatgcgctggcagcttgcggcaaagtagcgcgtctccgggtgatcgcctgtggt

SEQ ID NO: 27077 - DNA, 1487 bp, DROSOPHILA
tactgctgatttgttttcattaattctttttggcttggcgaataaattaggacaaatgaggcatcatcgcgggccaactgaattgtgaccagcgggcagcagcagcggcatgcgacaccgacaccatcagcgcatcagcaccacctggccagcgttgtaagggattctcccaccctccccaaagagccaacgattccacttgagacccaaaagtcccagtttaaaaccaaaatcaaaatcagcggagcacccgcacaccagcgagagcaagtggtttctacatgatccggcgacacgctgcccccctctccgtgctgcatgctccatgctccagctcaatgtaaatgttaattaaagccaattgagcgcacacccaaaaacacgcaccaaactgaaaacgaatacgaatacgaatcactcacccggaggagaaggctccgttggacaagatttcgcgcttaacctgtacaggcgacaacggcggtggcggtggtgctgcaataaatggacataattgctctaattggacagagcagcagcagacgcagtggcagtggcagtgggaacggaggagcaccagcaccagcaccatcagcagcagcagcacccccccttgcaataggatggcacaattcacactctacaacaaacacagtgcgccgcccagtagcgagagtacgcgtgtggactgcgaacacgtaccgctgtgctcgattaacgatgtgcagctaaggttcctggtgcccgacgatctgacggaggtgcgacagctgtgccaagaatggtttccaatcgactatccactatcatggtatgaggatattacctcaagcacgcgcttctttgcgctggcagctgtatataatctggccataattggtttaatcgttgccgaaatcaaaccctatcgaaatgtgaacaaggaggtaatagccaatatgagtgatagtgatgagttgtacaccaggctgagcggttttcccatgcaggacaagggcatcctgccggactcgatgggtcgttccgccgatgtcggttatatactgtcgctgggcgtccatcgttcgcatcgacgcaatggcatcggatcgctgctgttggacgcgctaatgaaccacctgacgacggccgagcggcattcggtgaaggcgatcttcctgcacacgctgaccaccaatcaacctgccatatttttctacgagaagagaagatttacgcttcactcattcctgccctactactacaatatacggggcaagggcaaggacggattcacctatgtgaactacattaacggcggccatccaccctggactttattatatcctttttcaaaatatctatacgccctaggctatcacatcaagcactacgcgtcgatggtgcgccacaccagcagcctttgcgcctggctggccggacgagtccagcaggtggtgcggtggttctaccacaagctgctcactcgcttcaactttatcgagtga

SEQ ID NO: 27078 - protein, 287 aa, DROSOPHILA
MAQFTLYNKHSAPPSSESTRVDCEHVPLCSINDVQLRFLVPDDLTEVRQLCQEWFPIDYPLSWYEDITSSTRFFALAAVYNLAIIGLIVAEIKPYRNVNKEVIANMSDSDELYTRLSGFPMQDKGILPDSMGRSADVGYILSLGVHRSHRRNGIGSLLLDALMNHLTTAERHSVKAIFLHTLTTNQPAIFFYEKRRFTLHSFLPYYYNIRGKGKDGFTYVNYINGGHPPWTLLYPFSKYLYALGYHIKHYASMVRHTSSLCAWLAGRVQQVVRWFYHKLLTRFNFIE

SEQ ID NO: 27079 - DNA, 5122 bp, DROSOPHILA
ctgataaccaaatagttatatgtacgtatactcacagtgtgaattgtgccatcctattgcaagggggggtgctgctgctgctgatggtgctggtgctggtgctcctccgttcccactgccactgccactgcgtctgctgctgctctgtccaattagagcaattatgtccatttattgcagcaccaccgccaccgccgttgtcgcctgtacaggttaagcgcgaaatcttgtccaacggagccttctcctccgggtgagtgattcgtattcgtattcgttttcagtttggtgcgtgtttttgggtgtgcgctcaattggctttaattaacatttacattgagctggagcatggagcatgcagcacggagaggggggcagcgtgtcgccggatcatgtagaaaccacttgctctcgctggtgtgcgggtgctccgctgattttgattttggttttaaactgggacttttgggtctcaagtggaatcgttggctctttggggagggtgggagaatcccttacaacgctggccaggtggtgctgatgcgctgatggtgtcggtgtcgcatgccgctgctgctgcccgctggtcacaattcagttggcccgcgatgatgcctcatttgtcctaatttattcgccaagccaaaaagaattaatgaaaacaaatcagcagtagtgagaccgcactcggggctttcaaacataccacgcgatgggggtggacccacctgtttcgatagtatcgatacattgtctaattcaaagagcatttaacactccgattggaaattaatatttatttttgttttgaaatattattatctgatttttggtgcacattttcttaacgcttatcaatattttacataaatagacatttaagaaaacacaatttcttgatgaaaaacgtatatttccactttggatgtaatgcctaaactaatatttatatttttaaaaatatttaatcttaagacatatagaaacccgtttttaatgtttaaaacctcctcgtctgtcccactgcctgggaagtgctcggcgctggagcgccctgcttgctaggatcctccagcacccgcaccaccatcgaggatttggggccagtgcaccaggtaatgccattctcgtccaccacgaatgtttccagcgtcacctggaagtgcccgccattggagatgggcaacaggaagctgccggagaggaaatcgcgctggggctttacaatctgattgagggtcacagtatcgttggcgccctgcttgggcagctcttgcgaggatcgcggtggcggcgtgattagctgtgaggtgaggcttaattgaacggactccacgcgacggaagtgtttcttctgcttgctaaagtgctgcaggacaccctcgaccttgataaccagattactgcccgactggacattcacgggttcggtggcgctccttggctgcggactcaccgatagcttgatctgtgtggactgcagaatctggaagaagtaacgcggcaggcagagcggtgtctttgttatgatctcgatctgcgcaatgatgacatccaaatgtcggttactaatggtcttggcattggccggctcctgtggcaggtttttttgcatctgctccatgcgctggcagcttgcggcaaagtagcgcgtctccgggtgatcgcctgtggttagaaatacaggcggttccggaggcgtggcgtagcaaatcgactcgatgatgtgggcgaaaagagcgcactgaaattcagccacctccagaaactccagcgtcacgtgatccgcatcgaaagaggatttgtatagcctagcgtaagtctcctcgcaggcctttagtgccttcaccagcttgcgcagctggttcgtgacatgaccaaacttttgcagatagtcgcgcgagttctgggccaaacttccagctattgccggtggcggcacaatcacctgggcattctttacggtcacagccaggtgaagggtctgcagaaactgcgcccttatcttcagatactccaactgaaaggtgcacggatgctggggcgaggagccagctcgcaggctggccagcgcttgctgatagagattactagccatttccaagcgcttcatcagcggaattagaggttccggtgccacctttggtgcataattgtcccgcatgtaggcgtattccaagccatagttaagaatgcactccgcctgcgagatctgcgacagtgccaccaggaaatagtgcatatgatcgctgatcacaatctgggagaccttggtgtaaatgtgagcagccacatagtggtgaccatagcgactagcagtgcgtgcaatcctatacagcgtccagcagttaagcctaccgaggcatttctcaaagcactgaacaaccttttgcggcaggtaacagcccatggtggtttgtagaaccagagaactcaggatctccacgctgcgcaactgttgatcgcaattctcctggtcgataatggtgttcagcttgtgcagaatgagcggcaaacgagctagcatgggatttatctgtggttaaattagaaattagaaattgtttcatagatgtattaatgcattagataccttgggcgggggcaactcatcggtgtccatcgcgttttcgtctactatcaaatcttctgcggtggaaaaggcgtacttacgcagctgaaagtgctcacacagacccgccagtgcctcgcacataagttccgcattggctggcggataggcacccttatctcccaggctattggtcacgatcccaatgaaggatgttccaaattcagcgttggctttagtgatccttataccgtatgtcagcaccctacggagatcgcgggtgcactccgaccgcttggccgtgcaaaggagcaatccttccatgtgcaggttgaccatatgaagaatatcgtccacctgctcgccgctgccctttttttttaaaccaaatgctactagaaccgacaaaactgccatggcctgagtggcggtggtgtagtcgtccagcttgctaatgcactggatgcacaaacggagcagggctacgcgatgctcgcgaagcagctgctggcaagtaagcgggcactcgcttaacttcagcaggattgagaggaagaggaactgctccttggaattggtacacaattcaaaacgatcaatgagcgctttgatggctggcttgggccaggcatgaacgctctgacgtccggccaactcgttgaaagatcgcagcacctgtatgcgtactggtgtccttaagtcctgcatgaaatccagcagaacatccagctgaccgggcactcccaccagcgttcgtgatgacaattgagtgagcgtgtctatgatggccaccacaaagctctgggctggatatttgggcagcagatccatgcacagtctgctaaccagtgacgctgtggtagcctcgtgatgcatgtgtcgcaacacgggaatcaggagcagcttcattggcaccggcacctgaagcgattcgatcatgtccgaaatcttggcgcacatgctgatggcaaaggaacttgactgggcggcaaagcagctgctggcatagatggcagcctccacctcgacggtatcgtggctatccagagcacgtcgaatggcatgatgaacctgttgcttctcgggaatcacacgggaaacggcgcccaaggtgcgcaggaggagagcacgcgccaccggatcgttggagtgcatcaccacaaagatacagcgcacaaagctgtcaatgttgaggatcttgtccagatgattctcgctctgctggcaaacacggagcacccagaagcgcagcagattcgatccgctgacaaagtaatcggccagcttaatgaacgacgagttgatgagaatgggaaacggatacttctcgaagaggcgcggaaagcggacgaccgcctcgcactggattccctgcttggtgctccgcagtcccttgtccagttccatgagcaccgcattcgagtcgtgctcattttcgttaaggaagctctcgttgaaggtgctcacgcgggtgccggtcaggtgagacatggttacaggtttcctcactcacatttatcgcagataaatcgtgtttattgaggttttcattagccaaacgacacaaaaacaaaccggctgcaaatgcttcttcttgctaatttgtcgttcgtaggaaactccggtatcattgcagcgatagctggtcacttaacagtaaaaaaaacgtttgaatccaaagtctatattgtcaattctttataagcgtttgtcgatcgataataaaattatcctgatttctaaaataagaaaaaaatcaatttaagaaacaactattaacttagaaaattatgtagaaagtgatgtagcctattattctcactccttctttgtctctgtgtagataatttgcaaatctgctaaggtcacactgctcgctatttgttgaatttgttaatgttttgaaattatgtttgttttgactaaaggcacgtaaaaatggtctaaaacacagagattattagtttattcattttttaaatactctttatagatgacgaaaagtttgtgttgtttcctggcaaaaaggtgtacaccattggtcgcctggccacggatttaattgttgcgcaggacctcagtataagtcgcaatcatgcccagctgctcatccaaacggaagcggatggcgatgacaccctgcatatcgaggaccttggctccagatatggcactttcattttccccaagaattcccaaaagccgcgcaaggtgcctgccaaaacatcgactccattgcctgtgggcacacgcttgcgatttggcgcaaacatgagcatttggcaggtgacccaactgaagttggttacaactgtctccgcattaacgcgttccgaggtccaggagctcacgaagatgcttgaacccatgggcggcacggtcacttcgaactggaccgaagagtgctcccatctaaccatgaacgaagtttcggtgaccgtgaaactactgcacgctatgctcgagaataagccgattgtgacattcccctactggcgaaagatgctgcaggcagcgcagagcatccatgtcaaggagggctggcctcag

SEQ ID NO: 27080 - DNA, 3065 bp, DROSOPHILA
tgaaaacctcaataaacacgatttatctgcgataaatgtgagtgaggaaacctgtaaccatgtctcacctgaccggcacccgcgtgagcaccttcaacgagagcttccttaacgaaaatgagcacgactcgaatgcggtgctcatggaactggacaagggactgcggagcaccaagcagggaatccagtgcgaggcggtcgtccgctttccgcgcctcttcgagaagtatccgtttcccattctcatcaactcgtcgttcattaagctggccgattactttgtcagcggatcgaatctgctgcgcttctgggtgctccgtgtttgccagcagagcgagaatcatctggacaagatcctcaacattgacagctttgtgcgctgtatctttgtggtgatgcactccaacgatccggtggcgcgtgctctcctcctgcgcaccttgggcgccgtttcccgtgtgattcccgagaagcaacaggttcatcatgccattcgacgtgctctggatagccacgataccgtcgaggtggaggctgccatctatgccagcagctgctttgccgcccagtcaagttcctttgccatcagcatgtgcgccaagatttcggacatgatcgaatcgcttcaggtgccggtgccaatgaagctgctcctgattcccgtgttgcgacacatgcatcacgaggctaccacagcgtcactggttagcagactgtgcatggatctgctgcccaaatatccagcccagagctttgtggtggccatcatagacacgctcactcaattgtcatcacgaacgctggtgggagtgcccggtcagctggatgttctgctggatttcatgcaggacttaaggacaccagtacgcatacaggtgctgcgatctttcaacgagttggccggacgtcagagcgttcatgcctggcccaagccagccatcaaagcgctcattgatcgttttgaattgtgtaccaattccaaggagcagttcctcttcctctcaatcctgctgaagttaagcgagtgcccgcttacttgccagcagctgcttcgcgagcatcgcgtagccctgctccgtttgtgcatccagtgcattagcaagctggacgactacaccaccgccactcaggccatggcagttttgtcggttctagtagcatttggtttaaaaaaaaagggcagcggcgagcaggtggacgatattcttcatatggtcaacctgcacatggaaggattgctcctttgcacggccaagcggtcggagtgcacccgcgatctccgtagggtgctgacatacggtataaggatcactaaagccaacgctgaatttggaacatccttcattgggatcgtgaccaatagcctgggagataagggtgcctatccgccagccaatgcggaacttatgtgcgaggcactggcgggtctgtgtgagcactttcagctgcgtaagtacgccttttccaccgcagaagatttgatagtagacgaaaacgcgatggacaccgatgagttgcccccgcccaagataaatcccatgctagctcgtttgccgctcattctgcacaagctgaacaccattatcgaccaggagaattgcgatcaacagttgcgcagcgtggagatcctgagttctctggttctacaaaccaccatgggctgttacctgccgcaaaaggttgttcagtgctttgagaaatgcctcggtaggcttaactgctggacgctgtataggattgcacgcactgctagtcgctatggtcaccactatgtggctgctcacatttacaccaaggtctcccagattgtgatcagcgatcatatgcactatttcctggtggcactgtcgcagatctcgcaggcggagtgcattcttaactatggcttggaatacgcctacatgcgggacaattatgcaccaaaggtggcaccggaacctctaattccgctgatgaagcgcttggaaatggctagtaatctctatcagcaagcgctggccagcctgcgagctggctcctcgccccagcatccgtgcacctttcagttggagtatctgaagataagggcgcagtttctgcagacccttcacctggctgtgaccgtaaagaatgcccaggtgattgtgccgccaccggcaatagctggaagtttggcccagaactcgcgcgactatctgcaaaagtttggtcatgtcacgaaccagctgcgcaagctggtgaaggcactaaaggcctgcgaggagacttacgctaggctatacaaatcctctttcgatgcggatcacgtgacgctggagtttctggaggtggctgaatttcagtgcgctcttttcgcccacatcatcgagtcgatttgctacgccacgcctccggaaccgcctgtatttctaaccacaggcgatcacccggagacgcgctactttgccgcaagctgccagcgcatggagcagatgcaaaaaaacctgccacaggagccggccaatgccaagaccattagtaaccgacatttggatgtcatcattgcgcagatcgagatcataacaaagacaccgctctgcctgccgcgttacttcttccagattctgcagtccacacagatcaagctatcggtgagtccgcagccaaggagcgccaccgaacccgtgaatgtccagtcgggcagtaatctggttatcaaggtcgagggtgtcctgcagcactttagcaagcagaagaaacacttccgtcgcgtggagtccgttcaattaagcctcacctcacagctaatcacgccgccaccgcgatcctcgcaagagctgcccaagcagggcgccaacgatactgtgaccctcaatcagattgtaaagccccagcgcgatttcctctccggcagcttcctgttgcccatctccaatggcgggcacttccaggtgacgctggaaacattcgtggtggacgagaatggcattacctggtgcactggccccaaatcctcgatggtggtgcgggtgctggaggatcctagcaagcagggcgctccagcgccgagcacttcccaggcagtgggacagacgaggaggttttaa

SEQ ID NO: 27081 - protein, 1001 aa, DROSOPHILA
MSHLTGTRVSTFNESFLNENEHDSNAVLMELDKGLRSTKQGIQCEAVVRFPRLFEKYPFPILINSSFIKLADYFVSGSNLLRFWVLRVCQQSENHLDKILNIDSFVRCIFVVMHSNDPVARALLLRTLGAVSRVIPEKQQVHHAIRRALDSHDTVEVEAAIYASSCFAAQSSSFAISMCAKISDMIESLQVPVPMKLLLIPVLRHMHHEATTASLVSRLCMDLLPKYPAQSFVVAIIDTLTQLSSRTLVGVPGQLDVLLDFMQDLRTPVRIQVLRSFNELAGRQSVHAWPKPAIKALIDRFELCTNSKEQFLFLSILLKLSECPLTCQQLLREHRVALLRLCIQCISKLDDYTTATQAMAVLSVLVAFGLKKKGSGEQVDDILHMVNLHMEGLLLCTAKRSECTRDLRRVLTYGIRITKANAEFGTSFIGIVTNSLGDKGAYPPANAELMCEALAGLCEHFQLRKYAFSTAEDLIVDENAMDTDELPPPKINPMLARLPLILHKLNTIIDQENCDQQLRSVEILSSLVLQTTMGCYLPQKVVQCFEKCLGRLNCWTLYRIARTASRYGHHYVAAHIYTKVSQIVISDHMHYFLVALSQISQAECILNYGLEYAYMRDNYAPKVAPEPLIPLMKRLEMASNLYQQALASLRAGSSPQHPCTFQLEYLKIRAQFLQTLHLAVTVKNAQVIVPPPAIAGSLAQNSRDYLQKFGHVTNQLRKLVKALKACEETYARLYKSSFDADHVTLEFLEVAEFQCALFAHIIESICYATPPEPPVFLTTGDHPETRYFAASCQRMEQMQKNLPQEPANAKTISNRHLDVIIAQIEIITKTPLCLPRYFFQILQSTQIKLSVSPQPRSATEPVNVQSGSNLVIKVEGVLQHFSKQKKHFRRVESVQLSLTSQLITPPPRSSQELPKQGANDTVTLNQIVKPQRDFLSGSFLLPISNGGHFQVTLETFVVDENGITWCTGPKSSMVVRVLEDPSKQGAPAPSTSQAVGQTRRF

SEQ ID NO: 27082 - DNA, 3356 bp, DROSOPHILA
ttctactttggtgacgacttttttcggtatcaggacaatgtctggtgtttcgtctttctgcgtttggttattagttctcgttggaggttctaatctggcaggaagctcttgattctccgccagaaacttgtgcttctccacctgcggaaagttagcaatctgggggcgcagtttgttgtaaagtatggcacttttgccggcctgcaaggagctcagtttgctaatcttggcaatggcagcgattagcagcgtggtgaagtccatgaagaagttgttgcgcaggagttgagtgaagtatgcggctgcactgaggcagcattccctgatccgctcgtgcagatgataaaaacccaggagacgcaccaaaataaactcaaagctgcttcgcgtgggcatggctccgcccaaatcttcatcgcacacatccggcagcacaccgcgaaagtttttcagatccctggccaaatccaagcgcagcaggcggcacagtgccgcattaagtttgcagacggaacgaaatcccggcatattgcggaaggagttcttccggcgagccattagtcgtccaatcatcgccgccgtctcctcgaaatccttggcatccggttcggacaactgttgcaggaacctgttgatgaccacgaacacattttttgctgtttggaaggagagatcccttgattttgtgattgtttcagatggccaagggtaacaacataccgaaacccgtgtccttcaccagcagcgtcaccaacggaggttgtttcaatttaaagtcattccaaaagaattcattttccattttcgtgttgtggtttgaaaattctaaataaaagaaactgtccgtcagagctgtttgtttttttatagctagatttgttgtatcggaattagccgaagtccacagcgccaatacaaagtatcggtatatatttaaaccatatataggctatgcatcttaattctataaaaaatttatacattcattaaatattttctaatatatacactttcggttagattttggtaagcagattgtcatcactaattctagctttgattagtcggcctttagttttttgttaagatctggtcacaccgccgtttacacgtgcaagttgaattcgaaaagaaaacattttaattttccggtaaaacatgaagaaaaagcaggtggaaagtgcatccgaggaggaggaagtgcagtccgaaaactccgaggcttccgacgaggaggagctacaggcagaggactccgacgaggaccagctgcaggcggacgactccgaagacgaagattccgatggatccgaactggatctggacgccagtgacaccgaatccgatgaagatgatggtgaggaggaagatacaatcaaaccgcagcccaaaagccgtgccgagattatcgacgagaagatccacaccaagtacgagcagttaaagggcacccggctgtatgtccggtttccccaaaaactgcccctggacttggatgaattcaatgccaaggtgaaggctctgcatccactggttctgaagtccacaaagcctcgccagaagcatgcacgtttctgcctcgtcgatttcaagtcgaaggaagatcgcgatcaagcctttaaggatatcaaggcttcgatcgaaaaggatgacaagcacaagggcttattcgtatcactgcctaagacggattccgatgattttgtcaacgagctggtgacccgcaagcagacatccatcgtaaacaaacgtaccaaggccctgatgaagcgtgctactaagaaggtcctcaccaagggtaacttcacctcgtccgtggtcattaccaatctgccaaagaccagttcgttgccccaggtgcgccagctgttccacgaccaggcagtggacattcaaatacgaccgggcaagggtaaattccgggactacagcacggcgaccgtaaccctgccaacgacccacgatgcacgcaaggccatcaaggagaagctcagcctggctggcacgccacttatattgcgcttcaacactcagaacaagcggagctctaaaaataagctcaagcgaaaggccgagaaagggaaatccccagagaagaatccactgagtacgaaacaaaacgataagaagtccaagtcggaaaaaggagaagcacctaaaattaagaaaccagaagtaaatactaagcaccagccgaaggaaaaccttaagagaaagtcgcccaaggagaaaacacctaatattaagacacccaagaagttaaagaaactaaccgcagaatagagtgtagttaatgtttgataatttaaataaaattccccccttttgattgaccattaattaggtgtaaaaaaccaatatgcgaaacgtgtttcaatcgtaaattctggtttacagtggttgctagtacagtaagaatgcagttaaatttttaaaatatttattatcgtacacgatatacagacatagatatatatatataaatatatatattattagtaagccggctgagtgatttactggatatacattgattggttactttagcttatatacttattagattttcatgtgcaacagagttttcgttcatttgcgtaaacttgacgggcttatgtgatcgatttgtagcttcaaatgtgtattaatccaacagcaagcgcggtatggttaggtaaacgtaattcatatgtatagtttccattctagtacaaaatattcaacatttgcgtgtatgcattaacatggggctttcatcgaatctcgaatcaaaatctacttcagcagtatacaaacatgtgtacatttgtttatatcgcatataaacgcatatcaaccgtgcacggcaatccgtaaatcctgttgctgtgcatcgttagtagctatattgattttttgcaatactacggaccccgggaatggcggggtgagcagaatcgatagaacaagtgggcaaagaccggagaaaaaatgcacattaaatgagaaaattgaaacgcgtttcccattgtgtttagctcggttttaggtagtacatatgtattcttagttcctagaatgaatcgattttagttattcaaaaattgtgtaaatataataaaaatttatatttccttttcgtagctccctatgaattacagaaacaaagccgtcgccagccgctttccactttctgatctcttcactttctcgctatcaagcagtctcacatatttgctgttatttgttcttactcctctcgtctcgtttcgtttcgatctcataactcatttctcggttcatggtcgccctgggaagaccctgtgacaggctccccggactcctcttatataaggcgttgaacatccgctcaagtt

SEQ ID NO: 27083 - DNA, 1307 bp, DROSOPHILA
atatatacactttcggttagattttgttttttgttaagatctggtcacaccgccgtttacacgtgcaagttgaattcgaaaagaaaacattttaattttccggtaaaacatgaagaaaaagcaggtggaaagtgcatccgaggaggaggaagtgcagtccgaaaactccgaggcttccgacgaggaggagctacaggcagaggactccgacgaggaccagctgcaggcggacgactccgaagacgaagattccgatggatccgaactggatctggacgccagtgacaccgaatccgatgaagatgatggtgaggaggaagatacaatcaaaccgcagcccaaaagccgtgccgagattatcgacgagaagatccacaccaagtacgagcagttaaagggcacccggctgtatgtccggtttccccaaaaactgcccctggacttggatgaattcaatgccaaggtgaaggctctgcatccactggttctgaagtccacaaagcctcgccagaagcatgcacgtttctgcctcgtcgatttcaagtcgaaggaagatcgcgatcaagcctttaaggatatcaaggcttcgatcgaaaaggatgacaagcacaagggcttattcgtatcactgcctaagacggattccgatgattttgtcaacgagctggtgacccgcaagcagacatccatcgtaaacaaacgtaccaaggccctgatgaagcgtgctactaagaaggtcctcaccaagggtaacttcacctcgtccgtggtcattaccaatctgccaaagaccagttcgttgccccaggtgcgccagctgttccacgaccaggcagtggacattcaaatacgaccgggcaagggtaaattccgggactacagcacggcgaccgtaaccctgccaacgacccacgatgcacgcaaggccatcaaggagaagctcagcctggctggcacgccacttatattgcgcttcaacactcagaacaagcggagctctaaaaataagctcaagcgaaaggccgagaaagggaaatccccagagaagaatccactgagtacgaaacaaaacgataagaagtccaagtcggaaaaaggagaagcacctaaaattaagaaaccagaagtaaatactaagcaccagccgaaggaaaaccttaagagaaagtcgcccaaggagaaaacacctaatattaagacacccaagaagttaaagaaactaaccgcagaatagagtgtagttaatgtttgataatttaaataaaattccccccttttgattgaccattaattaggtgtaaaaaacc

SEQ ID NO: 27084 - protein, 374 aa, DROSOPHILA
MKKKQVESASEEEEVQSENSEASDEEELQAEDSDEDQLQADDSEDEDSDGSELDLDASDTESDEDDGEEEDTIKPQPKSRAEIIDEKIHTKYEQLKGTRLYVRFPQKLPLDLDEFNAKVKALHPLVLKSTKPRQKHARFCLVDFKSKEDRDQAFKDIKASIEKDDKHKGLFVSLPKTDSDDFVNELVTRKQTSIVNKRTKALMKRATKKVLTKGNFTSSVVITNLPKTSSLPQVRQLFHDQAVDIQIRPGKGKFRDYSTATVTLPTTHDARKAIKEKLSLAGTPLILRFNTQNKRSSKNKLKRKAEKGKSPEKNPLSTKQNDKKSKSEKGEAPKIKKPEVNTKHQPKENLKRKSPKEKTPNIKTPKKLKKLTAE

SEQ ID NO: 27085 - DNA, 14299 bp, DROSOPHILA
tgaatacatggccttattatataatcgaagttcttttgacctcagtaatatggttccattacgctcgcccgccttgtctgcggtcggaaatttgaaacttgttttgcgccccataaacaaaaacaagaagtttaatcttctaaggcgtaggtctctcttggcaacagtccaaaaataatagacagccattaattatgcgccatacgatcctgtgtttataatggttatacttggaaaaggggtacacgaagtgttactttattcacattgcaattttaaatcaatatgagagaactttacctaaaaaatttttaagtgataaacaattaagtggattacattttcagcaaactcttattaataagttgaatgttaacaaaataaaaatatgatcaaaaaaattagagggcatatttcatacctgaaaaatcattaaagtcgacattctcttttactgctcaaattcacgtttcgcacagctcaatggcgatcgagaaaaaaacgtgtcagcaaaagcgtgtggggaagttttgagagccaacgcaacaacagttttcggataagaaatatacccaatagacattcggagactaattaaaacggaagagcttcttgcttctccaactctttggacacacgtgtttgtgctccccttttgtggcgctctttcgccacaaaacaaaacgagtgaccgacacaaacaaatatgccggttctcttttactctccccgatattccctttcgaagcatatgtattatgactgtgtgaagagggatgcgtttcctaccccataaaataaccagataaccaaaagatacatttattgtcttgtaacgtaagggtatccatgcttcagcttgattaaatcaactctcctctgcgttatctcttgctctctcgcaccaaacaactccataaacagaaactcaacttccctcgcttaaattcaattcaaaagcgttctgattcattcagcttttgcattttctgagcagcggctgcatccaagtgaaatcacaaagtacaagtttttttcgaccaacttgtacaaaccgcatcgttcagtgattaatagtttgtagtttaaaagtaattgcgacactttgctacctcacatgtttcaagtaagtccagtatggtgtactactcgattttgaagtgtgcgtgcctttgttttcgcctcgactcaaaacatgcgtcgcattcggcacgtggtttttgccccaccaacccgctatccacggctccattattcctgtacttgcaatgccatttgcgtcagtttttagggataaaacacggagaagagtacgtcagcatttggcattagttcatttatatttagccatgggcacgaaaataacaatttaacaaatcgcagtgtttttctgccgcgttcgtttgttcagcatcccaggtacagttgcacaaacaacaagaaaacatctcgggggcaacaaaagcaaagacgagcccccgtgaaatgaaaaagcaagaactgtacctcggatttgagatctagaaaacaaaacatttctgctggtatgtacaaagtacatagcagagatatttgcagagcaacaattatccagaaccaattgaaagcggcatacagcacagatacacagacaaaaaataaatttctaagtatgtgcacaaaaagagccgcatgcatataggttttaaaagtgggaaacgcagcattaaatgtttattattgtctcagatatttagggtttttttatgttattatgaataggaaaatatattgacagtcttatggggccttggaaatttattacccattgaaatatatatgaaacaattttattgcatatctgtgtgttattaagaaattactgagttgtgcagatgtaatgaaactaagccgcaattttgtcttactttagaaatgaggtctgtgattattttataaaaaaaattaatacttattattgaaattttcgctctgtgtgacgttttacatatctaaaattgcaacatgacgtattaaaaattctatggaaattacctatcgaaaacagctgattccgaaaaagagaggaaaagtgcgtcccgaaagcttttccttgtggcatcaacttaactgcgcatcatcccatccttggcgctctcttgcgctctctcgtaaaatatgggtgtgtgtgtgtgtgggcagccggtgcgtatgtgtaatagaagcatacgccatgttgtacggcgctcagttccattcgctcgctcaatttcgccagatgcggcgctctgcggctgctaatcccaatctcccattgtcgctgaaacagtgcacttttcaccttacctggcgcagaacagctgagtgcgtcttgttattaaacgggttgttcaatcaaatagtcggcgcttacctgtcgcagaaccttcatctcgggatttgttttgtgaataatgcccgataagaaatgcacggagaacgagcagaatggtgcgtagattatatcctagaattcacattcctttcatttctgtccgcgtgtgtgtgtgtggtgctaggttttcatggccaactgagggacatccgtggaacagctgtttacctcagccttaaaagctttttttttggcgcgcgcctgttggcatgccagcatattttatatgttaaaagaaaactcatagattttacgggtgtgacaacaagctgtttatctatcgaatataatcagtgtcaatttgcaatttatatttattctttttcatgttcatatgtaaatttaatagcaaaccgagccaaaatattataaatataaaattatttgcaatgaaataggtaaatccttgctttttgaaaggctaatattgtaatagtgcaatcccattaacttgtttagatttatactgagaaacacactaggaaattcgaattgattaatgaaaatatttaaaattataaaaacctatcgcaccgctttagtagtccggaatcgaaatcgatagctttccagttccctggagaacgcgtagaaaaatcacatggtctggatgggaatgggggataattggggtggctttacagaaagagcgagcgaaagagagcgcagtgcgcagcaaaaagcttcgttgctctcttttacgctcttgctttctcaccgataaggcgacgacgtcgacgtcgctgcccgcgttttggcgaaaaaaatttataataaaaacttctactcatagattgtgtgatgccagttcgctctgctaatccgatacgcgctagaagtttgatccgagacaatttggagaaacaggctggttgtctaaatttaatccactccagaatgccgaacatcaaagtgttttcgggcacctcgcatccggatttggcccagcggatagtcgatcgcctgggaatcgatctcggcaaggtggttacgaagaagttcagcaacttggagacctggtgagtagtcctgcaggagaatttccttcgcaaattgcgtgtgtgaccaccaacaagtgtttaacgacaacggacaaatgtgtttttaaagtgcgctaattgagtttgacgaaaaagtgtttggtctgcaaacacatgtgctcaaaaggtccttgacattcgctgaaggttgctggcgtttcgctgccacaatcaacaatgggaatctatgggaatttgtgattacctaaaactgaatgatttttcctgaatttttgtggcctgcctttggcttgatttctttttatttttattgatttaacaagtggactgtacaccgtctttgtcgctatagccgtgcgtctgtgtgtttgtgtgtgtttagtggcgttgtgctggtatgagtgagagtaacacacacaccaacatacacgtgaagcttggccaatgtcgcgtgcaattttcacaaaatttaaattaaatttttttaaatcttcctagacaagaaatgcaaagaaaccgaaaatgatttttattatatatttttaattaaattagcagctgtgtgtgcgtgtgtgtgtatgtctaaacttgcggcttgcacgctttttgcttccctctctctcgcacgcactcacacaggcgcaaaaccagccagtcagctgctgatgcaacaacaacaataaataacaaataaaggcgcccatagtttttaccccacccactagcaagcacccttttcagtttatttggtgtcaactttccatcggttttttccaattttaataaaattaaacaaaagccccataagcaaacaattagaggaggtgaaaaggtgaaagaaacaaacgaggcaaacggaagaaaaccgaaacgaaaatagaggttataatacgcgctaagctttctgacatgatacgcgctccgtcggtgtgcgtgtgtttttgttatgctcgcactcactcgcacgcacaccaaggtacgcggcagcggaaagaactaaaggcggagcagagtcgaggctaggatgccctgttccaggtgttatgctgtacaaggtaataggagtcgtgtcaacttacaattgtttacagtctgatttcttatagcttgatattttatgatcctaagaaccaattgaagaaagtacgacgttcgacgaataaatcgtaataaatattttgtgaaaaaagtttcttggttatagagttagacatagtcttatctctaaaaatgcattattttccaggttccagtttttaactttctaataattctttaccattaccgaaagttgagacccaatttggcttactcgcttttatagtcgacatacccgactaaaggagggtaccaaatgcctgcgagtagagaaccacaacatgactctgtcacgtttttcatttgctgactgaacggagagtaagagaacgctctcttagggtgagagcgaaaggggagcttgagcgccacacaagagtcggcatacgttgcaacgtcgactgcggcagcgacgcccccgcatggtgggcatttggactctctttggagcccattctcccgctctctctctcttgctctcagactaagtgtcagacccccacgtgtgcatagtggttgttgctccactgttgttgttgctacaatatttctgtttgcacttgtcggctttgtttttgttgtttatcccattctatcactctctggcattctctagaagcagcggtcagaaaatcatgttgaccgttaaatgcgctctttttgctccaatttacactaggtgttgttgttattgttgcggctggtgtaacggttgaacttttgcttttatatttttcatactttgtcttgattacttttgttgataatagcgaacgcacggcgttgatgataatgattctgttgttgtatttctactcgctattgttgttgtgtttggtggggcgacagggctagagatcaagtttttagtctagattatgctcaattgaagggcgccaagatgacatcgcgaaattttaaacgaatgagaggtaatattaagactgacaccaatttctttttgcctaattcgctgataatggaagatatgagcataacaagagaagagagaaatagagaaaaataccatttaagaactataaaaactggcgatacccctttgtttgggtcacacgtgattgttctttatttttaacttatcacttcgcaagcttaataagagtttttttatttattagtaatgctgtataataattttattgcaaccctcaaacaattaagtaatcaatacagaggtcataaaatgtacaagtatctaatgttttttatggccgccaactaagaaaacccccaaacgaccttcgccacaggccaagaacaatttcagtggcagttcataataatttttcaataaccccaaagtgaggctctaatttccaatttcgaaggttttgccacacgcaattctaaactgttctatacaccaccccctcccttgaacccaaccaaccacccactgaaaatgtcaattactaagcgttttttttttgttttccattttcgactctaaagtttgatcgataaggaatttgcgtgcttgtcttgtgaggtcgttgtcgtatcagcgagcttttgaaaggaaggggcccgagttaatagtgataaggagcgtataaatcaagtggaaccaacagaaactaagcgaaagcgatttagattccgcccagactgagataagcttagtgggagacaattggcaacagttttttgtacctacagtacggcttctatatatagcacgatatatttccttaatagtaaactaaactacctttttagaatacatgatctttgaaacaaagtaattaatctagataggtccaggttttcaattttataacatggctttaaatttgattatgtttaatctacgaaatccgtacgataagcgaataataaaagcgaaaaagaatgttctaatcaaacatttaggaaaataaacaaaatccaaaaaagtgtgaaactggtgatttcaattagagaagtacgactgtttttcgttttcatgctttatttattttttttttttgtatttttcgttttacatttcgactcacatgagtctgtcgtctgacttgcggacgaggaaagagataaaaatacgtaaaaaacaaaggaaaacgaaatgaattctggctgaaattctatttgacggtcggccaaagaaacagctgctggctgaactgttgctagtagttgttggcaatgcggcggtttttctggcccattgccaactgtcttgcccagcacaccttttttccaccatcccccacacaccctcccttcgatttttcccaagatttcccggcatgctaacaatgtcacggcggctagcggtgaaagtgttttcctacagccccggcaatctattcaaaaatgcatgatttaatgccaaaatgcatccggccaaggttgatgaaaccgctgcatttagccggtccacattgatcttcttgaccagagtcgagataaggaatacatatgtatgtataataataccaatcaatattccacaaaaaaaaaaaaaaccggtcaatggtatgttttatgataagcaaatgcagaaataggttatactagagtatgctacaaaaacgtgtcacgcgattgacgacaggctccatcaatttgtttatgacaaaagataaacccgaattattggacaaattaattactcggccccactggcacaggtcgttcaatcgatagtccgttgtgggctgatgctcccgtacgccatgtaattgaattaaccttcgatggtaaaacaaaagccaaaagaaccatgagaatgcaaaaaaaaaacaaaaaaaaaaaaaaaccaaaaaatgggcgtacaagccgagaatcagttgaaaccgtgttttattgactgcaattgattgtttatttaatttaatttttttcgtactgggaatagagtttgtttgtttagagctggcaaagttctctggcgacgtttaaacgaaatttaatattacttcggttattgacgtatgttttctatataatatttccgcctttaaaacgctgactgaactatcaagggtatcgagaatctatagtccaagttgctaactgagcttcgcaaacgccaaccgaaaccgaaacaaaacaaaacaaaaacgaagtgtaaacaaaataataaacgaagcggcgtcagtggccattgcaaatattgcgcatacgccatgtggtctgtgtgtgagtgtgtgtgtgtgtgtgcgagagagagaattagagaagttttcgattagattgccttgccttgcagtttctttacggcttcgtcaaaggtcaacaattgggaggagattatcaatagtttttgggggagggtgtgtgcatactgaaaaggatacttttagaactagtgaatttgggacgtgttgagaagtgcgagcttgagacaagcaatggaaatttccgcacactgaaggactgacgtctactctagacaaacatatgtgcatacatatgccatgaatgctacaaggttgtttgcaaaggaattatggttattacctaacgttatttgattgaaatctgattgaacttaagctctgtactttaatgaagcacacatctatttccgttcgattgcagtgatatttttagataatgcttgcgccagtgtttgttttccgatcaatctatccgttttcttgctgacattttcccacagtgcaccaccagcccacatccagcctatcaactgacccccgctctctgttttcttgcagtgtggaaattggggaatcggtgcgcggcgaggatgtgtacatcgtgcaatcgggatccggcgagatcaacgataacttgatggagctgctgatcatgatcaatgcgtgcaaaattgcctcagcctctcgtgttacagctgtgattccttgctttccatatgcccgccaagataaaaaagacaaggtaggtttgcctcaacacgatccggccgcccaaaaattacacggtattattctgggataaccctctaatcggatatcgcgagcaaagaaaagcaacgtaaacgattaattaattcttgattaataatctgactataacgttcaacgcaaagcccacacacggtttcaattggggaaaagtggaaacgaaaatgcgtaaacttttcccccgaatgtttttcccaaaactttagctcgattgttgagtgctatacacatacatatataaccgatctatttatcctatatatatatacttctttttttctgtgtgtgactgtgtgtttctaatgcattttgttaagcgatttgaatttctttttcaaaaaactgtttgcaacgaagctaagctgcagaaaacttatgtaaaaatacatgcacgcaattggaaaatgtggaaaatttcaaaaaaatttaaaaagaaatccttacgtattgttttgctttatttttctgccgtttgatattaaatactatgtttatttttttattatcatgcaatgctcgctctctctttctcgccaacctgcaactatttccctctaccgcgcgtgtgtgtgtgccttggtgtatttctctctctttctccgtttctctatcgatctctgtctctctttccccgtgaagttggcaggcagtgaggataatgcggaaagcaagaaactagccaagaaaaactacgattggaaatttagggtatttactatgtaacttttcaataactaaacgataactcatccgattcacactttatgttcttctctatatatacatatatattcaaaactaatgggaaattctttattaattttctttcgatccaaaaacgaaacacttaaaacctggaagggaatatcaaagcgggcaatctctcattctcagaaactcataactcacgaaggaaatttatttgtcgtccggcttaacaagtttcacgtttttctcggaaacagtcgctttttgtctaatttgcatgtccctcccacccttgtcctttatccctaaattcccatatatccgctaataaactaataataaagaaattcttggctaacccgcacaaaaaaaaaaaaaaattcggtaaaaatgcaatgattttattggagataaaacgaaaaaacaaatgaaaattttccacatacttacgttgcctttgtttgttttgtttcggcggttcttcattgcaacaacaaaataaaaaatactgaatatgaaatataaaatttacattatttaatctatttttaataacgaatgtctaataaatatttttgtttgtgctgttgtttcgactgcctgtttgtttgtctcgattgttgtgatcttgcacttttgttcttattgttcttatcggccctgacaacagcctccttttgggggcttaaaaaaaaaataatgttttccattccacttgattaagtttttccgttgctagataataatccactgtgacgtcattcgatcggatcggcagtggggggtaaatatatatacagtatatagacaatgaaccccgcgggtcaaacgcgcgaaatgcacaaatattttgttcaattttgtaatctgtaaacgaatgagttccttgacgttcaagataatcagttgaaatggaaggaaaatatatatatttatagtattattttgaaaatatgtacttgaattggcattgcaacccttgaatttgaattgagaacaacccccccccccccccaacaaaccaaaacaaaaacagaaaacccctccacttgactaacaaaatacggattacgactttgttaactttaatatgcacacaagggataaacaacccgatcgcaccttaattttaattttaaactctgaattattctgaactttttgtgttttcttctttttctttttatactctttgtctctctctctctcttgcatcaaaaatgcacccaaaaatgtaaaaaaaaaaacaaactaaattccaattctgttgagcttaggagttttcagccaaacaatatactgtgagtagttcggttagtttctgtatcccaggcattattatttttaatcttgctgcggaactgaactaaaaacccaaaataaaaaagaaaattttgctttagaattattattgtcttaagccttttgctttgttgcgttcattaatgttttcccctttgagttgatgaaaccagacgacacgatccaaacctaaacttccatatagtatataccaccgatgttttgttgcatgccgatgtttgttgctccgaatattaattataccaaaatccaaaaatccaaatcgaatgagaaaagcgaaaatgaaaaaaaataatttgaaaatggttcaattttctttgcacttgtttgcagcatcttaacaatcaatctatctgtgcatctgtatctctaaatcgaaatctatcatctgggtatatatatgtatatatcatctatatcgattggatctgaaaatcattatttcccaggttctgctgcaccgaatcacatttgtgtcctttgtgttgtcgcaactgaattctctattctgtccatgaattatgtatcttcttcatatgcaatctattggaacgttaacctctctttgttgatttctgtctctatacatatgtgttgttcggtccatgttcggttttgatttccatgatttactactactactacctcctcataaatgcctagccttaagatataaacttgactactagttgcgctaatggaaacctctcctttgcatctctttctacgctggccaatgcacagagtcgtgcgcccatctcggccaaattggtggccaacatgctgtccgttgctggagcggatcacatcatcaccatggatctgcacgcctcacagattcaggtaagtcagcccatcaacaacatttgtatatttatctttgatattagagtgatttcttatcgtgccgcgatttgtatatcagtcaattaattacgataaagaaagtgtgattttccttttgaacgacgtaacaatttttgtttattaaagtgaggccaaagaaatacttatttaagggtttaaaataaattacaaaatatacagtacaaatatatccaataacatcaggtttgaatcaaaagaggagctataatctcgccggatcctcggagaaccgacaaatccatccgttggctaaaaggtgccgaattcatagcagggttcggcggcgttgtcagaccgggattgaagctctgtgtcgtcatcggtcccgttgagggtgtgtggcatggatagaatgctcacggatagtttggccatttgatggagtagcacatcaatacgttcattcttgagggcaattgtgttctccaggtgattggccctctcggcaatggaattgatgtagcgtgacttctcggcactctccctaatagcattggcatagtgttcgtactcgaccactttcttggataccttcttcatctgtccattgaccacaacattcacgtccatggtcagcacctggggttgactatcgatcgagcaggagcgctcaatcacttgggtgagggatcggttgagagtgcgtaccacagaattcttgttagccaactttttaatcaccacgctcttttgggagctcgttggcgatacactcagacggggtcttggtctgggactagcgcacttggtcaccgcgattagttcatggaacagtgattctatggctcctggcgctgctgacgccagctgctccagctccgaacgtgtcaaattgatgcccaatttcttcagtaccttctgattgaaggtctgccagctctggagtttcagggccacgctgctcttgggcgtatagttgtgcagatccaccagacgaggatgactgcgcttgacaatctttgccaccggcaagacatcggagaatgaacgacgagctttcagatccaggataatgcgctgctcctttagccactggttcaggtcattctgctgttcgttctccatacttagcaaggggtgatttggggttttcggattttacctgctttttaatttctgttgtaaatttattttggcaagtctagcttccatatatgtttcagacaataatgcttgatagacatactctctgccaatgactggcagctgtgtcaactggcaatgactactggatggctaaattaaaactcattcgataaattctccattcgcagggcttctttgatataccagttgataatctctatgccgagccggcggtactcaagtggatcaaggagaacattcccgagtggaagaactcgatcattgtgtcgcccgatgctggcggtgccaagcggttagttgcagtctttaatccatatgcgtaatagattaataatgctattaatatttcactttaagtgtcacctcaattgccgatcgactgaacgtggagttcgctctgatacacaaggagcgcaagaaggccaacgaagtggcctctatggtactggtgggtgatgtcaaggacaagattgccattctggtcgatgacatggccgacacatgcggcaccattgtgcatgccgccgatcgcctggtggaggcgggagccaccaaggtgtatgctattctgacgcatggcattttctcgggtccggcgatctcgcggatcaataatgcctgtttcgaggcggtagtggtgaccaataccataccgcaggatggacacatgcgggactgtcccaaaatccaggtgggttatatcatatatatgcttctttagatgtgaatataatttttattttttttttctcagtgcattgatgtctcgatgatgttcgccgaggccgtcagaaggacacacaacggcgagagtgtctcgtatctcttctcaaatgttccatactaaacaacaaacaatcggcagaaaaaccagcaaacgtttgataaaacagcaaccagaacaccgttagcaagccacagcaaaatgaaaagagaaaaaaacccactttaatagcaatttgtaatgcaattttcaacacaaacacaacaattcgaaaccacatattttgccatcatcatcgttatatattttttatggattaactattgtaattaaagtaaatgcaaactcagtagatgggaaatcgtcattgtgtaattatactaaataggagcataaaaaataacactaaataccgcaaaaaacaatacaaaagtacacaaatgcaatgcctttccttttgtatagtaagttctttgtttaaacaaactttttgccgttttctgattttacaagttaacacgaacgataaattcccagttgattggtgtaaacattggcctgctcttagagagaaatttagatttgtagattaacaccgtagaagatatacactcaaaacacacacactcacacaaacacacccacatgtacacccacacacacaacaacaaaaaattgtaattttacactgtgcaacaactttttgatgattctttattgtaagctcataaagaaaaaaaaaacgcaaaatacttgcaagttcaaaacaaaatctagtaaaattaagtaaaacaaaaaaatacaattgaaaagaacatagcaaataggcgttaaaaaataataaacaaccaaacaaacaacaaaaataaaactaaagaaaaaaatacaaaaaaaaatattacagaaaactaatgcaagaatgtgtttttactggatttgtggaaggattagatattgtcctataaaaagggaatattttctttttcgtactcgaatataattgttataggatctttagtttacttttactttaaatgcttaaaccaactttaattaactgaaatcctggtcttataaaccatatcctcatcccttgtccaaagaaactcataatgattcaaac

SEQ ID NO: 27086 - DNA, 1186 bp, DROSOPHILA
ctgcatccaagtgaaatcacaaagtacaagtttttttcgaccaacttgtacaaaccgcatcgttcagtgattaatagtttgtagtttaaaagtaattgcgacactttgctacctcacatgtttcaattgtgtgatgccagttcgctctgctaatccgatacgcgctagaagtttgatccgagacaatttggagaaacaggctggttgtctaaatttaatccactccagaatgccgaacatcaaagtgttttcgggcacctcgcatccggatttggcccagcggatagtcgatcgcctgggaatcgatctcggcaaggtggttacgaagaagttcagcaacttggagacctgtgtggaaattggggaatcggtgcgcggcgaggatgtgtacatcgtgcaatcgggatccggcgagatcaacgataacttgatggagctgctgatcatgatcaatgcgtgcaaaattgcctcagcctctcgtgttacagctgtgattccttgctttccatatgcccgccaagataaaaaagacaagagtcgtgcgcccatctcggccaaattggtggccaacatgctgtccgttgctggagcggatcacatcatcaccatggatctgcacgcctcacagattcagggcttctttgatataccagttgataatctctatgccgagccggcggtactcaagtggatcaaggagaacattcccgagtggaagaactcgatcattgtgtcgcccgatgctggcggtgccaagcgtgtcacctcaattgccgatcgactgaacgtggagttcgctctgatacacaaggagcgcaagaaggccaacgaagtggcctctatggtactggtgggtgatgtcaaggacaagattgccattctggtcgatgacatggccgacacatgcggcaccattgtgcatgccgccgatcgcctggtggaggcgggagccaccaaggtgtatgctattctgacgcatggcattttctcgggtccggcgatctcgcggatcaataatgcctgtttcgaggcggtagtggtgaccaataccataccgcaggatggacacatgcgggactgtcccaaaatccagtgcattgatgtctcgatgatgttcgccgaggccgtcagaaggacacacaacggcgagagtgtctcgtatctcttctcaaatgttccatactaa

SEQ ID NO: 27087 - protein, 318 aa, DROSOPHILA
MPNIKVFSGTSHPDLAQRIVDRLGIDLGKVVTKKFSNLETCVEIGESVRGEDVYIVQSGSGEINDNLMELLIMINACKIASASRVTAVIPCFPYARQDKKDKSRAPISAKLVANMLSVAGADHIITMDLHASQIQGFFDIPVDNLYAEPAVLKWIKENIPEWKNSIIVSPDAGGAKRVTSIADRLNVEFALIHKERKKANEVASMVLVGDVKDKIAILVDDMADTCGTIVHAADRLVEAGATKVYAILTHGIFSGPAISRINNACFEAVVVTNTIPQDGHMRDCPKIQCIDVSMMFAEAVRRTHNGESVSYLFSNVPY

SEQ ID NO: 27088 - DNA, 2809 bp, DROSOPHILA
gaccggtcggggaggcggccaccagggccaaagccgcggagagagttagcaggaacagtttcatggctgtgaagaaacttattcttctagtcgaggcaacctgcttttatacgatttttgagacaatatttattgataaggcttcctattatcaatcaacaatgaaatcgtatctcacccatacttagaggattcattcatgccgtgcacttgagttcgtagtgtccgtttctaatcatttgttatggaattagcatctcaggcgggattggaccacttcacatcgtagctatcggtacaagtaggaaatgcaaaatatactgggagccgaagtgcctcgtaaatctattgtaccccttgtgaagcaggtaagagtagataagagcatgagctgatctataaattaggccgcgaaagaactcaattgtcgtgacacgtaactaatatagtagactttcgctagccaagatgccagccaaaaaataacaaaataagtcgtatatttcccttattttgatagtaaattcgtcagatttcacaaaatgggggttttgctagctctgttatctttgacttcatatggttatcttacttgaatgcaataatcacacgtcttattgccaactacttatattttacttaatttattttattagaaaagtacttcattataagggcgtactttatggcgtgtgaaagaagccttttgttgacaacaaatatagggatgctaaaaataaacatatttaaatactcctttacagcgcggaaccgtgtagggatttatttgttagaagcacctggtttggggcaccttgttggggacacctttttcgtgaggcgcgcctaaggggtatgttgtatgtgcatatcgtttgtgcaatcttgtacggaatttggttaaccgtatacgtggcacattcatcaccacattttaatgaatacagttatatttcatataaagattttattaaaaaaatacaaaggatttattaagagtttagtaggagatgccggtgttgtcacggatccatcccaagtagtcggtgacgcgggtgtagccggaaggaccgctgtggcagtccaccgagccaaaggtaatcactcccactagccgagcgttgtcatgggtaacgagtggaccaccagagtcgcctccgcaagaggatttgccatcggtgcggcgcgtgcacatgtcagtgctggccacggtgccgtaggactgctcgcactcgctgttgctgatgatctggacgtccatgcactgcagccagtcggccaggttgccattgtccatgccgccccatccgcaggcaacgcaccatgtgtccacgaagcggtcgctctcctcgctgaagcttggcagggcgaccttgttgatcaagtcggtgaagcccacggagggagtgcggatcagaccgatgtcacgaccgccctcagcgggccagtttggatggctgataaagttgtcacggcggacagattgcctgaaagctccgttccagccccagttggatccatagtggatctccacgtagtcggtggtcagacagtgagcggcggtcagaatccagtcgctggcgatgatggttccagctccaaccgcggcactgttgcttccatcggtgcggatcaacagtcccacaatgtagggagcctttccctcgggcgctgggtaaccgttgacgatgcggccctcggcaccctcggaaatggtcacctggggcagaaggctggtgcggttgaagcctggggaggcggcgaccacggctagggccacggagagtgtaagtaggaacagcttcatggctcggaggaaacttagtattcagcccagaacaacgcgtttttatatacgacctggtagccttatcgattacggatttgttcattgtctttgtgttaaccgtatctcatcggatactcatagccacacgcaacgcaatataagtttaattttaatcaactcaagaacttttctacttgataaccataaataaatcattaatttagacactactaaagtaaattcaatttacagtttgaatatagtatcaagtaaaccccattttctgctcaatgtggatatatatatatttacataggttcatttaaagtggaacaaaaatatcagaatatctggatagacaatgatttgatttagattcatcattgatcgagtctccttgttagtaataggcaattcccgacttctctcggatccagtccaagtgatcggacacacgggtgtagcccgatggtccagacttgcagccgatggatgcaaaggtgataacgcccacttgaatgggattgtcgtgagtgaccagtgctccgccagagtcgccaccgcacacggacttgccatcggtggcccgggtgcacatatcagtgctggccaccgatccgtatgacctggcgcattctccgttgctaatgacttgcacgtccatgcattgcagccagtcggccaatcctccattggccattcctccccagccgcaggccacgcaccaccagttctcgaaacgctcacctttttggctgaacttgggcagcgaaactttgttgatcagattggtgaagctgacgtacggggtgcgaatgagtccgatgtcgtgaccagcgctattgggatatcctggatggcgaaagaagttattcttgttcaccgtatgctgaagctgaccgttccaggcacgattcgagccgtagtgtatggtcacggaatcggtggtcaggcaatgggcagcggtcaggacccaattgtttccaattacggaacctccgcccacggctccattgttca

SEQ ID NO: 27089 - DNA, 809 bp, DROSOPHILA
ccatgaagctgttcctacttacactctccgtggccctagccgtggtcgccgcctccccaggcttcaaccgcaccagccttctgccccaggtgaccatttccgagggtgccgagggccgcatcgtcaacggttacccagcgcccgagggaaaggctccctacattgtgggactgttgatccgcaccgatggaagcaacagtgccgcggttggagctggaaccatcatcgccagcgactggattctgaccgccgctcactgtctgaccaccgactacgtggagatccactatggatccaactggggctggaacggagctttcaggcaatctgtccgccgtgacaactttatcagccatccaaactggcccgctgagggcggtcgtgacatcggtctgatccgcactccctccgtgggcttcaccgacttgatcaacaaggtcgccctgccaagcttcagcgaggagagcgaccgcttcgtggacacatggtgcgttgcctgcggatggggcggcatggacaatggcaacctggccgactggctgcagtgcatggacgtccagatcatcagcaacagcgagtgcgagcagtcctacggcaccgtggccagcactgacatgtgcacgcgccgcaccgatggcaaatcctcttgcggaggcgactctggtggtccactcgttacccatgacaacgctcggctagtgggagtgattacctttggctcggtggactgccacagcggtccttccggctacacccgcgtcaccgactacttgggatggatccgtgacaacaccggcatctcctactaa

SEQ ID NO: 27090 - protein, 268 aa, DROSOPHILA
MKLFLLTLSVALAVVAASPGFNRTSLLPQVTISEGAEGRIVNGYPAPEGKAPYIVGLLIRTDGSNSAAVGAGTIIASDWILTAAHCLTTDYVEIHYGSNWGWNGAFRQSVRRDNFISHPNWPAEGGRDIGLIRTPSVGFTDLINKVALPSFSEESDRFVDTWCVACGWGGMDNGNLADWLQCMDVQIISNSECEQSYGTVASTDMCTRRTDGKSSCGGDSGGPLVTHDNARLVGVITFGSVDCHSGPSGYTRVTDYLGWIRDNTGISY

SEQ ID NO: 27091 - DNA, 2890 bp, DROSOPHILA
cacactttgccagttctggccgaacaatctgaaggttatcctgcgctacttggtaatcatgagtggcatggcacccactgaactgctgccctatgtaagtgccgtacttcaacggtaaccaggagtatctttgatgttttcgaaaatttctttaatcaggccaagcgagtggcactttatctggtgcggagttgtccggatcggttgttggatgagctcatggccgagctgcagacggtggagacgctcaactgtctgattgagcgcacggagacgccacctttctaccgattgaccagcatgcgaaaggcatccagtcacagtgctgatggtaggtcttaaaattggcctctcggcaatctaatacttaagtgttgaatttaaattgatcattttgtgacaggccaagctgcaggtggcattaatgactccaggattcaggacctggctgttgaaaagggcacaattcacaccaagcggcacagcggagaggatcccatgaaaatagggtaagtccatttgattgattaaaattttatatggtattaatatattcaatattcaattcccgcagaacctgcaaatcggacagcggcattagagcctacacacaagcagccgcagctgctgccgccgctgcagttactcccggctcaagtggaaatcgtccacctcgaggcgccgataagattcgcgccgcatcgggaccttccatacttcctcgaccagaggatatactgattaacgatccggagttgcggcaagaggaaaatgtagagctgcgcggaacgtcggatgctgcgccaaacggccatccacatccactgccaatgccagaatatggaggatactttgctccactcactgagtttctacccgatgttagtttaccgatcagtgggttccacaggtgagttgtttcgatattttttgtacatttaaatacatttccttaatattcagtacgcaagttaatacttttcaatagatagtcaagaaatttggtttgcagttttcgaatgaatttatttagaaaagcaaagactttgctgaagaatcctcaacattgtcattactgttcctaagtcaattagtaggagatgccagtctggtcgcggatccattctaggtagtccgagacgcgggtgtagccagagggtccgtcgtggcagctgacggaggcaaaggtgatcacaccgacgagacgagcattgtcgtgtgtaaccagggggccaccggagtcacctccgcacacggactttccgtcggcgtgacgggtgcacatgtcggtactggcaaccgagccgtaggcctgctcgcactcgctgttgctgatgatctggacatcgacgcactgcagccagtcggccaggtttccgttgtccataccaccccatccgcaagcgacgcaccaggtgtcctggtagcggtcgttctgctcgttcatgcttggcagagggatcttgttgatcagtccgttgaagtcgacatggggagtgcggatcagaccaatgtctcggccgccctgggaaggccagtcggggtggctaatgaagttgtcgcgacggacggtctgcctgtaggcaccgttccagccccagttggatccgtagtggatctccacgtagtctccggtcaagcaatgggcggcagtcaggatccagtcgttggcaatgatggtaccagcaccaacggcaccactgttgcttccatcggtacggatgaacaggcccacaatgtagggagccttgccctcgggcgctgggtagccgttgacaatgcgaccctcggctccctgggacaggagggtggtgcggttcagaccggtcggggaggcggccaccagggccaaagccgcggagagagttagcaggaacagtttcatggctgtgaagaaacttattcttctagtcgaggcaacctgcttttatacgatttttgagacaatatttattgataaggcttcctattatcaatcaacaatgaaatcgtatctcacccatacttagaggattcattcatgccgtgcacttgagttcgtagtgtccgtttctaatcatttgttatggaattagcatctcaggcgggattggaccacttcacatcgtagctatcggtacaagtaggaaatgcaaaatatactgggagccgaagtgcctcgtaaatctattgtaccccttgtgaagcaggtaagagtagataagagcatgagctgatctataaattaggccgcgaaagaactcaattgtcgtgacacgtaactaatatagtagactttcgctagccaagatgccagccaaaaaataacaaaataagtcgtatatttcccttattttgatagtaaattcgtcagatttcacaaaatgggggttttgctagctctgttatctttgacttcatatggttatcttacttgaatgcaataatcacacgtcttattgccaactacttatattttacttaatttattttattagaaaagtacttcattataagggcgtactttatggcgtgtgaaagaagccttttgttgacaacaaatatagggatgctaaaaataaacatatttaaatactcctttacagcgcggaaccgtgtagggatttatttgttagaagcacctggtttggggcaccttgttggggacacctttttcgtgaggcgcgcctaaggggtatgttgtatgtgcatatcgtttgtgcaatcttgtacggaatttggttaaccgtatacgtggcacattcatcaccacattttaatgaatacagttatatttcatataaagattttattaaaaaaatacaaaggatttattaagagtttagtaggagatgccggtgttgtcacggatccatcccaagtagtcggtgacgcgggtgtagccggaagg

SEQ ID NO: 27092 - DNA, 890 bp, DROSOPHILA
cagccatgaaactgttcctgctaactctctccgcggctttggccctggtggccgcctccccgaccggtctgaaccgcaccaccctcctgtcccagggagccgagggtcgcattgtcaacggctacccagcgcccgagggcaaggctccctacattgtgggcctgttcatccgtaccgatggaagcaacagtggtgccgttggtgctggtaccatcattgccaacgactggatcctgactgccgcccattgcttgaccggagactacgtggagatccactacggatccaactggggctggaacggtgcctacaggcagaccgtccgtcgcgacaacttcattagccaccccgactggccttcccagggcggccgagacattggtctgatccgcactccccatgtcgacttcaacggactgatcaacaagatccctctgccaagcatgaacgagcagaacgaccgctaccaggacacctggtgcgtcgcttgcggatggggtggtatggacaacggaaacctggccgactggctgcagtgcgtcgatgtccagatcatcagcaacagcgagtgcgagcaggcctacggctcggttgccagtaccgacatgtgcacccgtcacgccgacggaaagtccgtgtgcggaggtgactccggtggccccctggttacacacgacaatgctcgtctcgtcggtgtgatcacctttgcctccgtcagctgccacgacggaccctctggctacacccgcgtctcggactacctagaatggatccgcgaccagactggcatctcctactaattgacttaggaacagtaatgacaatgttgaggattcttcagcaaagtctttgcttttctaaataaattcattcgaaaactgcaaaccaaa

SEQ ID NO: 27093 - protein, 264 aa, DROSOPHILA
MKLFLLTLSAALALVAASPTGLNRTTLLSQGAEGRIVNGYPAPEGKAPYIVGLFIRTDGSNSGAVGAGTIIANDWILTAAHCLTGDYVEIHYGSNWGWNGAYRQTVRRDNFISHPDWPSQGGRDIGLIRTPHVDFNGLINKIPLPSMNEQNDRYQDTWCVACGWGGMDNGNLADWLQCVDVQIISNSECEQAYGSVASTDMCTRHADGKSVCGGDSGGPLVTHDNARLVGVITFASVSCHDGPSGYTRVSDYLEWIRDQTGISY

SEQ ID NO: 27094 - DNA, 3113 bp, DROSOPHILA
tcctcgaatgttgttaatcatttccgtatgaatgaagacgtgagtgaaaagactgaactttattgagaaccagttgtaataacgaatcctgttgcagatgcacgacatatccgatctctatgccctggtacgcgatgccctggtgcgctatatcagcgaggccgaactggattgcttggagtcatccacttcgacggagggcgagcatacaccaacgccttcgcctggcttgcctatgaccccagaggaattcgaggctgtccttaccgagcacatcgatctgcagcgctggcccagcgccatagctcatgtgcgacagtatcgacggatttcaactctcaacgctagcggttatcaaaacgttaccatatttagctataatagcgcggacaatcgacagaagtgggatgaaatttccgtgatactaaatgcttatgcgcatggtattatgaaggatcgcacaggtatgctaataagacaaagttacaagtgctccgtaactaaaagctttttactcttccagcagaagcctttatagtatccaaatccgactcggaggtgttcgagatctatgccattctgtcggaaaacttgtatcaagtatccagcgctctgactaacatggagatcagcatgaagagctactcggcaggcagcgcatcgggcaattcgcatcgcagcgaacaggacattgtgacaaatctttaaagtaatctgtaaactaagctaatcgcagaagtaggctcccttttatatgtaatcttttagtgagtaggcagcatattagacactgcggtgtacgtaagcgatcattacaatgtaagttaggtacgattcaatatatttatcaattacagcacaatacgtttatactttccatttaaacgaaaacttgcacattaccttcttgtggtaaaccactgacttggtaaatccaacatttatttattaataagtatttacatttaaaaaagccatgaaaatggtgactggctgccagctaggcaaaaagatttttaagggcatttcgttgttgtcggttgtactgggccaggagctgcttggtgctgttcagttcatttaggatctgtttattctccggcaggagattgtgagccgttttcagatcgtttatggcctcctcgtagttgcgcaatccgcgctgcgcctgggcgcgtcgatagaaagccttgctacatttcggatctagacgaatggcttcgttgcaaacttctctagcgctcgtatagttgccaacttttaggtccacagcggctgcattaatgttgtttaccacggagaagccgtcgaccttgagcagatcctcatctacaaggtgttttttgagaggattcagctgctgccaaccgaactgtctgctcaggtaatgatagtatcgattcgccttgcgatattttgcccgtgcttcgtgatagcgtccaagctgatagaagtgattgcccgattggcgaatgcccgtgagaagttccaccgccccatctccctgttgcacaacaagtagtgatattgacggattatatatgtaaccataactcactgtgaacttgtcgagcttgcgcggccagtcttggggataggcaggcaacttgtccgtcgtctcgtcgttgcactcgatgccccagtcctcgttgtgagctatctctccgcagtcccgtatcacgatcggcgccgtgggatcgccctcgtcagtgcagttttgttccatttcagctacgatacccaggccgcgtaaaacacgacctacgactacgtttgttccattcagattttcacagcccgcggcggaaatgaaaaactgcgagttgttggagtttggcttgccgtagttggccatgctgaccacgccctcttcgttgtgctgtgggagattatcggttatatgatatggttataaaagatatgcatgaatgatgccattcatgtcaaaaaattttgatcttagtataagtatttaagtattaaagaaaatagtttaatgcatttataggcggttctattggaaaaaagaatgtggagatatccgtgacctctttttgtaaaatggaacttactgagagttcgaagttctcgtcatcgaaaactggtccgtagatgctctcgccgctgcttccatcgttcttcaccacatccccactctggacgacgaagactcgcttgatcttgtggaactttgtgcccttgtagtggagcggtttgcccagagtaccgataccacattcgcccgtgcacagggcacggaaattttccgctgtcttcggcacaacatccttgcgcagttcaattatcattcgacccgctgtgacattatatatgtacgtgtgagtaacagattcaactagttggttggcatggcaatggtcagattccactcaccatcctccttgccaatggaaatgtccaggtagaccagtggattagttgatttcaccgcgcggagcagcttgcgttcttccattgttgcccttaggggcgggccttggctgatgtgacttatcactgcccgccaagtactccagactagttcaaactgatattatcacccgatttctgagttgcgaataaaattgtttaccttatttcacagtgtgactgtgtggcgataacggcaaaacacctgcaactcgcagtagacaacgaatgcaagacaatcaatgtaaatttacattagtagaaaaaaaaatgtacttattcgagtcgaatgtataatttaaagtaacggacagaattttcaaaaataaatgttgtctttagttgaaatataatttttgccatttagaataggatttcggggaggataagtatcaactaactgtttttatgttcataaatattaagatttaatgttgattgtatatatatatttgagatgtcctgatgacaattgccgatgtgaggttgaagtagaaatatagaaatagcaagattcacccatgaaacgtatttttgtaacaatttttgagtaaatttaacgttattacagagttagctgaaatattatctgccctttagcagcatattgttgcaaagtcaacaaaaaaacagtatggttgaagcttttattcaagtgttcaataatatatatatatatatat

SEQ ID NO: 27095 - DNA, 1344 bp, DROSOPHILA
acattcgactcgaataagtacatttttttttctactaatgtaaatttacattgattgtcttgcattcgttgtctactgcgagttgcaggtgttttgccgttatcgccacacagtcacactgtgaaataagtctggagtacttggcgggcagtgataagtcacatcagccaaggcccgcccctaagggcaacaatggaagaacgcaagctgctccgcgcggtgaaatcaactaatccactggtctacctggacatttccattggcaaggaggatgcgggtcgaatgataattgaactgcgcaaggatgttgtgccgaagacagcggaaaatttccgtgccctgtgcacgggcgaatgtggtatcggtactctgggcaaaccgctccactacaagggcacaaagttccacaagatcaagcgagtcttcgtcgtccagagtggggatgtggtgaagaacgatggaagcagcggcgagagcatctacggaccagttttcgatgacgagaacttcgaactctcacacaacgaagagggcgtggtcagcatggccaactacggcaagccaaactccaacaactcgcagtttttcatttccgccgcgggctgtgaaaatctgaatggaacaaacgtagtcgtaggtcgtgttttacgcggcctgggtatcgtagctgaaatggaacaaaactgcactgacgagggcgatcccacggcgccgatcgtgatacgggactgcggagagatagctcacaacgaggactggggcatcgagtgcaacgacgagacgacggacaagttgcctgcctatccccaagactggccgcgcaagctcgacaagttcacaggagatggggcggtggaacttctcacgggcattcgccaatcgggcaatcacttctatcagcttggacgctatcacgaagcacgggcaaaatatcgcaaggcgaatcgatactatcattacctgagcagacagttcggttggcagcagctgaatcctctcaaaaaacaccttgtagatgaggatctgctcaaggtcgacggcttctccgtggtaaacaacattaatgcagccgctgtggacctaaaagttggcaactatacgagcgctagagaagtttgcaacgaagccattcgtctagatccgaaatgtagcaaggctttctatcgacgcgcccaggcgcagcgcggattgcgcaactacgaggaggccataaacgatctgaaaacggctcacaatctcctgccggagaataaacagatcctaaatgaactgaacagcaccaagcagctcctggcccagtacaaccgacaacaacgaaatgcccttaaaaatctttttgcctag

SEQ ID NO: 27096 - protein, 383 aa, DROSOPHILA
MEERKLLRAVKSTNPLVYLDISIGKEDAGRMIIELRKDVVPKTAENFRALCTGECGIGTLGKPLHYKGTKFHKIKRVFVVQSGDVVKNDGSSGESIYGPVFDDENFELSHNEEGVVSMANYGKPNSNNSQFFISAAGCENLNGTNVVVGRVLRGLGIVAEMEQNCTDEGDPTAPIVIRDCGEIAHNEDWGIECNDETTDKLPAYPQDWPRKLDKFTGDGAVELLTGIRQSGNHFYQLGRYHEARAKYRKANRYYHYLSRQFGWQQLNPLKKHLVDEDLLKVDGFSVVNNINAAAVDLKVGNYTSAREVCNEAIRLDPKCSKAFYRRAQAQRGLRNYEEAINDLKTAHNLLPENKQILNELNSTKQLLAQYNRQQRNALKNLFA

SEQ ID NO: 27097 - DNA, 6260 bp, DROSOPHILA
gcccaactccttttgcaaagtgcctgcgaactctgtgtagaaacctggcaaaccgggattgccagttatgcagatgacgatctccttctcggttatggtctcctcaatccacctgccccatgtgaatatgtgggtgggaatggagttgatgttgacgtaggcctcctgcatattttccgctgctgttggcgtggcaaactgcgctgaaaatcaatcggcacctgtgttgatcccactcttttcacacgcgatgagttgtctaatccccgtggcaaccggttttcctttgtccaaccacctcggctgcagcctttcacgagtttcaaatcttgaggattggcgcggtttatccccagggttgatagctctgataaacactgctatgtgtttcggccaattgtttccagcaagaatggacaaaggtcacaagttcagcggcttaaaaacggctgatacagaaaccagggcggcaagctatgccaaaatcagatgttctatattagcggatacttaccatgataacgattgctcagacagagaaaaagtgtagataattttgtttaaaaaagaaaaaaaccaaaatgcattaactttaaaaaaaatactatggcgtaaattattatttgtcaacctattgatatctctttacagtactagaagcttttataaatttcatattaacttttacctatcatcattaaatattcgaaagtactccctaacattagttacctacgtatacattttttattaaccaaaacttatatgtaaaatcgcaaattgtttcttttttcggaaaaaattgagaaaacattttgatattcgtgttcagcataagttctagagaattatccgatcttaaggtttttcaaagcggatcttaaaagtccgcaagcgatgcagccctagcttaagcccattgtcagggctgccaacgtgggcaatgtggccctatcccaaccagttggcatcgccaccattatttattggttttttgttgctggtttttgagtttttatattttttttctagaaggcctaaaatttatagagcgttgtaggtaacaggattcaggattagacttagattctgaaggcacacccatcgaaagcttgacgaggcatgaaccgagcaattggaatcgggagcaagtggacacaaaagaatgtagctaacaattggggacattctcgaaaattcttgtagcaccaacaagtaaattattatacccagaacaaccgaaggagctattgggcggatccagagcaatggcatctggcaaagagctctattgctggggaagcacgtcacatggtcaattgggacttggcggaatcgaggacgagcaggtagatagatgactttcggatataagcccactgatattacttttgtatgccattgatttcctcacagatcctcacacctagtcagataccctggacaccggacactgctgtacagcaggtcgcctgtggacaccgacacactctctttctgaccgccactggaaaagtctacgcttgcgggagcaacgactactcccagctgggccacgatctgcccaccaaaaggccacgtatgtcgccatttcgtatgtaatcttcatttatcgtcttgtctgtccactctccactaactccacctcatctccatactcaccaactacgcgagccactgctgtgaaccgagtctaaaccccgcaatcatcttccggccgactttttgcagtgcttatccccgaactgcaggattacgtgatcatccagatctgctgcggcagccgccactcattggcgctctccgattggggccaggtcttaagctggggcgacaacgactgcggccagctgggccatgccaccgataaggagatcgtgcagctgcccaaggttgtgcggcaactggtcacaaagacggtggtgcagatcgcctgcggcaacaatcacagcttggcactgaccagttgtaagtatggagtgaaatttaatggattccattcactagatacacagatacacatcagaactacttgaaacaagataagataattgtatttcccaagtttagggcattactaaacaattcttatctaaagctaaacaacgataccttccgactaacatcatccttgacgtttctaggtggcgagctgtattcatggggttccaacatctacggtcagctgggcgtgaactcccccaatgatttgacacattgcaactatcccctccgactaaccactctgctgggaattccgctggccgcaattgcctgtggaggcaatcactcgttcctcatctccaagtccggtgcggtgttcggatggggcagaaacaactgcgggcaactgggactgaatgacgaaacgaaccgctcgtatcccacccagctgaaaacgctgcgcaccctgggcgtgcgatttgtggcctgcggcgatgagttctccgtttttctgaccaacgagggaggggtgttcacctgtggagctggcgcctatgggcagttgggtcatggctttagctcgaatgagatgctaccgcgaatggtaatggagctaatgggcagcaccatcactcaggtggcctgtggcaatcggcacactctggcgcttgttccatcgcgcggcagagtttatgcctttggcttgggtagctctgggcagctgggcacgaggagtaccaagagcctgatgctgccgcaggtggtcatcggtccttgggtgtcgcccagcggatcagccctgttgcaatccaatgattcacaggtctcgttggtcatccgacagattttctcaggtggcgatcagtcgattgtgaccacaactttgtttgtagacaaggtgccgcccgaggatttcagaaactacaagtaactatagaagcgtgttactttagtataaacatataaaactataaacatatatctactttgcagccccaaatcccagatcctaaccctaacagcagaagtcaccaagcagtgtgctcaatgcaagcagggccttcaaagcgacatggatctactgagctctattgaactaatatttagaagccaggcgtgttggaatggttcctttctgctggatcacgaccgacactttggatgctcggttcgcaaccatggactggatctgaaagcagcccaactagcattcgacaatctgcgcgctgtggaaaatgaaagcattaggcaggtggtaagttttcgccattacaagcatcattggtatctgttttaatcatttcattgttttcagatctgggacaatataaccaaggagctagttggttcgctggtttgctcaccggcagatgtggagagcatgcgattatatcttctgctcccactttaccacgagttcgtcaactccaagcactacaagtcactgcaggttccgtttgccaatgccatatttaagctagcagagaacccacggaaagtgctgaacaagtggttggcccaaacaccggctgaatacttcgagcatcttgtccagaacttcttgcatgttgtcatccatattataagtttcaaaatgggcttggctgccgctagtcccagcgccgaaagacgtcaacaggtatttagatttcaatatagggccataccagtgtcaattaattctctattcataatctagctgctgccatataacactgaactcgagatcattctaaagctgatgaaaacgctctgccaaattaacaacgagcgccatgatcgcctaaactatcaaatcttttactggcctgatctttcggattatgcagacgtgcagcaggagtacgttaaatggatcatggccgacactgccagagatttcaatatttgcaactattcattcattttcgaccagtctgctaaaacagcgttactccaagcggatcaggcgctccagatgcactccgccatggccaatgcggctaccatggtgggttaatgacgccgaacagaaatgatttatgagttaataactacttttttatccagcaggcattctcctttttcaactacgggatgcccatctcgcagttcattgtgctcaacgtgacgcgtgagaatctggtgcaggattcccttcgagagttgcagcattattcgcagagtgatcttaagaagccgctgaaaatcaagttccatggcgaggaggcggaggacgcgggtggcgtgcgcaaggagttcttcatgttgctgctcaaggatctgctcgatcccaagtacggtatgtttaaggagtacgagcagtcgcgtctgctctggtttgcagatctcaccttcgagacggaaaacatgtacttcctaattggcgttctctgcggtctggccatctataacttcaccatcatcaacttgccattcccactggctctgttcaaaaagctgctgggcaagccagtggatctcagtgatctccgtcagctttcccctccggaggccaactccatgcaatcgctgctcgactaccagggcgacgattttaaggaagtcttcgatctgacctttgagatatcgcgggatgtattcggggaggcggagacgaagtgccttaagcccaacggcaatgagatagccgtaacactggaaaacaggtgagtgtagtgaccatttctgttgcggcacctgtgctaactattatccaacttcaggcaggagtttgtggatctctatgttgacttcgtattcaacaagtccgtcgagctgcactacaatgcgtttcacaagggctttatgaaggtgtgctctggccgcgtgattcacatattccagccggaggagctgatggccgtggtggtgggaaatgaggattacgactggcaggcgcttcaagacaactgcgagtaccgggagggctacacttcggtcgatgatacagtgagttgtaaactaaagatggtcttcctagacattaaccttgtatctgccgcagatcaaatggttctgggaggttattcatgacatgtccgaggcggaaaagaagagttttctcctctttttaactggcagcgatcgcattcccatccagggcatgaaagcccttaaagtgagttcttagattatacctatattgcaaagtgtgtcctttaccgtatccgtaccgatttagctcaccattcaacccaccccggacgaacgattcctgcccgtggcgcacacgtgcttcaatctgctggatctgccgcgctacaagaccaaggagcgcctcaagtacaagctgctacaggccatccagcagacgcagggcttcagcctggtctgatcgatctgatctggacccatttttttacatcgacctcaaactacaggtattttccgaaatcttcggatttcgcgcattttggattgaagaatgaaaattggctactttcaaagacaaccccaacgtggaacactcatttatcagcgatcaaatcagcaagtacaatgtcgtgttatagctttaaactctagactagttattaatatcgcattgttatggagagaaaggaattcaaggaggtaaataaggttggtgcatcagtctgaggacaacaacaaatgtctaaatttccgtgtaacttttaccaataaagttatataatatggcttatatattgttattttcattgatcgcagtaacggttaagctttaaacccgataacgatagcttcgcttctgtccggaaacgagccgcgttggcagcaccgttggcgcacagctgagcccgaaatgtggcggcaaatcgaagtcgtcgaagtcagttcaacttcaactttggcaaggtgcgcggccgcgtgcggatttcgttcgttaatttcttcattcgccgccgagaactttttcggacgctcatttgcatgcgctgggcgtgcggtgcttgacattaaccaaccgaccgatttcgaaaactgcgcgcatatatgccgtcctagccccgcttcttcaaattatccaccaacaccaattcgcttacaacaaacgttgtccaaacgtcacctttaccgggtcaagctaacggtacccgcatcggaaaagaaattcaaacaggtagagcactgcgaccacaaaaaagtaacgacttcgggcgacagtttgtgaaattatgggtacttaggcccccagtttgcaattacatgtgtgccatcctggtcgcttgtccatctcaaacttcttaattcgctttatatgccgcgaacgaggcgagctggcctacaaaatcaattaccatcgcaacttttgcatatcctgacagctaacaaatgtccgggccacaaaatcc

SEQ ID NO: 27098 - DNA, 3442 bp, DROSOPHILA
ctggtttttgagtttttatattttttttctagaaggcctaaaatttatagagcgttgtaggtaacaggattcaggattagacttagattctgaaggcacacccatcgaaagcttgacgaggcatgaaccgagcaattggaatcgggagcaagtggacacaaaagaatgtagctaacaattggggacattctcgaaaattcttgtagcaccaacaagtaaattattatacccagaacaaccgaaggagctattgggcggatccagagcaatggcatctggcaaagagctctattgctggggaagcacgtcacatggtcaattgggacttggcggaatcgaggacgagcagatcctcacacctagtcagataccctggacaccggacactgctgtacagcaggtcgcctgtggacaccgacacactctctttctgaccgccactggaaaagtctacgcttgcgggagcaacgactactcccagctgggccacgatctgcccaccaaaaggccactgcttatccccgaactgcaggattacgtgatcatccagatctgctgcggcagccgccactcattggcgctctccgattggggccaggtcttaagctggggcgacaacgactgcggccagctgggccatgccaccgataaggagatcgtgcagctgcccaaggttgtgcggcaactggtcacaaagacggtggtgcagatcgcctgcggcaacaatcacagcttggcactgaccagttgtggcgagctgtattcatggggttccaacatctacggtcagctgggcgtgaactcccccaatgatttgacacattgcaactatcccctccgactaaccactctgctgggaattccgctggccgcaattgcctgtggaggcaatcactcgttcctcatctccaagtccggtgcggtgttcggatggggcagaaacaactgcgggcaactgggactgaatgacgaaacgaaccgctcgtatcccacccagctgaaaacgctgcgcaccctgggcgtgcgatttgtggcctgcggcgatgagttctccgtttttctgaccaacgagggaggggtgttcacctgtggagctggcgcctatgggcagttgggtcatggctttagctcgaatgagatgctaccgcgaatggtaatggagctaatgggcagcaccatcactcaggtggcctgtggcaatcggcacactctggcgcttgttccatcgcgcggcagagtttatgcctttggcttgggtagctctgggcagctgggcacgaggagtaccaagagcctgatgctgccgcaggtggtcatcggtccttgggtgtcgcccagcggatcagccctgttgcaatccaatgattcacaggtctcgttggtcatccgacagattttctcaggtggcgatcagtcgattgtgaccacaactttgtttgtagacaaggtgccgcccgaggatttcagaaactacaaccccaaatcccagatcctaaccctaacagcagaagtcaccaagcagtgtgctcaatgcaagcagggccttcaaagcgacatggatctactgagctctattgaactaatatttagaagccaggcgtgttggaatggttcctttctgctggatcacgaccgacactttggatgctcggttcgcaaccatggactggatctgaaagcagcccaactagcattcgacaatctgcgcgctgtggaaaatgaaagcattaggcaggtgatctgggacaatataaccaaggagctagttggttcgctggtttgctcaccggcagatgtggagagcatgcgattatatcttctgctcccactttaccacgagttcgtcaactccaagcactacaagtcactgcaggttccgtttgccaatgccatatttaagctagcagagaacccacggaaagtgctgaacaagtggttggcccaaacaccggctgaatacttcgagcatcttgtccagaacttcttgcatgttgtcatccatattataagtttcaaaatgggcttggctgccgctagtcccagcgccgaaagacgtcaacagctgctgccatataacactgaactcgagatcattctaaagctgatgaaaacgctctgccaaattaacaacgagcgccatgatcgcctaaactatcaaatcttttactggcctgatctttcggattatgcagacgtgcagcaggagtacgttaaatggatcatggccgacactgccagagatttcaatatttgcaactattcattcattttcgaccagtctgctaaaacagcgttactccaagcggatcaggcgctccagatgcactccgccatggccaatgcggctaccatggcattctcctttttcaactacgggatgcccatctcgcagttcattgtgctcaacgtgacgcgtgagaatctggtgcaggattcccttcgagagttgcagcattattcgcagagtgatcttaagaagccgctgaaaatcaagttccatggcgaggaggcggaggacgcgggtggcgtgcgcaaggagttcttcatgttgctgctcaaggatctgctcgatcccaagtacggtatgtttaaggagtacgagcagtcgcgtctgctctggtttgcagatctcaccttcgagacggaaaacatgtacttcctaattggcgttctctgcggtctggccatctataacttcaccatcatcaacttgccattcccactggctctgttcaaaaagctgctgggcaagccagtggatctcagtgatctccgtcagctttcccctccggaggccaactccatgcaatcgctgctcgactaccagggcgacgattttaaggaagtcttcgatctgacctttgagatatcgcgggatgtattcggggaggcggagacgaagtgccttaagcccaacggcaatgagatagccgtaacactggaaaacaggcaggagtttgtggatctctatgttgacttcgtattcaacaagtccgtcgagctgcactacaatgcgtttcacaagggctttatgaaggtgtgctctggccgcgtgattcacatattccagccggaggagctgatggccgtggtggtgggaaatgaggattacgactggcaggcgcttcaagacaactgcgagtaccgggagggctacacttcggtcgatgatacaatcaaatggttctgggaggttattcatgacatgtccgaggcggaaaagaagagttttctcctctttttaactggcagcgatcgcattcccatccagggcatgaaagcccttaaactcaccattcaacccaccccggacgaacgattcctgcccgtggcgcacacgtgcttcaatctgctggatctgccgcgctacaagaccaaggagcgcctcaagtacaagctgctacaggccatccagcagacgcagggcttcagcctggtctga

SEQ ID NO: 27099 - protein, 1057 aa, DROSOPHILA
MASGKELYCWGSTSHGQLGLGGIEDEQILTPSQIPWTPDTAVQQVACGHRHTLFLTATGKVYACGSNDYSQLGHDLPTKRPLLIPELQDYVIIQICCGSRHSLALSDWGQVLSWGDNDCGQLGHATDKEIVQLPKVVRQLVTKTVVQIACGNNHSLALTSCGELYSWGSNIYGQLGVNSPNDLTHCNYPLRLTTLLGIPLAAIACGGNHSFLISKSGAVFGWGRNNCGQLGLNDETNRSYPTQLKTLRTLGVRFVACGDEFSVFLTNEGGVFTCGAGAYGQLGHGFSSNEMLPRMVMELMGSTITQVACGNRHTLALVPSRGRVYAFGLGSSGQLGTRSTKSLMLPQVVIGPWVSPSGSALLQSNDSQVSLVIRQIFSGGDQSIVTTTLFVDKVPPEDFRNYNPKSQILTLTAEVTKQCAQCKQGLQSDMDLLSSIELIFRSQACWNGSFLLDHDRHFGCSVRNHGLDLKAAQLAFDNLRAVENESIRQVIWDNITKELVGSLVCSPADVESMRLYLLLPLYHEFVNSKHYKSLQVPFANAIFKLAENPRKVLNKWLAQTPAEYFEHLVQNFLHVVIHIISFKMGLAAASPSAERRQQLLPYNTELEIILKLMKTLCQINNERHDRLNYQIFYWPDLSDYADVQQEYVKWIMADTARDFNICNYSFIFDQSAKTALLQADQALQMHSAMANAATMAFSFFNYGMPISQFIVLNVTRENLVQDSLRELQHYSQSDLKKPLKIKFHGEEAEDAGGVRKEFFMLLLKDLLDPKYGMFKEYEQSRLLWFADLTFETENMYFLIGVLCGLAIYNFTIINLPFPLALFKKLLGKPVDLSDLRQLSPPEANSMQSLLDYQGDDFKEVFDLTFEISRDVFGEAETKCLKPNGNEIAVTLENRQEFVDLYVDFVFNKSVELHYNAFHKGFMKVCSGRVIHIFQPEELMAVVVGNEDYDWQALQDNCEYREGYTSVDDTIKWFWEVIHDMSEAEKKSFLLFLTGSDRIPIQGMKALKLTIQPTPDERFLPVAHTCFNLLDLPRYKTKERLKYKLLQAIQQTQGFSLV

SEQ ID NO: 27100 - DNA, 4185 bp, DROSOPHILA
attcgttcggtattttcgcatttggcatgtttgtggctaagatatcatcaattcaacacaatgatcaacaatattcaacgacaaacactcgacttgggaccctggatgcttcatcggcggcgctcgggaaactgaatttgacccactaagggaactaggcaaaattgcaacgctctgttggtaagcccaccaaatcgaagcgttcaggggcggccaaaaggaaaatgaatcattctaccgatttgaacaacgatcgaaacttcacactagcctatcatttcagtatcatagttgtatgttgtatggctaagaactactggaaatgtctttttgggcttatttgctttttggattttaacatatttgctgtgttttatattcgtttagtgggccttggtttttcgtttcttaagcgcaattcgcaaagcgtgcgaagattgaagattttccgaattttgaattctcatatttcggcccgtcgtcaagtttggcaaattgtttaataaacgctacacgatttcattttgtaaaattctaaatgctacttaatatggactttgaaaaaggtttatacttatgcaatctttagataataatcctgctgctcgagtagcatatgattttcgtatattgtttttgttgtagcaagttcgaattgtaaaccggaaacggaaatgttgctcttgcctagtgaattgtctcttgtctacgaattagaattagaattagatcgctgctacatatgtatatgtatatggctagagttaagtacaagtatatatatacgtggtaagctcataaatacacaataataatcgtcaatcaattcaatcaatcaatcggtgaatcaatcataattggatacgctaaaaactcttagcttagcttaggtctagaaatatgaatatgtctttcaacgtgtctgtggttttggtgtttttggtgtttctgtgtggtttgctgtatggtggctgagtggttgagtggttgcgtttttagttttcagtttttctgtggctgtgactgtggggtggtgctttcattggcatgtcgcgtagcgccaaacggcccgtaaatatgcaactatatggcaaacaggcaagtaagtgtttatatatattgagagagagagatatatagagagttaaggaaatggctcaatgcaattacaaccaattatttacttgcaggactttgtagttcttctcaaagggattacggaggatgggtttgggagggggatttttacggataattattgtatttttttttgaggagaatgaaaatctaaatctaactctagtcatctgggtccaacccgattagctctgcttgcaaacggcccttagtcttacaacaaatggttaagcaaaatactctcaaagcgatacggaattgcggcgacatactggtcatgatcagaattttccaaaacgaattcaatatgccgatccagacgacggcgaagttgataagagtactttggataacatcgcccgtgaccacctcgtacagacgcaacagaatccatggcagccaggacacccagaatgcaaagactaatgcgaatgacatcatatgactagggttcgataaattttcagccagagcagttgcatattctttatcgtgtatcggctcgccggacctaatcttacgcatcattacaaagatatagccgtagttgtgtacgattgaaatgaggctgggacctaagactaatatcgccaaggtggcgctatatgctgccatattcccccagtccagcatgcaaatgtgcgtcatgttgttctcgatgggcatcgagtagcccaggattgggggacagcacagcagggccgccgatatccaagtgaacaccatccagcattggcatctgcacgataaaggtcacaagagatcaaagattaatccagttttaatccagatgaggaggaattcggggttccattggcgctactcacctcgttttcgtctgcaccgtttcatatctgagtggcttccgcaccgcaagatagcgatccactgatatccacatgaaggtgtataccgataccgcccacagagtgacctccagatagccggtgaagcgacacacgatgtcgccgtacatccattctccggtcaaagcgggatacacggagaagggcaccaccaggagtccgcagagcagatcggcgatggccagggacaagaggtagtagttgatcacctctgtgggtcctgcgatgacagcaatatcgttagaaaacgaagtagaggtgtattcaaaaataataggcaaatgcaaacaataatatttaaatggatcattcaataatttgggcgagtctatttgtacgacattcactagaactatttagaaacctaaggttcttaaatttatccaataacaatcaatttataggataaaagtttaggtacaaaaaggggaaagaaataatatgcttaagcacaattggtttttgaattttttcaaagcaattaagacaacaagaaaacaacacatttgaatttttggggaggatgccgtgttacttcattcctttcactttcacatcaaaatcatggatgcattttaagtataaacattggacttaagtggtcaaaataaattatattcaacacatatgtaggttacttatgaaaatattatgcttgaggccaaacccaaccgcgagattcgagatgttcctgtggaaagtgttatgtgagtgtgatattcgtgcaacgtacccttgaagttggcataggtggcgataatgaggaggttggacaggacgatggccacgcccagtatcgatatgagcaccgccttggtgagggcctccaccttggaattatcctgtaggtagctcatttcctgcatttttacgggctggcactgtcggttgaaatgggcgctcctgtgctcgttgtatacgctcccttagctccttgtccgtttccctcctccttggctcctcctgctttcacctgctttcgctgctgctttcacccgctttctccgcaccttcttggcgggctgattgttatgcaaaggccagtggacgtggacgtgaccgtactttacttccggtcatggcggacgcccatgcaattgtcctgtgccttcggttgtgtgtgtcggtgtgtctgtgagtgtctatgtgtgcttaggtgagtgtgtcgatgtgtgagtgtgtgtgtgtgtctgggtgcgagtgttggtggcgtcctttattgtgcaacgaggcttgcacacgcgaaggtcgtcggagtccttggcgctgttttttcgtcctttctccaacgttggcgccaaatttgtataaattttctactgcctacttttatttgggctgcaacttctactactgcccaccttttggcgccgagccaagcatttgattgttaccctcacaatcctggcgtcgtggttaaggttaaggataaggttgtgctggtgtgtgtgtgtctatgtgtgtgtctgaagctcgtttaaaatgctgcttgggctaaaatcttacacgtaaaatctagtaattgcgtacaatttggtttctatcttagaggatcgttaatgatttaaagaattcgttttgttttgctaaattcacaacgctctttgctaagttttaatgaacgtcaaaactgttagttgtatgcttgaataattcgctactagttttaatatcgatttaaaaatgtacacatttcaaactcgcaagtggaagaataatgattattaatttaactatttaatgtgtaataattacgcggttttcagggctctttttctttcggggttagttgaaatatctttcgactataattaaagcacagcacaaatggttttgttgttttgtaaggcttctgttgtgctacatttaagtttgttaaaatagttcgataatagttcggttgttaagtatcggttttgctatttaatttcgctgcttggtgattgtgattatccttttgcttgtaaattctggctcttgttgctgttgttggtgtttaaactccacgtcctgctgtcgttttaagctaattgtgcgcatctgaaaggacaaaggatagcaattgtatgcctttagcgcttcataaatagtttacagaatcttccatcttgagccaatcaataaattatcccacatacggcagcaggcggaaaaagccttttagctgcacaaacgctttaca

SEQ ID NO: 27101 - DNA, 1584 bp, DROSOPHILA
acacactcacacatcgacacactcacctaagcacacatagacactcacagacacaccgacacacacaaccgaaggcacaggacaattgcatgggcgtccgccatgaccggaagtaaagtacggtcacgtccacgtccactggcctttgcataacaatcagcccgccaagaaggtgcggagaaagcgggtgaaagcagcagcgaaagcaggtgaaagcaggaggagccaaggaggagggaaacggacaaggagctaagggagcgtatacaacgagcacaggagcgcccatttcaaccgacagtgccagcccgtaaaaatgcaggaaatgagctacctacaggataattccaaggtggaggccctcaccaaggcggtgctcatatcgatactgggcgtggccatcgtcctgtccaacctcctcattatcgccacctatgccaacttcaagggacccacagaggtgatcaactactacctcttgtccctggccatcgccgatctgctctgcggactcctggtggtgcccttctccgtgtatcccgctttgaccggagaatggatgtacggcgacatcgtgtgtcgcttcaccggctatctggaggtcactctgtgggcggtatcggtatacaccttcatgtggatatcagtggatcgctatcttgcggtgcggaagccactcagatatgaaacggtgcagacgaaaacgagatgccaatgctggatggtgttcacttggatatcggcggccctgctgtgctgtcccccaatcctgggctactcgatgcccatcgagaacaacatgacgcacatttgcatgctggactgggggaatatggcagcatatagcgccaccttggcgatattagtcttaggtcccagcctcatttcaatcgtacacaactacggctatatctttgtaatgatgcgtaagattaggtccggcgagccgatacacgataaagaatatgcaactgctctggctgaaaatttatcgaaccctagtcatatgatgtcattcgcattagtctttgcattctgggtgtcctggctgccatggattctgttgcgtctgtacgaggtggtcacgggcgatgttatccaaagtactcttatcaacttcgccgtcgtctggatcggcatattgaattcgttttggaaaattctgatcatgaccagtatgtcgccgcaattccgtatcgctttgagagtattttgcttaaccatttgttgtaagactaagggccgtttgcaagcagagctaatcgggttggacccagatgactagagttagatttagattttcattctcctcaaaaaaaaatacaataattatccgtaaaaatccccctcccaaacccatcctccgtaatccctttgagaagaactacaaagtcctgcaagtaaataattggttgtaattgcattgagccatttccttaactctctatatatctctctctctcaatatatataaacacttacttgcctgtttgccatatagttgcatatttacgggccgtttggcgctacgcgacatgccaatgaaagcaccaccccacagtcacagccacagaaaaactgaaa

SEQ ID NO: 27102 - protein, 322 aa, DROSOPHILA
MQEMSYLQDNSKVEALTKAVLISILGVAIVLSNLLIIATYANFKGPTEVINYYLLSLAIADLLCGLLVVPFSVYPALTGEWMYGDIVCRFTGYLEVTLWAVSVYTFMWISVDRYLAVRKPLRYETVQTKTRCQCWMVFTWISAALLCCPPILGYSMPIENNMTHICMLDWGNMAAYSATLAILVLGPSLISIVHNYGYIFVMMRKIRSGEPIHDKEYATALAENLSNPSHMMSFALVFAFWVSWLPWILLRLYEVVTGDVIQSTLINFAVVWIGILNSFWKILIMTSMSPQFRIALRVFCLTICCKTKGRLQAELIGLDPDD

SEQ ID NO: 27103 - DNA, 2200 bp, DROSOPHILA
ttatttgactttattaacccattttgaaggcatcgaaaacggtgaccaaaaattaattggaattctcacattggggaatttcattgtctgatttttcattgccccagtacacaacatatatgtacatacgtatgtgcgattgtatgcgatgcatacatgtgtttctataaatgtgttcgtgttccagaggcactaaagccatttgcattttgtgcattgattaaagcggggcagaaaacggaaacggaaacagcagtcaatgaacttaaattcctgacgccaacggaataattttatgccacgttgccaagcgcaagaacgtactgctacatagtgttgtaaaatgggtctttagtgttggtcagtttaatttcagcataaagtccaaagaaagaggaatataactttttatagctggggtaaaaaaagaaacagttcttcacagatatttctgcgtattaaattgcttaaattcacgacaaagtaattgtaaataaacttgataagaagtttttgagacatgcttatctttaatctaatctaaatctaaaatacctaccaaatccatagtaaggatatattgctcaactttatacgctttgaattttgtggggtcatgcgaatggcgtcaggtgtcagggggttaaagcgtagatacgggcggcggacgattgaagtgggcgtggccggcagacgtggcaaagtaattagcggccgtcgcgccacagacagaaactataaatcaacttttcactcgttttttcgcttctacccccggcgtcttttgtgtggagctatatctttcgagaggtggccaatgggggggggttaagggaccgatgggtagctagcggggctgttaagggttaagggcggtgggctagatggcggtgggggcggtctgtgtccgtgtctgttgcgtgggcgtggctgcgataagcggcacccggagttcgctttactttagactgtttatcgaacaaacaatgtcatcataaatatgcgtcccgagcagccagaaaagaaggggatatcctgcaggaagacccgaagaaagggtgcggccagagataggaaaaataaggatgacagcaatgggttgatggctctcaacccttcgtcttatatgaaccacatctgcagcaaaagcacactagaagttggccaggaaaagcctatactatcgcttttttaaggaagtggaatagaatagaactataagtagaattaatgcaacttatatttattctcgcttagtgtattttctatcagttgcattcaaatacttcctgccatatttatttctaacacgcatttccctcaattgtccatccattttccccaccagatctcagacgtgcgactgtgcgattggaggcggcagcaatggcagcgctaccaactcaggagtgggcggggccggcggcagcgcctactcgacgaccgtcaatccaacgcgtccaaatggcggcaccacgcccaccaccccgtcgggcggaaacggaaacggaaatggcaacggttcgtcggcgacctcgtccggtggctcagtgggtggctcaaatggcagcggtggtggtgcaaacggtggtgcctgcatctgtgcgggcggcatcgccctgtccactggaaccggatcgagctccggcagcaacggcggcggcactctggccagcatcgtcggcagcggcggtctaatgtccaccggacccaccaccaccaccacggtgctcctgggcgccaagaccacggcggcgggtataggagcggctaccttgaacgacgacggaacgctcagcaatgcggagacgctgctatcttccaatgcacgattccaggccatatccgccattgcggtggcgcaggatggagtcatcaatgtggccgatcaaggtgagttcagcacatttaaaaggaatatacaataatatcaaaacagattacatacttgcaaatgttaaagatcttttgaacatttagattatagtcgagtcacaatgaaaacaggcatttcagttcaaagttcacattactcttgcgatgcatttttagacgtttttcgtgggatttttaagggttaccctcaaaacatattgctttttcagtatcctgacagaggggcccaacaactgtcatctgatacagcaaatttgtcatcttccttggttgtattttcccacatgtatgtgggtttatattt

SEQ ID NO: 27104 - DNA, 660 bp, DROSOPHILA
atgcgtcccgagcagccagaaaagaaggggatatcctgcaggaagacccgaagaaagggtgcggccagagataggaaaaataaggatgacagcaatggatctcagacgtgcgactgtgcgattggaggcggcagcaatggcagcgctaccaactcaggagtgggcggggccggcggcagcgcctactcgacgaccgtcaatccaacgcgtccaaatggcggcaccacgcccaccaccccgtcgggcggaaacggaaacggaaatggcaacggttcgtcggcgacctcgtccggtggctcagtgggtggctcaaatggcagcggtggtggtgcaaacggtggtgcctgcatctgtgcgggcggcatcgccctgtccactggaaccggatcgagctccggcagcaacggcggcggcactctggccagcatcgtcggcagcggcggtctaatgtccaccggacccaccaccaccaccacggtgctcctgggcgccaagaccacggcggcgggtataggagcggctaccttgaacgacgacggaacgctcagcaatgcggagacgctgctatcttccaatgcacgattccaggccatatccgccattgcggtggcgcaggatggagtcatcaatgtggccgatcaagatcttttgaacatttag

SEQ ID NO: 27105 - protein, 219 aa, DROSOPHILA
MRPEQPEKKGISCRKTRRKGAARDRKNKDDSNGSQTCDCAIGGGSNGSATNSGVGGAGGSAYSTTVNPTRPNGGTTPTTPSGGNGNGNGNGSSATSSGGSVGGSNGSGGGANGGACICAGGIALSTGTGSSSGSNGGGTLASIVGSGGLMSTGPTTTTTVLLGAKTTAAGIGAATLNDDGTLSNAETLLSSNARFQAISAIAVAQDGVINVADQDLLNI

SEQ ID NO: 27106 - DNA, 3434 bp, DROSOPHILA
agtttctctggttattaacttaaaaatttaaaaacactcaaaaaaaaagaaatgtagtttcacagacgaatgtcattcacaaaagttgtttgctatgccatttcaaatgttgtttgcaagtttgggtattcaaattagccacgaagagaggaagagctttcgcaagtgtattacgggaaatagatatgcaaataacaaaaaatacaacttaaacgaacaaaaaatatgaaacaaaacaaaaacaaaaaaacgctgatatatactttttccgtttgagtcgcgcttcgacgtctggttgattttggatttactaaatgccgatttgtttttctgcttttctcactatgcttttttttttttttttgaattttgtgtgatctgagaccagacttgtctctaacacttgtccgtgcccgaacgcgctctagtggattactggctggcaactgactgtttgctttgggccagactggttggatcggccttctcggcccacagcttttgagtcaagctcccaagctcccaagttgccaggtagccaggttgccaggttgaagagctgcggttgggtctctgtgcacttatcattcgttgtctccccacctaccaactctccggctctctagttctctggctctctggctcgacggagatgatcatctggctataacgagcgggttttgaaccgaagatgtctaaaagtatgcactaactgggctttctttctcataacttggctagaaatgcagtcgaagcaataactgttgaacagtcatttattattactaataacaatgccattttttttacacattttattaaggcgacataaccaatacaaaccatctcttaaattcctctgctccattgagatcaggtgctactactagttagaccaattaccatgtgagctagagtatttgaagcttcggtttgtagaacccaggacctcatgaagtgcaggattaacaacctcccagatgaaaaacttttctaatttgcgttcaatgaattgtgtttatacagaaaaggacaagcgaaatgttaatatcgggcaaaacgatgcaatcctctcgtccaatggaacccgtaccatctcgatttgatagctatactattttaacccgttggcaaaatgtcaaatgttgaaggagtcttgatgttcgtttctcagctgcgttgcaatattggttagttaatggaaaagaaatagcacagttaaattacttactttttgtgttaaacgatagttttgcaatcaccttctcgttgttacaaaaggcaatggcgagtattcgtcttgtccttttcttcttgtttgtcaaattcgaattgaatgtgtcagttgacccttaccaaggtcaggcaatcaacatatgggatggggaattgggttgattagattagtttggacatgtggccatttcggcggtagtgggagctagcacctgtatcaccgggatggcagttagtttggttaatggcttaaaagtaatacgttcctagacttaccaactgcactctgttcgtgaatgaatcttgtatgtatgtctttgtttgaatggcatggcagtatgattattcgattgacttgaatggcagtatgattattcgattgacatgcatggcagtattgttatttgtatgtgtgcgtctagatgtattataacgcagagttcacaaatagatttctgaaacaaaacgattttcattttaggtacagtttctaactttataaatattccttttttttataggtgacagaagccagccgaaactttcaactcacccgtcgctgcactaagaatttcgagagccttttgaaatttgtatttttccgaaactagttgtgctccagacgagctctggtggcaaactgaatatatttcgggttgggccggggtacatggatttgacagctccgtttgttcaatgaaattagatccaaggacaatgtgatcagggattccaagctggatcgcagttggccctgcccaactccgcaaattcagtgctacttaatatgtaaaatatataagctttttataaatatccatattcaaggctttaatatttgcacgcttttcaatagtccacactcatatttaacatattttataaaaccttggcctaaaccttgaacgccattctgtatctgtaatccatttaatttaatcaaccatccaacggatcacaaatcacgcatcacgattcgtcgatattcccggtgccactccccctttttgaccaattcccctcccacaatttttaagcattgtcttgcgattccagacaaagcaaaaatagtagactccgcttagatttaacaatattatatttgtagattcgtgtacaagtgtatacatataagcatgtagtgttaagtcgatttgtatattatatgttagattagatacaaactaatcattcagcaggaactgcaccgttggtcctttttaaattaaaggaatgttaaaggaatcttactgctcgttcttcagctgcgttggaaaatttgttagtttatgcaaaagagggaaacagtttacttacttttcgtgtaaagcggttgctttgcaatccgtgccattggtttcacttacaaaaagcaatggcgagtatttgagttagcaaaacgcatgaaactctagaaatacaaatgttgtacgatttctgtgtagtttttctgtatgtttggtgtgttaaatttgtggcttaccaattacacaataatttggaaatttttatatttttcgttccgaaacgagatgtgctctggacgagctctgaaagcaaactgaatatatttcgggttgggcaggggtacatggatttgacagctccgtttgttcgatgaaattagatccaaggacaatgtgatcagggaattcaagtcggatcgcagttggccctgcccaactccgcaaattcagtgctacataatatgtaaaatgtataagctttttataaatatccatattcaaggctttaatatttgtacgcttttcaacaaatatatatattttttataaccttcgcatgaagcttatctgtaatccatttaatttaatcaaccatccaggtctggtggtttcaacccggtatccactgggttttccagcggatcacgattcccctcccacaattttaaacattgtcttgcgattccagacaaaacaaaaatagtagactccgcttagatttaacaatattatatttgtagattcgtgtacaagtgtatacatataagcatgtagtgttaagtcgatttgtatatttgtattttagattagatacaaactaatcatttagcaggagctgcaccgttggtcctttttaaattaaaggaatgttaaaggaatcttactgctcgttcttcatctgcgttggaaaattggttagtttatgcaaaaaaaaagaaacagtttaattac

SEQ ID NO: 27107 - DNA, 858 bp, DROSOPHILA
tgctgaatgattagtttgtatctaatctaacatataatatacaaatcgacttaacactacatgcttatatgtatacacttgtacacgaatctacaaatataatattgttaaatcctgatcacattgtccttggatctaatttcattgaacaaacggagctgtcaaatccatgtaccccggcccaacccgaaatatattcagtttgccaccagagctcgtctggagcacaactagtttcggaaaaatacaaatttcaaaaggctctcgaaattcttagtgcagcgacggaaatctatttgtgaactctgcgttataatacatctagacgcacacatacaaataacaatactgccatgcatgtcaatcgaataatcatactgccattcaagtcaatcgaataatcatactgccatgccattcaaacaaagacatacatacaagattcattcacgaacagagtgcagttggtgctagctcccactaccgccgaaatggccacatgtccaaactaatctaatcaacccaattccccatcccatatgttgattgcctgaccttggtaagggtcaactgacacattcaattcgaatttgacaaacaagaagaaaaggacaagacgaatactcgccattgccttttgtaacaacgagaaggtgattgcaaaactatcgtttaacacaaaaactgagaaacgaacatcaagactccttcaacatttgacattttgccaacgggttaaaatagtatagctatcaaatcgagatggtacgggttccattggacgagaggattgcatcgttttgcccgatattaacatttcgcttgtccttttctgtataaacacaattcattgaacgc

SEQ ID NO: 27108 - protein, 77 aa, DROSOPHILA
MYTLVHESTNIILLNPDHIVLGSNFIEQTELSNPCTPAQPEIYSVCHQSSSGAQLVSEKYKFQKALEILSAATEIYL

SEQ ID NO: 27109 - DNA, 4730 bp, DROSOPHILA
atgactgctggctgtttcaaagtgcctaatcgaatctggggaagatctgtgcctcgtcggcgctgcaagccattaatcgcggcttgttatcaaaaagcggcgaacgcttttccaggtttccgaagtggccaaaagtggagagtggttggttcctttgtcgtgttatgcagatgctgccacggggaaaacatcaaatttgcattacgggtttgactttcttttcgcctagaaattgccaaaatgggttggctcgttgggtggcggcggcccgtacggatgttatgtaactcagtttgtcgacatttttcgggcggcacaattaatttaagcacagtcttaattaaattgcattgccgcccgcggcaacagcagcaatatgtggcacccactcactctctttctctctgtcccctctctctgaatctgaagctggctgcaaagtttcccggctctctctcttagcccagttttccccccatttccgactctctctctcgctctctcgtcttggccaagtgcagagttctctctggcagacccacgttttcctggcagttccaccgagcgagacatagtgagagcacaaattagtgcgacttttagttttaattgccgcccgcaattcgcgtcaagtgtctccgaaggaagcacacacacccaacatcctgtatatgtatatataccatatcctgtacattaataataaccgacgcagcccagtcaggaaggccatggagaaacataactaattatgcaataatagtacaaaagtaatttgagcttcttgtgtgcatgcattcgccatgaatccagagacgcgcgtcgttgcgtatccaaacccaaaatccccaatgctagcatatttattgaataatctatgagttctgggcggcaggccggaggtgaaggttggttcccccacgtaccactcaaccccggatacgggcaccgaaaagctcttcagcttgtgttcgtacgtcagcaagtaaataaggcgccaatgtcgtcccacgttgtgatttcatgctgttcccccacccgccgcccgacagctcccgcaattttccgcatttccatcgagaagaaaattaaaaatagtttacaagtgccgacagcccaacatgcgaataataataacaaagccagccaagccgaaggaaaatcaataggctttctgccgttgtcaatagaatcgtagaaggggcatcgagggccagtgatttgcctactaaatgcgcctctctgcttctccattttgcaggttgaggccggggatgtcatcctcaaagtcaacggaacggatgtccatcgctatacaacgaaggaaggtgagtgcctgctgggaataatggaatgctgtcggagaaagctgtgaataattaactgaaacatatttttgaacagttctcaaatgcctgcgcctgtcggaacagctggtgaccttggagctgaagcgaggtaggtggaaatgtatatcattcctcgaggatgcaaaccggtcttgaaccaaagcgaaccgaaccaaactgaactgaaccaaactgcttttctaattaccatgatgcaatgctaagcgtcttgggtttttttcaaggtttctcaaatgattattgatgtgtacagtacaaccatacatacatatataaattttaaatcggtttgcttctcgaagaataaacttgaagaatggaaaactaactaaccttttatccttagatcccaagctcaaggcgcgtatcaaagagcagctggccaacacccagagtccgcactatgtggacattgagtcgccgaacatctacgattaccacagcagcagcaccaactcctcgccgaatcaccggccgaacgctggtggcaagggggcggcgaccacgccctcgcagaccggactgcgctacaagtcaccgacgcacttgccctcgctgcgccagaattcgtcgccactgctggcgagtggatccaccacgaccacaaccaccgccacgcatacgcacagccacagtcgaaactcctcggccagctccaccaagattaaggtggtggagacaagcatcaccacctcgaccacgaacgtagtgggcctcacatcgcccaccggtagtgttgggggtggtgttggtggggaggccacttcgcccaccttccgcccctcacgcattccacaggcgctcaccaaatgtgccgtacccaagcccgtgcccgttctccattcgccgcagaataagcggccacgcccatcgcagattccgacaaaggcggcgaacggaaacgggaacggacataccgcccatctgccaccgcaatcgttgcagcattccaacagctacagcggcagtccggtgactcggcagcggtttgccgatagggagccggagcgggaaccggaaccgaattcggcgccaccgcagccggcgaaggcgccacgctttgaggcttacatgatgaccggtgaccttattctcaatctgtcccggacaccgcagaccagcaatccgcttcccgcccaggccaaaaaggtatgtgatccataaatcgtttaaaccaatatcagaaaaaacctaaacaaaacatttttattttacagattgacagtcttcgcgattcacccagtcgtttggtaaatccgcgtatcaacggcgcactagcaccgcgtgcctctggtgaatcctcgcccacgtcctcctcttcggtagactcgcccaccaacaccagctcagattccgtgaagcgcgaggcaaagctgctgcagaaacaacagcagcagcagcaacaaacctaccaacaacaacagcagcgggacagcatcaacaacagctacaatcgtaaggattcgctgaccaacgatacgctgctcatgtgcgaggagttggagccggacgaggagggcgagtatgtcctggaagaggacaacaaacagcagcggcagcgccaacagcaacaacgataccgccagcagcaaaatcagcaacgctacgaatactaccaaaacgaggacgagctggaggagcaggaggaggttgaggaggagcgcgaggaggatcaaacacactacgacatcaccaatattgaaacctaccagagcggtgtgggccggggtgacgacgatgacagtgatcggcagtgtctggtagacgacgacgatgacgatgatgcctacgatgatgaggagaacgatgcgggcgacgaggactactccaccaactcgctgggctccggttcagccaagcaacgattgcgggcgttgaaacagcgcactgccacccgccagcagcagcgaaatcgggatgccgtcgactgtgcaggacgctccggatcgggatcatcatctaccacggtcaagagcgaggctggcggcctgggcctagatgaaacctccttctcagtgccaacctctccgatctcgctgtcgacgccgctgatcgacaaggagacggccaactcggtgcccacgagcccggagcccagttcgcttgttccggagtcgagcagtggcgctggcgccggagccgtggtggtgcgccggcataacggacatgtggtgcggaagtgtgatgccgccggtttccgcaccagcaagtctgaggaccatttgcagcagatccagcgcgagggcatcgccgctgtgatacccatcgacattgatgaggatgtgaatagttcgctgaacacgctgctggacacgcgtcaggactccgaggactcgcaggtgaggcgtcgacgcgcttaggcactccccatccacgcaggatagtccgccggatagagctagacagcgaacagtcgaattttccttccgccagatctccccaagaacactcgacactcgtagttgatgagttacaaaccccgctctccgttttaaagtgcttatgtagagttcggttttcgttaactggtttctgtagtagtctgttgaccatatatgtatttgtgtatgcgtgtgtgttagccattgcattgtactgtaagccattcatatcatccaatcatccctagacctagacccaaatcaaaaaacccactgtttttcttgctcacttgttaacttgttacctcgttactttgaagttgcctacctaacttaacttacttactactaaacaactctctgtctatcttactctcttgtttcgcgtttctttcttctttcgttttctcgtttctctgtttcctactttgactcttctcgaatcgatttgatatgcgcaatttattgtcccccgtgagctttctagtcgatggccactgtaattgtaaacaactcgtcattggcctcgaacaacaacgagggcgaacagaccgacaaccgcagcagcagcagcagcagcaactccagcgacaacaataactgcagcagcaacaccggcgaaccagcaacgagtgaaactgcaacagcaactgcaacaatcataactgcaacatcaacgagaacgatgaactgcagcagcaaattaaactatattttatgcaaaaaggttgccatttgcatagttggcatgctgattaatgtgacttttgattttgatttcgtttcgattttgccgactttgattttctgcctgcgcttgaaaaagttttgtatgtagaagatgagaacctttcgacaccaaacgcttgtccacaacgtacatacatacgtacatccacaccgcaacacccgaaccaaatgcataccacctaagtttctgacactcacacacagaacagacaccgaacgctttcagcac

SEQ ID NO: 27110 - DNA, 2082 bp, DROSOPHILA
atgtcgtcccacgttgttgaggccggggatgtcatcctcaaagtcaacggaacggatgtccatcgctatacaacgaaggaagttctcaaatgcctgcgcctgtcggaacagctggtgaccttggagctgaagcgagatcccaagctcaaggcgcgtatcaaagagcagctggccaacacccagagtccgcactatgtggacattgagtcgccgaacatctacgattaccacagcagcagcaccaactcctcgccgaatcaccggccgaacgctggtggcaagggggcggcgaccacgccctcgcagaccggactgcgctacaagtcaccgacgcacttgccctcgctgcgccagaattcgtcgccactgctggcgagtggatccaccacgaccacaaccaccgccacgcatacgcacagccacagtcgaaactcctcggccagctccaccaagattaaggtggtggagacaagcatcaccacctcgaccacgaacgtagtgggcctcacatcgcccaccggtagtgttgggggtggtgttggtggggaggccacttcgcccaccttccgcccctcacgcattccacaggcgctcaccaaatgtgccgtacccaagcccgtgcccgttctccattcgccgcagaataagcggccacgcccatcgcagattccgacaaaggcggcgaacggaaacgggaacggacataccgcccatctgccaccgcaatcgttgcagcattccaacagctacagcggcagtccggtgactcggcagcggtttgccgatagggagccggagcgggaaccggaaccgaattcggcgccaccgcagccggcgaaggcgccacgctttgaggcttacatgatgaccggtgaccttattctcaatctgtcccggacaccgcagaccagcaatccgcttcccgcccaggccaaaaagattgacagtcttcgcgattcacccagtcgtttggtaaatccgcgtatcaacggcgcactagcaccgcgtgcctctggtgaatcctcgcccacgtcctcctcttcggtagactcgcccaccaacaccagctcagattccgtgaagcgcgaggcaaagctgctgcagaaacaacagcagcagcagcaacaaacctaccaacaacaacagcagcgggacagcatcaacaacagctacaatcgtaaggattcgctgaccaacgatacgctgctcatgtgcgaggagttggagccggacgaggagggcgagtatgtcctggaagaggacaacaaacagcagcggcagcgccaacagcaacaacgataccgccagcagcaaaatcagcaacgctacgaatactaccaaaacgaggacgagctggaggagcaggaggaggttgaggaggagcgcgaggaggatcaaacacactacgacatcaccaatattgaaacctaccagagcggtgtgggccggggtgacgacgatgacagtgatcggcagtgtctggtagacgacgacgatgacgatgatgcctacgatgatgaggagaacgatgcgggcgacgaggactactccaccaactcgctgggctccggttcagccaagcaacgattgcgggcgttgaaacagcgcactgccacccgccagcagcagcgaaatcgggatgccgtcgactgtgcaggacgctccggatcgggatcatcatctaccacggtcaagagcgaggctggcggcctgggcctagatgaaacctccttctcagtgccaacctctccgatctcgctgtcgacgccgctgatcgacaaggagacggccaactcggtgcccacgagcccggagcccagttcgcttgttccggagtcgagcagtggcgctggcgccggagccgtggtggtgcgccggcataacggacatgtggtgcggaagtgtgatgccgccggtttccgcaccagcaagtctgaggaccatttgcagcagatccagcgcgagggcatcgccgctgtgatacccatcgacattgatgaggatgtgaatagttcgctgaacacgctgctggacacgcgtcaggactccgaggactcgcaggtgaggcgtcgacgcgcttag

SEQ ID NO: 27111 - protein, 693 aa, DROSOPHILA
MSSHVVEAGDVILKVNGTDVHRYTTKEVLKCLRLSEQLVTLELKRDPKLKARIKEQLANTQSPHYVDIESPNIYDYHSSSTNSSPNHRPNAGGKGAATTPSQTGLRYKSPTHLPSLRQNSSPLLASGSTTTTTTATHTHSHSRNSSASSTKIKVVETSITTSTTNVVGLTSPTGSVGGGVGGEATSPTFRPSRIPQALTKCAVPKPVPVLHSPQNKRPRPSQIPTKAANGNGNGHTAHLPPQSLQHSNSYSGSPVTRQRFADREPEREPEPNSAPPQPAKAPRFEAYMMTGDLILNLSRTPQTSNPLPAQAKKIDSLRDSPSRLVNPRINGALAPRASGESSPTSSSSVDSPTNTSSDSVKREAKLLQKQQQQQQQTYQQQQQRDSINNSYNRKDSLTNDTLLMCEELEPDEEGEYVLEEDNKQQRQRQQQQRYRQQQNQQRYEYYQNEDELEEQEEVEEEREEDQTHYDITNIETYQSGVGRGDDDDSDRQCLVDDDDDDDAYDDEENDAGDEDYSTNSLGSGSAKQRLRALKQRTATRQQQRNRDAVDCAGRSGSGSSSTTVKSEAGGLGLDETSFSVPTSPISLSTPLIDKETANSVPTSPEPSSLVPESSSGAGAGAVVVRRHNGHVVRKCDAAGFRTSKSEDHLQQIQREGIAAVIPIDIDEDVNSSLNTLLDTRQDSEDSQVRRRRA

SEQ ID NO: 27112 - DNA, 2255 bp, DROSOPHILA
ttcaaaacagattttgaatcttgtccgaaacggcgcgtagttttttgaattgtcacactgccgttactttttccaactggccgaacgtgacgcatttctttggcttcatttcaatgaataaaaatctcttcgccagatgcagactctgtggaaataattgctagtttacatactctcatgtaaattggcattttctgtgcgccgtaatgatgggaaacatgccaatgacattgttgtccaacgcgagtcgaacattatggctgtggaaagcgaatttacatagacaatgtgcgatttttgtggcctgaaaagaaaagcgcagattttgccaatggtcaattaaaatacattcccatttccacacagtgcccaccattatttccgctcaggcaaactgcactcgacttcgaaacaagtttttgttgatgtctggtttaaccgaaactaaaaccaaaaccaaaacaaaaacaggtgcaacaaccgccaggccagcggcattttatataatggtcagtcttaaaaaggagcaatttctcacatagttaataggcattgctaacatactttggcttgtccactgctttttcaaaaactgttaactttctgcaattccacttaaataaataattcttcctgtatcatttgaaaatgaatcgattggcagaaccgatttcttgagaacgtgctatcgatacaattagttgtttagtgatcttaacttaactcctcgctatcggaaaatctggacaaattataaaatttctaaaactagaaattatccatgagacgttatgtaacatttcatattcttgcaacaacattcttcacaatacttttatacttaacaagaaaatgttcaaataaagtttttagagtaagtcgatctccgatacataattgtgcacatcttgagttttcccatcccttgttgtctttcgagcgagctggcagtgctgactcagtataactgactaactaatcgcctaacttgcgcgcgatcatgtcccagaaatccatcgatttgggcttgggtgtccgaaacgtcaaggagaaatcttcggaatacatagtggagaagtttctaggaaagcgctatctgcgtggacgccctcagtatctgaccaagtgggagggctatcccatagagcagtgcacttgggagcccctggagaacttgggcaagtgcatgacgctgattgcggattacgaggccgaactattccagcagagccgggagaaaaagaatgaccaatgacaaaaaaaagattttaataaaaattattgcttacaaataaaagcttaatagatcgtgttcccattatttaatggcttttattttattatacatatgtatatttcaataaaatataaccagggctgcaaaaacgttgctgagaagcgccaggcttttcatacggttatcatgttaagattatttgcgagctaatttattaagcagagtcaaataaattagcttaatttatttgttgcttattgaagtcttatagtgagttatgcacattaaaaaaataccaaaagctttcccatccctaatagtattccgagtgggttagcagcacctccttgcgcgtcgttccatttaccgttcttttgctcggcgtcctgtgagcggataagttatgtctcgcaaccatcagcgaccaaatcttggtctggtcgatgcaccgcctaatgatcatgtcgaagaatatgtagtggagaaaatcttaggcaaacggtttgttaatgggcgtccccaggttctggtgaagtggagcggttttccgaacgagaacaacacctgggaaccattggaaaacgtaggcaactgcatgaagctggtctccgacttcgagtcggaggtcttcaggctgcatcggaaggccgcggctaaatctgtcgggaaatcgaagtcaagtcctagcagcagcggtccattgatcaccgagaatggccccagcagctctaagaaaacacaacaacattccaagtcggtgcaggcaaaaaacacagctggaatgtcgaagatgaatcagaaaaaaggaaagaatattaagaaaacggcgggaaaaatcaaagatattgaaaattatcccaaaactcagatgcctagtactagccaagtctccacagattcaactgaagttttcgacggcaatccatcagccacaacgacgaacatgattaagagtcccaggattcaaagccttttcagtgatctgaacttgatcgaacccactaaagacaaagatgtg

SEQ ID NO: 27113 - DNA, 255 bp, DROSOPHILA
atgtcccagaaatccatcgatttgggcttgggtgtccgaaacgtcaaggagaaatcttcggaatacatagtggagaagtttctaggaaagcgctatctgcgtggacgccctcagtatctgaccaagtgggagggctatcccatagagcagtgcacttgggagcccctggagaacttgggcaagtgcatgacgctgattgcggattacgaggccgaactattccagcagagccgggagaaaaagaatgaccaatga

SEQ ID NO: 27114 - protein, 84 aa, DROSOPHILA
MSQKSIDLGLGVRNVKEKSSEYIVEKFLGKRYLRGRPQYLTKWEGYPIEQCTWEPLENLGKCMTLIADYEAELFQQSREKKNDQ

SEQ ID NO: 27115 - DNA, 3505 bp, DROSOPHILA
tgttgtgaaaagctgtaaaaaaagtttcggatagcaaactacgagtatataacatgaaggtaagtattacacctgaagtatgttgggtaaatgataggtagaattaataaattgaacttagccaagtactactagtcaactataaggtaaacaataaattccagtttgaccaatatatctatatctatctatctatagatcatatagctgtatgcagttgaatcggtcgttttacattacacagaccagaaagtaacttggttttattttaaagaaataggtttataactcattaagcgtttttaacataatttccaaaataaaagggcttatcgaagttgtgcaactcctcagaacaaacttgtttcgaactgaaaaacagagaaaagctggtagtacaccatatagttacatcctgctgccacactgcttatcctagtaaaacttatcctgtcttagttgaccttcgtacgacctcagactcaacatgcttaaagatcgaccgaaagtccctggtaaggccatattggtccattgcctcgcacaaagttcgtatgaaaaacgaaccatgattttcattgcgatagctcaaatagggttcgttgttgctcaagattaggaggataaatccagcctcctgggtgaattgtttttcagacccttaaagaaattcgttactaagaataaaaccgtttgctcatatttcttacactccttcactttgtttctaacgaccgccaaagctggattagaaattacttcaacaggacattttaggctttcaaatgtcttgcgaagagcattggcatcatttgagctaccccttttgttcaattgagaatcctgagggaactcctcatgttgagaatgtacacaattggaggcttaagttttttgattaaatcatatagtctgtcaatttgtagcaatacgtactttttgatgttcaattccttgaaaaagatccatgtttcttgttccccgatctaaatttaactgagtaatacataaaggcccgtattagatttatggcacaatcatattcatcgacaaatgcaagtacaacttgggtgtttattgttatttcccgattataaaggtattgccgattgttgcctttttataccctcttaccctactttattacttaattaacctacttacttaattaattggctgtgcttttaacatttgcacagatgaagtcggtggtgaaaacccaaaagagtcaacgggagaaaagacagcaaaagacaggcaagacagcctgttgacgagttatcttctattctacgagtggcgggtagataaagtcagaaggtcagtaaaggaagttttaatcggaaaatagtaactcaatttgtactttttttgtcgatgaacaaatccggatgttggctatatagctggccagatagtgactgataagacaacaaatattgcacttgcttttgtgcattactcagttaacgttatatcgccgaacagtaaacatgtatctgcccgaaagaacagaacatcaaaaagtacgtattgttattattattattttaagaaacttaatggtctttacgaaaaatccattgatacagattgagagactatatgacagcaacagggtcaacgctgaaccagtaagtataaattgaagaaaatcacaaatcatccattgaattttccttagggtcaaggccttgatttaaatgaaaaactaaagccgccagccgtgtacattctgaatcatgagcagttccctcaggattctcaattgaacagaaagggtagctcaaatgatgtcaatgctcttcgcaaaacattcgaaagcctaaaatgtcgagttgaagttatttctaacccagcgttgccggacgttaaaaacaaagtgaaggagtgtaagaaatatgagcaaacggttttattcttagtaacgaatttcttcaagggtctgcaaaacgattcacccaggacgctggatttgtcctctttatcttgagccatggcgaccgaaaagagaaaatcttggcatgcgaccacagggaataccacttggacgatgacgtcctttttcccctctttagaaatccaaccttatctggcaagccaaaaattttaattgttcaagcctgcaagggtccgttgagagctgacgcgaaaaaaatgaacaacgaaccctatattaagtgttacagctgctccgagggctatttgagctatcgcaatgaaaatcatggttcggttttcatacaaaccttgtgcgaggcaatggaccaatatggccttaccagggactttcagtcgatctttaagcatgttaaggctgaggtcgaacgaaggtcaactatgacagggtaagttttactaggataagcagtgtggcaacaggatgtaactatatgatgtacttcctgcttttctctgtttttcagttcgaaacaagttccttctgaggagtcgcacaacttcgacaaacccttttattttggaaattatgctaaaaacacttaatgagttgagttatatattaaagaatttctttaaaatatatttaagatactttctggtcagagtaaagttaaatgacagattcaactgatccatatatttactttcactttgtcaaactgtaatttactgtgttgatatcttatctttaaataaatcaatcgaagcggaacccggagataatgttaagtgttcaaggaagtgggtaagcaagtgggtaggcattataacgcgcttacctatttatcaaactttatttaccaatatacaaaatatatctgtggacggcagtcaacttagtgacgaagcgcacctggaatttacaaagctctgacatggttgattgtaaaaagtactgtacaatagatttttttttataatatttttaatttcgaatccgatttgctagggataatctcaattttatttgagttcaccaaaaaatcatgaatgaattttacaattaacttaaatactattgagatcataagcacctagaaaaacagatagcacaatccagacccacaaggcaattttattctttctgcgtaagctgttaaacttccaggacgtcttcgggatctctgacttcgacataatacgagtagacgacaatccagaagtagataccacagcctgaaaaggatgttctttaaggatgcagtaactcacaaaaataacaacttacatatatatattgcagatcctgggactattatctcgcggtaccgctcctccttaatcagcatgtagatgcagtacacaaacaggatcatacagttggtcaggctagtgatcaggaagaacatcaggagaacagttgatctctatagtggtttagcttggagatgggatcggctgcagtgggtgccaaacagtggctgcacttacgattaaagctccgcccagcaggaatgtgcagccgatacaatggcagattgccaccgcttgctcaatgtgtgcgatgaactcctctagatgaaggtgggatgcattaccaggg

SEQ ID NO: 27116 - DNA, 841 bp, DROSOPHILA
gtaatacataaaggcccgtattagatttatggcacaatcaatgtatctgcccgaaagaacagaacatcaaaaagtacgtattgttattattattattttaagaaacttaatggtctttacgaaaaatccattgatacagattgagagactatatgacagcaacagggtcaacgctgaaccaggtcaaggccttgatttaaatgaaaaactaaagccgccagccgtgtacattctgaatcatgagcagttccctcaggattctcaattgaacagaaagggtagctcaaatgatgtcaatgctcttcgcaaaacattcgaaagcctaaaatgtcgagttgaagttatttctaacccagcgttgccggacgttaaaaacaaagacgctggatttgtcctctttatcttgagccatggcgaccgaaaagagaaaatcttggcatgcgaccacagggaataccacttggacgatgacgtcctttttcccctctttagaaatccaaccttatctggcaagccaaaaattttaattgttcaagcctgcaagggtccgttgagagctgacgcgaaaaaaatgaacaacgaaccctatattaagtgttacagctgctccgagggctatttgagctatcgcaatgaaaatcatggttcggttttcatacaaaccttgtgcgaggcaatggaccaatatggccttaccagggactttcagtcgatctttaagcatgttaaggctgaggtcgaacgaaggtcaactatgacaggttcgaaacaagttccttctgaggagtcgcacaacttcgacaaacccttttattttggaaattatgctaaaaacacttaa

SEQ ID NO: 27117 - protein, 270 aa, DROSOPHILA
MAQSMYLPERTEHQKVRIVIIIILRNLMVFTKNPLIQIERLYDSNRVNAEPGQGLDLNEKLKPPAVYILNHEQFPQDSQLNRKGSSNDVNALRKTFESLKCRVEVISNPALPDVKNKDAGFVLFILSHGDRKEKILACDHREYHLDDDVLFPLFRNPTLSGKPKILIVQACKGPLRADAKKMNNEPYIKCYSCSEGYLSYRNENHGSVFIQTLCEAMDQYGLTRDFQSIFKHVKAEVERRSTMTGSKQVPSEESHNFDKPFYFGNYAKNT

SEQ ID NO: 27118 - DNA, 2607 bp, DROSOPHILA
ctgctgaactttatacgcacggcaaatgcagaagagagtggcacggggggcgataatggtctgtttgaaaaccttttgctcattctcagcgatggacgtaatatattcagcgaaggtgcacagaacgtaaagaacgccattaagttggcgcgtctgcagcgcatcttcctggtatacatcattatcgataatccagacaataaggtaatgggttttcaagaacattcaatgagtttaactaatccttggctacctttagaactcaattctggacatacaacatgtggcggtgaacgcagatggatcagtgaacattaattcctacctggacagttttccttttccgtactatgtgatagtccgggaccttaaccagctgccgctggtgctcagcgaagccatgagacaatggttcgagttggttaacagcgagtaatcattgcatttactcttgagataaaaagaagtgacttttacttattaatattaatacaggcttgaatatttagcccacttagttatatttcacatgtaaatattaacttgtacaaactgaaaatgtgaccgagtgtacgattgttcactaatgcttttataatttacttgaaattgttactttttttattttttacaattaaacttttgtaaacagtataaagttagattatataaacattaaacgattctaaggtgcttatatcgttatcgcactgggccttgatcttcaatcattgttgtgaaaagctgtaaaaaaagtttcggatagcaaactacgagtatataacatgaaggtaagtattacacctgaagtatgttgggtaaatgataggtagaattaataaattgaacttagccaagtactactagtcaactataaggtaaacaataaattccagtttgaccaatatatctatatctatctatctatagatcatatagctgtatgcagttgaatcggtcgttttacattacacagaccagaaagtaacttggttttattttaaagaaataggtttataactcattaagcgtttttaacataatttccaaaataaaagggcttatcgaagttgtgcaactcctcagaacaaacttgtttcgaactgaaaaacagagaaaagctggtagtacaccatatagttacatcctgctgccacactgcttatcctagtaaaacttatcctgtcttagttgaccttcgtacgacctcagactcaacatgcttaaagatcgaccgaaagtccctggtaaggccatattggtccattgcctcgcacaaagttcgtatgaaaaacgaaccatgattttcattgcgatagctcaaatagggttcgttgttgctcaagattaggaggataaatccagcctcctgggtgaattgtttttcagacccttaaagaaattcgttactaagaataaaaccgtttgctcatatttcttacactccttcactttgtttctaacgaccgccaaagctggattagaaattacttcaacaggacattttaggctttcaaatgtcttgcgaagagcattggcatcatttgagctaccccttttgttcaattgagaatcctgagggaactcctcatgttgagaatgtacacaattggaggcttaagttttttgattaaatcatatagtctgtcaatttgtagcaatacgtactttttgatgttcaattccttgaaaaagatccatgtttcttgttccccgatctaaatttaactgagtaatacataaaggcccgtattagatttatggcacaatcatattcatcgacaaatgcaagtacaacttgggtgtttattgttatttcccgattataaaggtattgccgattgttgcctttttataccctcttaccctactttattacttaattaacctacttacttaattaattggctgtgcttttaacatttgcacagatgaagtcggtggtgaaaacccaaaagagtcaacgggagaaaagacagcaaaagacaggcaagacagcctgttgacgagttatcttctattctacgagtggcgggtagataaagtcagaaggtcagtaaaggaagttttaatcggaaaatagtaactcaatttgtactttttttgtcgatgaacaaatccggatgttggctatatagctggccagatagtgactgataagacaacaaatattgcacttgcttttgtgcattactcagttaacgttatatcgccgaacagtaaacatgtatctgcccgaaagaacagaacatcaaaaagtacgtattgttattattattattttaagaaacttaatggtctttacgaaaaatccattgatacagattgagagactatatgacagcaacagggtcaacgctgaaccagtaagtataaattgaagaaaatcacaaatcatccattgaattttccttagggtcaaggccttgatttaaatgaaaaactaaagccgccagccgtgtacattctgaatcatgagcagttccctcaggattctcaattgaacagaaagggtagctcaaatgatgtcaatgctcttcgcaaaacattcgaaagcctaaaatgtcgagttgaagttatttctaacccagcgttgccggacgttaa

SEQ ID NO: 27119 - DNA, 379 bp, DROSOPHILA
gtgtacattctcaacatgaggagttccctcaggattctcaattgaacaaaaggggtagctcaaatgatgccaatgctcttcgcaagacatttgaaagcctaaaatgtcctgttgaagtaatttctaatccagctttggcggtcgttagaaacaaagtgaaggagtctatcgcaatgaaaatcatggttcgtttttcatacgaactttgtgcgaggcaatggaccaatatggccttaccagggactttcggtcgatctttaagcatgttgagtctgattcgaaacaagtttgttctgaggagttgcacaacttcgataagcccttttattttggaaattatgttaaaaacgcttaatgagttataaacctatttctttaa

SEQ ID NO: 27120 - protein, 63 aa, DROSOPHILA
MKIMVRFSYELCARQWTNMALPGTFGRSLSMLSLIRNKFVLRSCTTSISPFILEIMLKTLNEL

SEQ ID NO: 27121 - DNA, 2792 bp, DROSOPHILA
attaccacctcccagcgtctctatgccgagcagtatgcccaggcacagcgggacctgcacctggatcgggttcccacccgagtgccaactggatgtgcccgtttcaagagcgacattatgcagttcctggatgtccagttgaaggataagtacacgaacctagtgcacagcacttaccacaaaaagggcgggcactttgccgctctagaggttccaaaggttctatacaaggattttatagactttgtcgaaacggtggaacgtaagtttaaaattaagactctgtagatcttccaataaaagcttaattgttacaaaaaaaaattagtttttatttggtatcgataacctaaatggttttgatcctggaaatgactaggtacccggaaaaatagtagtagatgttaccgttttccactttcaacttttcacttttctatttaaccttaatattcaatgttgtattaggaatatttaatttgttatatacacttcaatgaataagtccaaaacaattcattcatatttttcataataataataatttggtttagtttctatggaacgcatagattaaatttttagaagaataatcgggacatagtttaatttttatcattatcggtattttttaaatgttgtacctcagcaaacacaaaatactgaaaagggtaccttgttttagggccaggtacacgcgtgaagttacctcccatccctgatcctggaacattacaatcgggaatcggagttaaagtggctgcgcagatggtcaagaatatataggaatattaaacaattacaaatttggaatacaggatttgtgtgagatacaggctggtccagaagctcataaaacgaacaatttataccacgatctaggaatttgccatcaagtttcgaagacaaagaaacttcaacttagagaaactcagaaaaaaaggagtaacagtaaaagggtgacattttctgaaacacgaaaaaaatgactgatttaaagttaactgtggcactaaccagcgttaatgcggagaatatgtcgcggcacgacatgcttcagtgggtgaacaacatggtccacggccacttcaagaagatcgaagagctgtgctcaggtaagacttataaagagcataaaattgggcaatgctgctaagttctatggtcttctccaggtgctgcctactgccagatgatggagatgatctttcccaactgcattaacctgaagcgcgtcaagatgaccgccaaactagagcacgagtatctacacaatcttaggctcttccaggaagccttcaatcgcttgaagctggacaaaacggtaccaatcgatcgactgatcaagggtcgcttccaggacaactttgagttcctgcagtggttcaagaagttcttcgactcgcaggctccgggcttggagaacattaagtcgctggccaatgcgccgttggcaaagcccataaagccgcgccaattcgccaaggagcgatcaccagtcaacgccaatgatgatgcgctcaaagagctgattgatgaaatgaagaacctaagcctgaagcgggaggacatcatggaggccagcaatcagatctacaacaaactgcgcctggtcgaggatttggtcaacgacatgatcaacaacaaccagctagttgagttgtgcaaacgcattcaagcggtgctctacaaaacgatagatggtgaaatcaacgaggaacccgtcgaggttaatgaggataatggtgatgaaggcgccgaacacgcggatcccaatgacggattatattagaattctttttatttgtacttattttgttttatacaatcatttaattatttataaagaaagcattataaaatcagccgttggaatcattgtctgaggaggagtaatcccccactaagcttatgggtttttcgttcgtggctgaagatgtagtttcttccaactttttacgccgtatgccaagatcctgtacttggagctgggtattcagaaccttttgtcgcttgagtccaccaaatgtggtgactgttgctccgggaagcgctggacgcataagcagctccaaccgctgctcggattcccgttccagagctgacttcgtctgcaacttcatcagggctgccatttcgcgatcttgtgtggtctccggaaggagagcaatgtccaagctgctcttggccaacaactgtcgatccagctcctgctgaccattgatctctttcttctgctggcgaaactcggcgcgtaggcgactattggccatatagctgtcatcccagacgctcatgttgcgctccactagtttctggagcacgggcctggcatctgcccctgccttagcatccttggcttgatgctccaacttgtacatggcatcgtcgaagagacgcttttgtacctccttggtttccggtacaacttgttcgttctgcaagggatcccagcggttctcctgccgtctagcccccgaaagtataacatagtccaaattgccgggatccgtctggatctcaaagtggttgtcgcacaagtggcacttcatccggaacttaaaaaccggcgtagtgtagtacatgcccaccttggtcttctccgcattgtagcgcacgcccatgccgatgtggttcttgcatccatcacaccagatattgtagggcatctcaaagcggatgatgatgattcccaggtgaatcttgcgggcccgttcccgcagggcgtgggttccctggaacttgttgagaccgcccttcttcggatcatagtcgggcggatagtacttgtt

SEQ ID NO: 27122 - DNA, 732 bp, DROSOPHILA
ttaactgtggcactaaccagcgttaatgcggagaatatgtcgcggcacgacatgcttcagtgggtgaacaacatggtccacggccacttcaagaagatcgaagagctgtgctcaggtgctgcctactgccagatgatggagatgatctttcccaactgcattaacctgaagcgcgtcaagatgaccgccaaactagagcacgagtatctacacaatcttaggctcttccaggaagccttcaatcgcttgaagctggacaaaacggtaccaatcgatcgactgatcaagggtcgcttccaggacaactttgagttcctgcagtggttcaagaagttcttcgactcgcaggctccgggcttggagaacattaagtcgctggccaatgcgccgttggcaaagcccataaagccgcgccaattcgccaaggagcgatcaccagtcaacgccaatgatgatgcgctcaaagagctgattgatgaaatgaagaacctaagcctgaagcgggaggacatcatggaggccagcaatcagatctacaacaaactgcgcctggtcgaggatttggtcaacgacatgatcaacaacaaccagctagttgagttgtgcaaacgcattcaagcggtgctctacaaaacgatagatggtgaaatcaacgaggaacccgtcgaggttaatgaggataatggtgatgaaggcgccgaacacgcggatcccaatgacggattatattag

SEQ ID NO: 27123 - protein, 231 aa, DROSOPHILA
MSRHDMLQWVNNMVHGHFKKIEELCSGAAYCQMMEMIFPNCINLKRVKMTAKLEHEYLHNLRLFQEAFNRLKLDKTVPIDRLIKGRFQDNFEFLQWFKKFFDSQAPGLENIKSLANAPLAKPIKPRQFAKERSPVNANDDALKELIDEMKNLSLKREDIMEASNQIYNKLRLVEDLVNDMINNNQLVELCKRIQAVLYKTIDGEINEEPVEVNEDNGDEGAEHADPNDGLY

SEQ ID NO: 27124 - DNA, 6239 bp, DROSOPHILA
caaccacaacggtttcgcatggcaactccttggcattgtgtagtagtttattagcgacacgagttcatcattaaaggctacgaccttgtggaaaaagggtgggcaaatgccggccaattaaaacattccactttgttggcccaagcggtcaatgcggcctgaaaagctgcgccacttgcgcttaaagccagattgttttaccacatggctgctaccactttcgttcgctaaaggatgttgaaacatggctagatggactgcggataaatgtgtgagtttgctggcaacacgattttgcattaagctcaactcacataaaactcacagacgaaagcaaatgtcaactgatcaaattacgctgaaattgcatttcgctgccctggtggtaaattggtgagagccaagtttggtactttaaaagccaagtgcctggccaggatatcaaaggacccttatcggctttgctggggggccacaaaaacgtaatttggtgttgcatttccgtagcggcggccagagaacgtggcaaacaaagtgccacatgcagcttatttatggtaagcggcgtggttggataaagtcggaattactgcatgagatcacggaccgaattggatgtgccactactgagcaccattcgttcgctggcctcaagtgtgcggtggcagatgccaaaaacccagttaaaataaatagtgaaattcgccttcttttgtcttcttgggcgacgaagaatttacattccacttaatatggcttatgctagataaatcaattttaatggtcattgtattaccccatagtcagcagctatgtacagcatcctaaaaagtttggcacacataaatcaacgggatgccacatttttatcacactaaaatgtgacaaggacacgtgcggcgccaaaagatgagctaactccgctgcaaagtcagcctgtttatctcaaaaagttaaacataaattcaaaagaagtcgatactacggcgattaacggacgatgaacagattgtggacggaaaatgaacggcaaatgaacagtagatgaactctatataaacagacgatgaacacaaaatgaacggttgatgaacacaaatggttttgacatgggtaatcttaaagatttgggcttaactctcaatttgtattcttatgtagtatattttaatttaaaatttacttgcaaatgatttattttagctacattttatcactggccctggccgatctgctggttattataaccacagtgccgctcgcatccacagtttacacagttgaatattggccatatggcagcttcctgtgcagcctgtcggagttcatgaaggatgtgtccatcggagtgtcagtgtttacgctgactgcattatccggcgatcggtactttgccatcgtggatcctttgaggaagttccacgctcatggtgagttcaaattcggggtttatggcagcttaagtggccttaaactcctttcttatttgtattgcttttatattttgcaggtggtggtcgtcgggccaccagaatgaccttggccaccgcggtttccatttggctgctggccatactctgcggacttccagcgctaattggaagtaacctgaaggtagctcacccctttattgccaaaatacgtttttatgttccgttccgttcctgcagcatctcggcataaacgaaaagtccatagtcatttgctatccgtatccggaggagtggggcatcaactacgccaagtccatggtcctgttgcacttcctggtctactacgccattcctttggtcgtcatagcagttttctacgtgctcatcgccctccatttgatgtattcggccagtgttcctggtgaaattcagggagctgtgcgtcaggttagtaaaaattcaatttatgtttgacatttaccgaattcataagtaccaccaattgaaatcaatcatttagtccatttttgggccaatggcaaactgcattcgtaaaaaatgtgtgcaaaaactttttccattcagttgggtagcataaaatattcatactaactggactgccgttcggaaattcaaaggaataaattgacgaactttttgttggcttaaaagcacgtgatgttatcaattactttcgtattcattcgttctgtctcaatgaaatttactacatgataatatctatttcaaaagtttaatttattaggtatttctgttttcagttggttacaggttttttcgccttttttgttgcctttttgcaattgactttttgcttcggttattttgttttacagcattcacgaatcatgacaaaaaatcaaaaagaaggataatggcattgtgtacgtagtgaaatgtttaaacaccagaaaatgctgacaaaaagtattttatgcgaacttttaatttctttcaggtcgttccaacttttcttttcctttgtttgtagataaactttgcttaagcctcctttcatcaattgtcaatgacttttcgctttaaaaaagaaaaagttcttcattttattaaaacaactcaaaatgtatggtcctgtaactttaaattgtaaaacagttgtgtttaatattcatattcgtcactcgttgattataagggtatattatattttcaaaactgaatgtaacaagtcaagaaatgcatttctaattttgtagaatataaaacctttttaatttttaattttttacaatcaccgctaggtggagctactgttgactccttagcacttccggtatcagatagttgaggcaatacaataaaaccatttctgttgctattttgtgcactaagccagttagtttgctcactggtttcgatgaatttttttaagaggattatgttagatgtgtagaaaccgcgggcattgctatccttttcccattaccgattaacccatgttgatgtttgtgttgcattttttttttttcaggttcgtgcccgtcgcaaagtggctgttactgtgctggccttcgttgtcatctttggaatttgctttctgccctaccacgtcttcttcctctggttctacttctggtgagtgctctgcgtcctctgattttgatccacctccctggagggatgctaaactgggcatgtggtgtatgtatgctcgtgaatgaatggatggaaagtcaatttgtcaagcggataaaaagggaacctgccggcagcaaaggatatgtcgcacatatcgccgtgcctgctcacaaagggtccttcgtatgagtaatgttgttgccatttgtccgacacttgttcgcctgggatgtcggacaatcaatttctccccgatatctccattatgggtgctttgctcactctgaatcccattgtttgtttgtgttcatttcaatgggtactcggaaagtaagagggcatatgaaatgctacaaacccagctgatattatttgtcaattatatgcataaatacaattaaactgttttcatttctataaaatgctactacacctattcaatttttatatgtatcattcagatacttttactgggtatctgataggctaactaatatccgttttctgaccttgcaggcccaccgcccaggatgattacaatgccttctggcatgtgctgcgcatcgtcgcctactgcatgtcctttgccaacagctgtgcgaatcctgtggccctatacttcgtgagcggcgcctttcgcaagcatttcaataggtatttgttcgtttacatcaatccaccagccgcataacagcgctacagcatgaccaatcggtactcgctagtcgttagtcgactgtcgctagcaaatcaataaacaaactgtagccccgtaactgtaagcgtaagccaactcaacttgtatcactcttttctatacaaaactcttaactttttaataacaaatctataaacatttgagcaaacatgcgtgacttgaaagttcactacgatttcatccacaactttaagcacaacgcattttgtagtttgttgttcatatttttggagctttaaagttgttttcatttaatttattaaaaactttttgcagttattgtcgaattttatagtcagtattttgttattttaaataattttaagtcaatttgagagctctactgatgactagataaaccaaggtggaataattgatggatgaaaaaataaaaacagaaaggcaattcagtgcaatttattaaaaacattatttttatgaaaaccatatggacgttatgagtttttgcccgccatatgttgcaaccacccatttcatttcaccaattttctaacaattttctcaacttgcattaaagtatatatatttgttcattcaatgaccaattgccacacttccccttcgatatgagtttatgctctcaaattgcaatctgcaattttttgatgctttcgcatgcactgggaacatttttgaaataagctagaaatttacttaaatatttatttagctgaagaaatactttgaaaaagctgacaattggatatcagtttaatagagggcttcaaatatttagtattgacattcattaacgcattttaattttattaaattgagtattcagattcagatttatttaaagtatctcttagttacagtttcgtagttattcttataagaatcagaatgttttgtgacacgaaattgattttaaccagacttcgtaccaattttgctcggtgtaaacacataagacctccacaaagcgttccatgtgaaggaattttatgaaatatttttgcttgacccgcgaatccggaaccattgttccgaaaactgcactcttctccgccagatatctgttttgccgcggagcaagtggacggcgcaagaagcgcggccagcacgataccttctgcatgcaccgggacacctcgctgaccagcacggcctccaagcgtttccagtcccgtcactcctgctaccagagcaccatccgcaggtgagtgctgctcctttcctgttttcaacttgccggaacccatcatttatgaccatcacaatggacagctgtcgcctgcaggaaacaacgataaccaccctgccaaatggtgggaatcagaatggagccaacatttcagccgtggaattggcattgcccgtgctccaagcaccaggtcacaatgaagcacacgcaccgccgtcctacggatttttgccgcttaacgagattgtccagcagaccaggtcgagtccggccaagttccaggaatcgctgttgaactgaatcccgaagagaaatcgtgattaattggatttaaacggagtttacaggaattacaggccaccgctagccaatgcatccttagcactctatcgaaatcaaaagtgaatgtatctaaaagctaaagattttacagctacaatttggtatgatttcaaaattaggcacaaaaacagtttccaatttattctttaattttgatgactatacaaagaaattgcttaggtaatatgaaaaatgtattttgtttgcagcttagtacttctgatgcatattattaataaaattcgttgcttacattggtaatatattacacttaaaattgggacactacactaaacatgaattcgaatgtaaaaaccaaaaagttgccatcaaaaaacccttaaaatggctttgtttaaactttagcaaagtaacaaagttgttacctaatgtaaataaacaaatacctaagaattttgatgtatttttctgtgtcacagctatggaaattaatccattaagtaaactaaagtattgcagccgtggcgcggctttaagctaaacatattttaactataaatattatattagacagttaagatggctaaaacttattgtgtgctcttaaatagaccaagagaaactttgtaaatagatttttatgtgccagcatatagagttgaaaataaatgtaaattgtgcgtttaaaaactttgtcttcatctgtctgctggtcgcgaaaatcaccaccaaatgttctaaatattcatcgaaatttatggaaaattaaattacagaggtaactttaaggagcaactttaaaggaaaactttgcccaccgcaacaaccagaagataggccggtcgcgacctgagaaaaggaaaagccaacgggattgggattgggtttgggatcgggaaaactccctgcggttttaaggctctgcgtgggacatttttgtggagattaattggtttggctgcaggcacaaaaaggtgaaatcggagtcacaacttaa

SEQ ID NO: 27125 - DNA, 1233 bp, DROSOPHILA
atgaacagattctacattttatcactggccctggccgatctgctggttattataaccacagtgccgctcgcatccacagtttacacagttgaatattggccatatggcagcttcctgtgcagcctgtcggagttcatgaaggatgtgtccatcggagtgtcagtgtttacgctgactgcattatccggcgatcggtactttgccatcgtggatcctttgaggaagttccacgctcatggtggtggtcgtcgggccaccagaatgaccttggccaccgcggtttccatttggctgctggccatactctgcggacttccagcgctaattggaagtaacctgaagcatctcggcataaacgaaaagtccatagtcatttgctatccgtatccggaggagtggggcatcaactacgccaagtccatggtcctgttgcacttcctggtctactacgccattcctttggtcgtcatagcagttttctacgtgctcatcgccctccatttgatgtattcggccagtgttcctggtgaaattcagggagctgtgcgtcaggttcgtgcccgtcgcaaagtggctgttactgtgctggccttcgttgtcatctttggaatttgctttctgccctaccacgtcttcttcctctggttctacttctggcccaccgcccaggatgattacaatgccttctggcatgtgctgcgcatcgtcgcctactgcatgtcctttgccaacagctgtgcgaatcctgtggccctatacttcgtgagcggcgcctttcgcaagcatttcaataggaattttatgaaatatttttgcttgacccgcgaatccggaaccattgttccgaaaactgcactcttctccgccagatatctgttttgccgcggagcaagtggacggcgcaagaagcgcggccagcacgataccttctgcatgcaccgggacacctcgctgaccagcacggcctccaagcgtttccagtcccgtcactcctgctaccagagcaccatccgcagctgtcgcctgcaggaaacaacgataaccaccctgccaaatggtgggaatcagaatggagccaacatttcagccgtggaattggcattgcccgtgctccaagcaccaggtcacaatgaagcacacgcaccgccgtcctacggatttttgccgcttaacgagattgtccagcagaccaggtcgagtccggccaagttccaggaatcgctgttgaactga

SEQ ID NO: 27126 - protein, 410 aa, DROSOPHILA
MNRFYILSLALADLLVIITTVPLASTVYTVEYWPYGSFLCSLSEFMKDVSIGVSVFTLTALSGDRYFAIVDPLRKFHAHGGGRRATRMTLATAVSIWLLAILCGLPALIGSNLKHLGINEKSIVICYPYPEEWGINYAKSMVLLHFLVYYAIPLVVIAVFYVLIALHLMYSASVPGEIQGAVRQVRARRKVAVTVLAFVVIFGICFLPYHVFFLWFYFWPTAQDDYNAFWHVLRIVAYCMSFANSCANPVALYFVSGAFRKHFNRNFMKYFCLTRESGTIVPKTALFSARYLFCRGASGRRKKRGQHDTFCMHRDTSLTSTASKRFQSRHSCYQSTIRSCRLQETTITTLPNGGNQNGANISAVELALPVLQAPGHNEAHAPPSYGFLPLNEIVQQTRSSPAKFQESLLN

SEQ ID NO: 27127 - DNA, 4567 bp, DROSOPHILA
tgggtgcagtttgtaagcccattcgtgaatttcgcaactcggctgctttgaaatatgctgctgctgcagctgcagctccgaagacacgtcctggaaaagttcctccaaaaatggtcaaattgaggaagcaatttcaggcggacaatgatttgccgatttttctaaaaggcggcagtatggataacatattatacagactcacctgggtgctctgcttcctcggcataggtggcgatgtatggttgtggcttggctatatcattgcctaaaatcaacagagatcatgcaagcaagcccacaaaacacaaatactctgtacacgaatgcaaataccaattgtaacgacacatacattagttaactagtaacgtttctgtacataggtagttcaaatacggaaaatcaattatataataataataatgtgctttacttcaaagtgttcattggagtttttaaattatgccgccaatattttgccattcacatatcatataacacatatgtggtgttatatcgactcacaaagcagctggtcacactgcttgaacaacttgcacttttgtcggcatttcttaactgcatattttctcactttttaaaggtaagtacgcacgaaattacttattgattatcttttccacttaaaacacgaatgcccggtgggtttttgtttgttttgcgattgactaaccacgtagttcttaaacattcacattttccttgggctctgccagttcttcacgttttcgggctccattttagccatagttttgttttctatattcttgtggtaaaacgccgcttaactgccacatctgcagtttagccggcttgctggagataaaattgcattatcaagttttcatgtgttccccgagttatttggcttttcatccaaattaaagtagccttttcacattttccagttgggcgacaagtaatgtaaagtcttcaaatagaatactctcaaaaaattcccagtaatgttttggctaagagggctacagagatcccggcagcaactgaacaggctgtgtcatttccgtagtcgtctaaattacgggaccagtcccagtattcgctcagtccaaccgtcaatctccagaagtttgggattttgtagctccctcgttcgttacaggtatttgccaggtgttatctaaagcccatgtatataatcggtccggttcgccatatgatatctttgcagctgcagcaccaaccttccccaacccgctgagatggccagtaaaaccgcgcacttcgtcctgcctaacacgcagcccattgccgatttggactgcaagagtgccttcgagaatctcaccgagaaggagaagctctacgcccaccacttcagccaggcctcctgggacggcggactcattgccttgatccagtccagtccggaggcgccgctcatcttctccctgctgcaccgcattttcctagccgaaaagattcctgttcttagggcgaaagccctggaggcgggagtgtctgctgatgattttacggtatggcagaggagagtttcatattctcgaaaataaatattaattttgatcactttcaggccttcctagtgtacgcctgcggtgtgttcgccaacgcgggcaactacaagggtatgggcgacagcaagatcgttcccaatctctcagaaaagcaatttgagactatagtaaaggcatccgctgcttacagcgatgagccgcgcgtaggcaagatcttcgagaaggtcaagaatctgatttatgcgctcgagtcgcgtaacgagatcctgggctttgctcccgacggaatcaccacctactggtcggataactgcaccaaggaggactccgagatcgtgaacgcttggctgacctcaaagcgtatcgaaccgtacatgtgccggaccttcaagatagttgaaaatggtcaaaccgtctacgatgtaaagctgggctccgtggcggagtccacgcaggacggcatcacacttccgctggaagagtataatggcaacaagtttagggtgacacgcggtgattaccagaagctgcttcagcgcgtcaaccagcatctgctgcaggcccagaaatacgcagccaatgaaaacgagtccaagatgatcgagcactatgtccgatcctttgaacagggctcgctggacgagcacaagaacggatcgcgttggtggatcaaggacaagggacctgtcatcgagacctacattggtttcattgagacatacagggatcctgctggaggtcgggctgaattcgagggcttcgtggccatggtgaacaaggagagctcggccaaattctccgagctggtgaaccgcgccgagaaactaatagagtacctgccctggacggagccttacgagaaggactcttacctgaagccagacttcacatccctggatgtcctcacatttgccggcagcggagtaccagcgggcatcaatattcccaattacgacgaaatccgccaggatgaaggcttcaagaacgtctcgctgggcaatgtgctggccaacatcaaccgcaaggatcccattcctttcctcaccgaggaggatcaaactctgatgaaagagtacaaggtgaaggcttttgaggtgcaagtgggcctccatgaactcctaggccatggtagtggcaagctattccgcatcgacgaaaatggtgtgtacaactttgacaaggagaacactaagaacctggtcaccggtgaacccatcaccaagtggtatcttcctggagaaacttacgacaccaagttcggagcaattggttcctcgtacgaggaatgccgcgccgaggcggtgggcttgtatctctccctgcagcgtgacatcctggagatctttggcttcaaggacaaagccgagcaggacaacatcatctatgtcaactggctgagtctcatctggaacggcatgggtgtggctctggaaatgttcaacccgaagtccaagctgtggctccaggcgcactctcgcgctcgtttcgtgatcatgaaggtgctgctggaggcaggcgaaggactcgttaaggtcgaggaaaccgaaaagggtaaaaaccttttgctgacggtggatcgcagcaagatcgataccgtgggcaggaaggcgctgggcgatttcctgaccaagctgcaggtgtacaaatccaccgccgacatcgaggcagcttccaagatgtacgaacactactcgaaggtcgacgagagcggatcgcatccgtgggccaagtggcgggatatctgcctggcgcacaagaagccgcgtatgattctcgtccaggccaacacggcgatcggccaggaccaaaaggtccagctgaagacctacgagcccacccacgaggggtacatccagtcatgggtggagcgctaccccaacactgacatcgacgatcttctggagagcatcgtggagaaggacaagaagtatttcccgactgccttcaacaactgagaacatttcgcatttaacattttcgccttcattatcaattcaatttgttaactatgattttgaaaaaaaatatataaaaatatatatagtcatctaatgaccaacaattttaaattttaaattgcttttatagtaaaactttcgtagtgaatggtgattttaagatcgtttttgccattcaccgaaaatattgacaaaggacctgaatttaattgcttgtatgtacatacatatattgcgaccaaatgtatattgctcataatagctccacaattaagaatgtaaatataaaatcaaatactacaatttgttcattgaatgttttcatagtagccagtcgataaatattggtttttttttttttattttgtttctcgtttccatttctgtttgcattgttttgaccaccatggcaaccggtagaaatcgtggtaaccacaaggaaggtggcactatcaacatcggacagccgctattccaggtgcctcattcattgcgcaaggagcacgactttttcagctcacagctgttccgaaaattgcagtacgacctggaggaggtgagccgcagccaggagctttccaaagtgagtcccataacccgcgacttcatcgaggaggcagcgatgacgcaggaaatgcaagatcttaagcgtgcggagtttgtggagaggaaacgtcgccagcaattgcggcgggattgcgaggaactgcgcgacttggcggagcagctgcgcctagccgccatttccagggatatagccgagaatttggaggagaaaaaacgtcgtcgacagctagacatcaaattggaagccgcggaagtgtcccaagagcgctgtctgctggaggtcaggcaacgtgagaaggaagtggctcttaaggaggaacaacgccgccttagggagtccttggctgaacaaatggaggagaaccgccgacggcgcctgcaagagcacgctcaggtgatgaatgaccgggagctgagccttctgatgcagaagcaaatccaggaagaggatcgagcccaggagctggaggcgcagagaaaaaaactacaaaagcgacaggacatgctgcggtccatcaagga

SEQ ID NO: 27128 - DNA, 2439 bp, DROSOPHILA
agggctacagagatcccggcagcaactgaacaggctgtgtcatttccgtagtcgtctaaattacgggaccagtcccagtattcgctcagtccaaccgtcaatctccagaagtttgggattttgtagctccctcgttcgttacagctgcagcaccaaccttccccaacccgctgagatggccagtaaaaccgcgcacttcgtcctgcctaacacgcagcccattgccgatttggactgcaagagtgccttcgagaatctcaccgagaaggagaagctctacgcccaccacttcagccaggcctcctgggacggcggactcattgccttgatccagtccagtccggaggcgccgctcatcttctccctgctgcaccgcattttcctagccgaaaagattcctgttcttagggcgaaagccctggaggcgggagtgtctgctgatgattttacggccttcctagtgtacgcctgcggtgtgttcgccaacgcgggcaactacaagggtatgggcgacagcaagatcgttcccaatctctcagaaaagcaatttgagactatagtaaaggcatccgctgcttacagcgatgagccgcgcgtaggcaagatcttcgagaaggtcaagaatctgatttatgcgctcgagtcgcgtaacgagatcctgggctttgctcccgacggaatcaccacctactggtcggataactgcaccaaggaggactccgagatcgtgaacgcttggctgacctcaaagcgtatcgaaccgtacatgtgccggaccttcaagatagttgaaaatggtcaaaccgtctacgatgtaaagctgggctccgtggcggagtccacgcaggacggcatcacacttccgctggaagagtataatggcaacaagtttagggtgacacgcggtgattaccagaagctgcttcagcgcgtcaaccagcatctgctgcaggcccagaaatacgcagccaatgaaaacgagtccaagatgatcgagcactatgtccgatcctttgaacagggctcgctggacgagcacaagaacggatcgcgttggtggatcaaggacaagggacctgtcatcgagacctacattggtttcattgagacatacagggatcctgctggaggtcgggctgaattcgagggcttcgtggccatggtgaacaaggagagctcggccaaattctccgagctggtgaaccgcgccgagaaactaatagagtacctgccctggacggagccttacgagaaggactcttacctgaagccagacttcacatccctggatgtcctcacatttgccggcagcggagtaccagcgggcatcaatattcccaattacgacgaaatccgccaggatgaaggcttcaagaacgtctcgctgggcaatgtgctggccaacatcaaccgcaaggatcccattcctttcctcaccgaggaggatcaaactctgatgaaagagtacaaggtgaaggcttttgaggtgcaagtgggcctccatgaactcctaggccatggtagtggcaagctattccgcatcgacgaaaatggtgtgtacaactttgacaaggagaacactaagaacctggtcaccggtgaacccatcaccaagtggtatcttcctggagaaacttacgacaccaagttcggagcaattggttcctcgtacgaggaatgccgcgccgaggcggtgggcttgtatctctccctgcagcgtgacatcctggagatctttggcttcaaggacaaagccgagcaggacaacatcatctatgtcaactggctgagtctcatctggaacggcatgggtgtggctctggaaatgttcaacccgaagtccaagctgtggctccaggcgcactctcgcgctcgtttcgtgatcatgaaggtgctgctggaggcaggcgaaggactcgttaaggtcgaggaaaccgaaaagggtaaaaaccttttgctgacggtggatcgcagcaagatcgataccgtgggcaggaaggcgctgggcgatttcctgaccaagctgcaggtgtacaaatccaccgccgacatcgaggcagcttccaagatgtacgaacactactcgaaggtcgacgagagcggatcgcatccgtgggccaagtggcgggatatctgcctggcgcacaagaagccgcgtatgattctcgtccaggccaacacggcgatcggccaggaccaaaaggtccagctgaagacctacgagcccacccacgaggggtacatccagtcatgggtggagcgctaccccaacactgacatcgacgatcttctggagagcatcgtggagaaggacaagaagtatttcccgactgccttcaacaactgagaacatttcgcatttaacattttcgccttcattatcaattcaatttgttaactatgattttgaaaaaaaatatataaaaatatatatagtca

SEQ ID NO: 27129 - protein, 723 aa, DROSOPHILA; identical to SEQ ID NO: 16446

SEQ ID NO: 27130 - DNA, 2503 bp, DROSOPHILA
catcacctatggctataaatacttgaattggaactcccagtttagccacaatatgcttgatcttgaccttaaagtcatctaggttgatttttccacgagcaatgcctccttggttggtgaagagacagattttaaacccatccttgtggagattctttagtttctccggcacttcgggaaatatgatctgccagtcgtcggtgtttttggggaacaccagtcccgattttgtttttataatggtgccgtccatgtcgtagccagctatcttttcagaacctttaacgccgacgctggtaaagataaccagcttaccattgccagatgagtcccacctctcggatttctctgacggtgatagtgttgtggacaacggctcagctttctccttgtcatactccggtggagggttaaagacgacctcgaactgatgcctgccgtaaacgatctccaccaagtctccgtgcttcagctcgcgttccccgttctgcataagcatcagaccattgacgccgcagggattaactcccaggactttaagtgaaactacagccttttttaggtccacttgcagttgaatctgtcgcttcgagcacttggaatctcggatgccggtctcccggctgcgtcccacgaaattctccccagcggtcaggtgtatagaatggtgttccggctcagtgggtttaagggtgcatatcctggcggccacatccttgccagcttttccaacggatcggtttaggtatttagccatagacattttggttaatcaataaataagagcattgcttaatattgacaccaaaattcactagagagcgaatagtgtgacctaatttggcattaaaagaagaagagtggcacacagacatatgtactttgaaatgaaagtggttgtttttacctatttaaattgaaaaataaattactccatataaaaatcggagcctaggctctgtgtgaaacccttccagaaatcttaaatccatcaaagatggcttatagtaatagtgtcacttaaacattattcgatagttaaaggcagacaaaattttgttccgaatactccagaaagtttcaggaaacgtaaatgcaaagaaactgtttctctttgcgcgtaagttaccaccattccatacaaaacattaatttaattcgttctttccgatcagcccttccttcggggagtcggtgatgtgggtgcagtttgtaagcccattcgtgaatttcgcaactcggctgctttgaaatatgctgctgctgcagctgcagctccgaagacacgtcctggaaaagttcctccaaaaatggtcaaattgaggaagcaatttcaggcggacaatgatttgccgatttttctaaaaggcggcagtatggataacatattatacagactcacctgggtgctctgcttcctcggcataggtggcgatgtatggttgtggcttggctatatcattgcctaaaatcaacagagatcatgcaagcaagcccacaaaacacaaatactctgtacacgaatgcaaataccaattgtaacgacacatacattagttaactagtaacgtttctgtacataggtagttcaaatacggaaaatcaattatataataataataatgtgctttacttcaaagtgttcattggagtttttaaattatgccgccaatattttgccattcacatatcatataacacatatgtggtgttatatcgactcacaaagcagctggtcacactgcttgaacaacttgcacttttgtcggcatttcttaactgcatattttctcactttttaaaggtaagtacgcacgaaattacttattgattatcttttccacttaaaacacgaatgcccggtgggtttttgtttgttttgcgattgactaaccacgtagttcttaaacattcacattttccttgggctctgccagttcttcacgttttcgggctccattttagccatagttttgttttctatattcttgtggtaaaacgccgcttaactgccacatctgcagtttagccggcttgctggagataaaattgcattatcaagttttcatgtgttccccgagttatttggcttttcatccaaattaaagtagccttttcacattttccagttgggcgacaagtaatgtaaagtcttcaaatagaatactctcaaaaaattcccagtaatgttttggctaagagggctacagagatcccggcagcaactgaacaggctgtgtcatttccgtagtcgtctaaattacgggaccagtcccagtattcgctcagtccaaccgtcaatctccagaagtttgggattttgtagctccctcgttcgttacaggtatttgccaggtgttatctaaagcccatgtatataatcggtccggttcgccatatgatatctttgcagctgcagcaccaaccttccccaacccgctgagatggccagtaaaaccgcgcacttcgtcctgcctaacacgcagcccattgccgatttgga

SEQ ID NO: 27131 - DNA, 448 bp, DROSOPHILA
gcttatagtaatagtgtcacttaaacattattcgatagttaaaggcagacaaaattttgttccgaatactccagaaagtttcaggaaacgtaaatgcaaagaaactgtttctctttgcgccccttccttcggggagtcggtgatgtgggtgcagtttgtaagcccattcgtgaatttcgcaactcggctgctttgaaatatgctgctgctgcagctgcagctccgaagacacgtcctggaaaagttcctccaaaaatggtcaaattgaggaagcaatttcaggcggacaatgatttgccgatttttctaaaaggcggcagtatggataacatattatacagactcacctgggtgctctgcttcctcggcataggtggcgatgtatggttgtggcttggctatatcattgcctaaaatcaacagagatcatgcaagcaagcccacaaaa

SEQ ID NO: 27132 - protein, 106 aa, DROSOPHILA
MQRNCFSLRPFLRGVGDVGAVCKPIREFRNSAALKYAAAAAAAPKTRPGKVPPKMVKLRKQFQADNDLPIFLKGGSMDNILYRLTWVLCFLGIGGDVWLWLGYIIA

SEQ ID NO: 27133 - DNA, 4794 bp, DROSOPHILA
tcgaagtggtacaaatatgtgcctgaggtacaaaaggcggatcaactgtcacgtgcattcatcactgaagctgtcaccatttgaggtcatgtttggcaccaagatgtacacccgagttgaggatcggttactggaactgctccaagaagaagtggtctgtcaattcaacgaggaccgctatgagatgagacagctggtaaaacgcaacatcgagcaggcgcagaaggactacaagcgcaattacgacaaaaagcgccgagctgaatacaaatacaaagcaggtgatctggttgcaattaaaaggacccaatttgtagctgcccgcaagatggcaagcgggtatttaggtccatacgaagtcacaggggtcaaagccaatggcagatatgacgttaaaaaagcagcaaacgtcgaaggacccaatgtcacatccaccagctgtgacaacatgaagttgtggaagtacatagccgaaaatgcagacctattgtcatccgggtcggatgatgatgatcaggagggccgaatgtaacatggagtaaggctgaaggctggcaacaacccggttggcagcgctgttgagcagcaacatgattgtcggaaatcgaagttatcgacaatcagtcatcgaaggaacgatcgcaaggcagcagtggagtcgagtggaagtcagcgttgcagtcagtcgagttctcagcagcagtcgttcggtcacaaactaagaatactttatataattaccgcatttagaattaaactaataattaaattaataataaacaataataataaacaatcttacatttatatacaatatgcaattatacatgttgaccgatgaaatttaaatttttgcggctagcggttggtagcgataacttgtaatcgactgttagtgtgaccggaccactgttatctgagttctgttcacaagccttcactatatcgatgaatcgtagggagtacaacattttcgtctgacaatcgcagcttcctcttctccgaatcgtttttttttcgtaattgttgagataaagtcgcaagcggaacgcccgaactgtagtgcagacgcacaagtgctcttccaaagacccttaagacaatcttgcagtgatccaacatggttgacctcaccgacgccggctcgccgttccagcaatccattcccgacttcgccttctacgtgccggcaattgttgtttttaccctggcaggtaagttgcggatgatcccctcccctggcccccttcatttattagctaccacctttagacccctcctttccccagtgttatgcatgcaatatctttatagtcgtagcgaaaccgcgactaaatgggtcgaaagactttcaccaagcgagcaacttagtcaagtgcttgctggccgtttgatatgcacagctgttggatgtttggtttttcgttcttatctgttttgatttgagataccctcgattcggattgcctttgcgatcttttgtcttacgtgttccatctggccagtccgtctcattccggttttcttgcgtacgtagtcaaaagtttgtggttctcaagagcgataatggccctctgataaggagtcgacctgccaccgttcaatagactctgtcgtacagtcaaacctccgccgcaaaacgtacctttttgaaatcttcgaatttccagcatctctattttgaacattgctagcgtatttttgcagagatcttcaagcaaaacatattggttccaaaagtaacttaattaaaaaagccatttctaaatgagcgttgtatatgttttataggtagaaagattagaagtgttatcttgatataacatttatattagctgaaacattgaattccaattctagtgcttgatattgcagaaattaataaaagatctataaaatcagttcgcgatgttcgtcttgaacaattcaaactgtagacgtttatatggtggccatcttgtaacattgtagccatctatcgctcgcgaatgggacggcactctttactggggttttgtctttatgtactcgtgtgtccggcactgattagtggctctcccttatcgcatatgcacacatatgctctccgcaatgccaacttcttgcgatcacctttgaaaatatgctgacgaaggcaggaggcaaaacgaaaagcgcagcgaaaagttaactagtgggcatatctgggaataatgaaatacaagcgactgattacacacgagtggcggcttataattatattgattttaatataagttttagagagactcattcagtcctcccaaacagcagaagccggagcacgtaagcaccggcgatctagcgccaaaattagttaatattggaaagtgtgcgatttgggggggattaaatatcgtagtttatgtgatttgtacaatcgttattatctctgcatgccgcgtgtcaaacttgtgttatagataatcaaaatccattttcgaattcgattcgtttgttttgccacgttgtttgtttctgtgattttgtttgcccccccaatagcatgctgaaatgcagaaagtagaaccataaaccgaataccatgatttcctatataccatccattcagacgcgaaccgctaaaagccaaagagcccacagaacccagcccgtaaattaaagccccaaacagagattagatcatggctgaggatccggtgaaccagcaggcattcgctgaggacgtggcagctgccgctgcggctggaggagccggcggttttgccggtcccgagcccggacatcccgactttaagatgcccagtgccgaggagatctggaagctggtcgagggcatggagggaatttcggacgacgagcgagccgagctccgcgagagcatctttaacccgaagccgccgtcgccggaggacttcatgcgccagtacgggcatccgggccacagttcccgggagtacctggtgttcttcgtgatgctggccctcatactcattgtctttggtaagcgtcctccggaacgagccactaacgagtcgtataacccttatcgggcgcgatatacgcacccacctgggtttctgcttaaagggcgataaggttttaggaggcggctatgtcgaagcactcactcactcgctcacgagccacagctagaatgtttgcttcgtttaaaagcgttcgatttttgataagataaccagtggtaagcgtaggatccaccgcagacataggtagagtggaatccaaagagcagtatttgccagagacccatgccgggctgtagttgacacaccacttagccccttttccgaacaacccaaaacatgagttggtcgggttccagtgacgagctcggggttattgagcagctgaaaaagtccgtggagtcgatcgtggccaaaactgggcccagcagcaagttctccaaggatctcgtccagcggatcggcgagatgcagagcaagctggagtccctggccgaaacggatcggcatgtgtttctcgccgagatgaaggacaagttccagcagacgattggcagaatcgaggagcgaatagtgcagcacgcccatttcgcacagacctactccagttccatagtgtcggcagtgatctttctcttggtctccatattcggtctcagttcccttgatcgcataatgtatcaacgtcaccttactaaccgtctcccttctttccgcattacagctctctttggctacaagctgtacaaatccctgacggaaaaggagctcaagaagcaggagaaactgaagagcaagcaacagaagaaggccaagaagtcaaactgaaggagatggaggcgaggatatcattgacgtagtgcactttccggccctgagaccttccatcttgttaatcaatacaatcgccctgtaaatgactaaatcataaaccagtaaacgtaataaaataaaacgtaccccataactcttttaaatgccacggtaattgtgttgttacgacgagtcgaattaattgccattaaaatacggcatcaggaaatgcaaatcggtgtcgtgacctaacttgttgctgccatctaggcaatccgtccaatcctggcctccgttgtcatgggaaacggggtcgttttgtcgaagcttctcctgtcaggccagctattaatagttaaattcagtttccagttacccagttaagcagcaacactcggaaaggatcaacaatttttgcggaaataaaaaacatgtcctattccagccgtaagttaaaagctcaaccatgacttatctattaatctaatgtgtcaacatgcccttctaggatttggtttcgacttccatctgccggatgagggatggtgctacccgaagaacgacatgcatttcatccgcagcgcggaatgggtgcccgtggagaaggcaggcgtgggccgctcattcgccaatcccaatggcgtgatctatccgcgggtggtaggcatgattccacgctacggcggccacgttccgggcaacaaatttcgtgtgggcaacacctatggccgttccaccatcgacgccaagcgtcatctggccctcaatcatgattgaggaccgagttatcggaacactcactcaccattagccaatcaaattcgctgtgttacgcttacagaagcacccgaaataaatcgtatccagtagaagcctgtagaaaatggcaaatagaaataaaatcatacaaattcaaatgtccaagaaaagcacatttaatttatgatggctttttcgagcaataaaattaattaaactttaggtcacaagataagaatatattcgttatggtaca

SEQ ID NO: 27134 - DNA, 318 bp, DROSOPHILA
tccgaatcgtttttttttcgtaattgttgagataaagtcgcaagcggaacgcccgaactgtagtgcagacgcacaagtgctcttccaaagacccttaagacaatcttgcagtgatccaacatggttgacctcaccgacgccggctcgccgttccagcaatccattcccgacttcgccttctacgtgccggcaattgttgtttttaccctggcagctctctttggctacaagctgtacaaatccctgacggaaaaggagctcaagaagcaggagaaactgaagagcaagcaacagaagaaggccaagaagtcaaactga

SEQ ID NO: 27135 - protein, 65 aa, DROSOPHILA
MVDLTDAGSPFQQSIPDFAFYVPAIVVFTLAALFGYKLYKSLTEKELKKQEKLKSKQQKKAKKSN

SEQ ID NO: 27136 - DNA, 44242 bp, DROSOPHILA
atttcccacggtggaaaacgacaacaaacgaacgaatgctgccgcacacgaccgatggcactggcagttgtggacggcgattttggtagcaagctgggcgactgggcgatgaatccgccagcggatggcgttcagttaggatgtgcagttccagcggtgcgaacgtgttccgggcgcgccaattggccaagtagccgaaagcagccaaaagagccaaccaattttagccggaacggcaacagtttctcctcgaagacagcgccaaaatatgccaacgcctgattgagggccaaaatcgcggtcgcgcgtttttgtgtaaataaacagaaaacatcagatcagaagccacattgaaatcaaattcaaagtcgagcggaacaaaaacatcagcgcatcatttatcacagagaaagagatacagatccgcacaatttatttttcggtttcagtggaagagcacaagttattcacaattattttactaaatgccagcgtgcggagtgtctgaccgatgagttggccagcagcgaacgcgtaacgcatacgccatgtgagccggatcgatgggatcgtattccggccgagacacaatgccatcctcctgtaaatagccagcagccttttctactcgcgtctctgtcaaatgtgtgtccgtgtatccgccactgtatatactgtagactctaattgtttaaaccacaataaaaaacgaaaccaaccaaagaataaataaatataacaaaacgctcgtgttttggccaacagaacgcgtagcacacacaagtttcggtgcaaaaacgggtataaataagcgaaataatatgcgaatgctgtaggaatagttaaattattaggattaatcgattggaatttcgcgcgcaataagtactaattgtaaacacgggcagcatgggaccaatcagactctagagctagccacgcatccacaaagttagttggacgaacgccggtcacgatcacgatcactattacgatcacaatggattatagccgactgaatgccaacatcaatacgggcaacatcagcaccgatgactttctggccgtcttctcgaccggaaagccggacaatgccaccctcaatccgcccctgctcagtgtcgatggtcagctgaccctgccgccgggatcgggatatgtcaatgtcaacgatacgatattcttcctgaatggcagcttctacaacagcagcctgcagctggcggcgggattctataatcaaagcagtgcttccggggcgacatcgggcaatttgaccaatccgaatcacacagaagtccactgggatggccggtatcccagtggatatacgcttacgcacatcgtgatcgcctccattattgtgacgatcctgatgattatcatcgtggtgggcaacatgctggtgatcatagccattgccacggagaagtcgttgaagaatatacagaactggttcattgcctcgttggcggtggccgacttctttctgggcctcatcatcatgccattttcgctggccaatgagctaatgggctactggatcttcggcagctggtggtgtgacatccactccgcgatggacgtcctcctctgcaccgcctcgatcatgaacctgtgcctcatctcgttagatcgctactggagcatcaccaaggccgtcgactatctgaagtcgagaacgccggcgcgagccgccgtcatgatcacggcagtctggattatgtccgccctcatctgcataccgccgctcctcggctggaaggtgaagatgccagagggaccgctgcccaagtgcgaggtaagtggcaagtggtgctcctaagtggcgcaataatccacatcccatgcgaaattgacgccaattgacggcaattgacgttgccccaccgacaatcgaacaatgaaaattcagacgggttgtggaattgaaaagcatcgtgtgtgctgcccaattggctattttctggtgtgatgtgtgtggagtatggaagattattaaacttttataaaattctgttattcgaaccataatcaacggtttggcttataaatatctttaaattacttgaatagcaacagcaatttctttttaacctccacagatttatagttgaaacgcacagactttaagcacaattattttttacgaacttgcttgatgtttttataacacggcatatatttggcttcagattttaggtttcaaaatgtttacaagaaaaggcttggtataaaaaagatgttatggcatataatggcattttcattttcttaccagtctaggaacatctgtataaaaataggtcaaatgtatacataaattatttccgtaatgtcttaataatttaccgtggctattttaagcaaaattttctagcccgatttagccactttttgcacgtcaatagatgccatcgctgccgagtacttacatttgcgaacaataaagcggtgaatggctaaaatgctggcaaaagctcggctagcaacatgcaaagcgcaaaattgcggcctctttctatgcaaatttggcgagttgtcggcacgattgtcagatgattcggcgatgccttggctgttggtatccaaaccacattcacatcccctcgattcttgggtcacgcagggaataaacgcagaaatatttatgcatatgagcgctggctacattccgagtgtgtctaattccgccagcttgtggcctccgactgcctaatacagatgcaaacggctctaagccaaccccaaaaagtaggctataatgcataaaaatatgcgcattatcatgcgggttcgccagttgctgaatttgaatttctttggaacacagaccaccatggatagaagcttttcagtgtgcatgtgtgcctgtttgtggggcaaaaacgtaacaaagtagctggaaaattcagaagagaaattccccccatccaaggcaagacaaaacatcagtagttgccgcaagctgcctcgttttttttttgggaaaattccttaaattttgccacaaattgaaaacgtccttcactaggggaatcaatcgatgcagtcactcacacactcggcgaagtcaacgagaaaaacgctcaatcacaacgactgactgactgaatgactgactgaccccttcgactgctgctggctgctattggcacacaattcgcttttggccccccaggaattccagctttaagtggccattttgcgcaatggaaatcagcagtggcaaacaatttaaatcgtttaaaaaactttacacagaaaagctgtgcagtgaataaaagtggccagtggtgagttaaaccacaatattatttattgcaatcatgataaatgcgaagcaaaatggaaaatgcaaataacccagggcattcccctccatatcgtttctatctgtatctcggctgtctccagaattcttgattaatttttatattttccctccacacgcacaccacacacattggacagcaaataaaaagtaaaaaaaaaaaagaggacataataaagtagcagaatataataatagagtggagtggacgaagcgcagaacgaaaatatcctaatatagaggattgcttacgtaaagtttgccattcaaattaaccttgagacaataaagacgctggaaagtgggggcgaaggcacttatttacgatggccagcgtccagtttcgcatattccggcaaatgctggcacattaatcaagcctaagtggcccggataagtttccagctccggcgaatgagcaaacatgtttttagcccaattttaagcagtctaaacagcacaaaatgacaatttataatggccaaacttttgtacttacgaacatgagtttgcctgctctacgacgctttaagcaatcgactaacttctgaatcacctaattccgggcactcatattagcattgtgacaacaaatgccacatcaactgggaaaattcacttcacctatcaaacgactaacacataacttactctgataaaaaagaaagaaatatcttgttttcaatcagatactttctacataaatgtatcttgcagatggtagaattatacgagttagaggtttgcagttatatataatttcggttttacttggatcaaaatcgattaaaatgtttacctgtaactttaatacacgtttcacatcgtatttattttttgtaactcctcgcatagttccggatataaacataatttttctgtgtatttgaacatatacatttgttatttgaaattcagaatcctttacgaatgtcaactacctcctgcatcagcgggtaaaccagttcaaattgatttttcgccgagcaaacgagctctgtccaatcattaagcaagtctctcgcctgtcgacattggccttgtccggggttgccatgtgaaatccccaatttggcgacccaacagccggcgaatgaggaggatgaggatgtggctgggtaggagcaggtggaggagcagggcacgaggaggccgaagtggcatggcctggtgaacattttaattatgacaccatgttgacatgtacaaaattgttgttcgccgccgccgtcgtcgtcatcgtcatcgtcgcacattgaaccgcaatacaagccgctggggaggtggacaaaaaagtggtggggttgttgggcggttttcgtgtgtggtggtggcgctgatttgacacttgcctgctcgatttaattaataaaatggcattttagagcgcgttgacgctgatttcgggccactcgagtttgtctcggcaacgaactatttttggatctttttgttttctccaaacctccaaggaggaggattaggaggaatatatttgggcaggcgcctttaattgacatcatctggcagcggcgatgaaagtttgcgctccctgattaatgccgcacctaatgaggtatatcccaatatggatgcgtgtgggtggattcgttatttttggacgcataatttgatggcccgcggcgtggcccaaaaatcaactggcattgttcgccgcccacgtaatggctgcaatttcacacagccaactcaagaatctggaggtccaacaaatctacaaataaacatacaaaagaccgcttattgaatgaagtggggccgttggttcttgagaaagattctgattccaaggaactacattattcactgctcgtcccatggagccggccattgtgtcctttgtgcagctcagtgctcagtggcaaagggtcgcacaatggaccttattataatccgtaaagggccaaacactttattgaaatattaatcgaatattatataccattttacggaacatgcacaaaagccagccatcacacaatggcgcaacaaatggccaggatcaaaagtgcggctcaatcggcttttggccccagttttctcagtcacatgcttgtgggccatagtgaaagttttgagtagttaagacaaaaacgtagaacttgatgtgggtattattagtgtactcaaattacggggccaacagtgcgtgtgtgtaatgtgatgtgtaatgcgatgatatgcggcagcgcaataacgacttaagtcattgcctaagtagctcattagcgtcagtttcttttttgtttttttgtgccaagcttaggcactttaaaggaaattaagagagtggcgacgagggcatggcaaaaaccccatttttcctaataatggctgctgctttctccaacaacctcaatgtcgtggccggcggcagtcgggctgcaagggctttaagttgacattgagcctggacaagtccacgtccacgtccacgtccacgtccaagagcaccactattttcagtccaccagaggcagagtgtgtgcgtgagcctgggcacttttgatattttctcattattccatgtacatgtgcatgctgaggctgtaattctcgttaggtctttgttacatttcatacacttgacttgcttggctcggctcgaagacggtttgttgtttctgtacttacatttgccttcccagacgcgcatgtgtgcgagtgtagccctttatgttggctaaagtattttacattttttccattcattttttttttttttctctttcgggcagcattttcatgcaaaagcaaagaaatgccaggactcgctacgaaaaaaaaaggttcaacagcagtgagctaatgggcttagtccttgagatactttccctgggcgggttcgggcatgcttgtgtatcttgccctgcacttggggaaaatatcaagtattttgctagtttgcaaagttgtacacattatggattgcacatattttcatggtaaacaatttcatggcttttctgctgttgcttttacttttcccgcatgagatttcagtgaaagcgatttgcctaactgttgaatgattaatgtatgcctgttgtttaaatttaagactgattgccaattgcataacagactagttgttttactattgagttcatatataatgcataactagtaatcgaatttacagctcaaaacaggcatttatttcaaaagaaattcatgaattgttcggctttttggcctgtttatgtaattgtggcactgttttttttttctctcactgcactatgtagcttagtgtatttactatgtgccccgcaccacgtttccacgtcgttggaaaagttcacttttctcggccattagggtttgaaatggcttttaagatcataatcagtggcatttatttttcgagcggctgccaggagtttttgggaacggagacagcaacatttacgcattgaactgcgttattacatccttgatttgtttataacaggaaattattaaagaaaatatatacgggtccagcagttgggggaaagaaatcggaacagaatcaaacagcaagcatacgccccgtttacattcccttatttttggctgctcagatcgtttgctaatttccgctcgtcgcgcactcatcgcagctgacattacattacacagatacagatagaatgttgtttgtggagcgccaaacaactggcggcaatgcgaaaaaaatgaaatgaaacacacagaggacatcgtgtgcctttgaatgcccgacacaccacaaggcatatgccttggcattttatgcgtagcatagtcaaatattgacattttagcttatggcgcacgcaccactaactggcgcccaccgttttttttttttttttctcccaactccgagcttcaactcccatcgttggttaaattaaattactgagcaattctttccggctgcttttgggtcgctctgcaatagtatgtgtgactcgttattgtgagtgcctcacgtataccatttgtggtctacacatacatacgaagaaatgcacttattctttacatattaactactaagtggtccgtttcagcattcatttcttataatatttatgaatgagcacttttccggctgtacatttaaaatactgaatgagtaatcatccaatagtaagaagttttccctaaatatatgctgaacttttaatcataaatgtgtttcccttacttgaatacatgtaaatatgttttaaattataattttataacaattttaatttaagtttttctctgtgtacagtgcttacttctcaacacagatttcatctccatccgctcaactgctatgtgcagtgcagccgctcattggcatttgtcatgcccgggcagaaacttaaagtcggcacaagttgaacttcacttggagcaggacccgtatccggatatgtatgccacatgcctgctcctccagctcctccagctccaggggcttatccccctcatcccttatcatggctgtcgcgtgtttcgccaatggcttctttctgtactcctccccttctttttttctgaaggggagcgagtgtgcctggcagctgggggaaattttcgtgctgctggctccgtcggtttgattaaaataaagccaagtttctaagctcggattagtgtccgaattattattattttttcattcttctctctgttattttttcggtggccaacgcgttctcagtcaattgtttggcttcgtggcttagtcagctggcgtttatttatttatttattttgtgcgctccatagacgtcgcttaaagtcgtttcgtttgttctttgaacaatttgcattgcttactttcggaggcagtctgaaaagttttttattgcattccataaaatgcaggaatgggtcctggagcaaaatcagggaccgaattcccacatttgttgctgtgccccttatcgcatcaagtactttgccccacaaaagtttgtctcagatacccgacacatcgtacatttacattacatatatgcctgcaactctgtgtgagctgatgtcatctcatatgaaatataattccttcgaaaaagttttgtgtcattatttttgtttcggatgctaggctcgtaccgaaagtgtctgagaaattcgcacgagtattaactttcgcttgccaacaggcaagaagatcataaacatgcttaaaccagtggccaccgaatgccagctgaagcagattttgtatttatgagcttgccacaagaatcttggccctatctgctgccaaagtaaattatactcgccaaaataaattgaacaaaacaggccgcaaaagttgggaaattgaagatgggcgaaaaacagacggagataaaagcaaaactcttttacaattgacttgcgttccgctgatgctaattgaattaaaatccattggaaagttgttgtctgcacgctctttggccttaaggaacaaacgggaaacccaattggatgggaaagacattgcacggagaaaaaaatgtggtgtagtaccagaaatatttataataaaataggtattcaaagcggattccaatctatatattatactatgtatattaataaatttttccaattttattttctattttctaattttcttctattgtaaaagtttattttgctgaccgtctgaaagggtcaaagttaatttattgccgaatcaattgcgaacattctgtcaaagttttgttttttttttttgggcaaactgctttgcaatcgtaaagtcaaatggcgcctaattggcaaaacaagcggaaaatcgcaaattaaaacagaatctcaccaagtccgagtcaaagttggaaataaatttgtcttggccgctctgctgagggactgtgcaacacaaataaaacaaattgcgcatacgccccgcagccgctttagttctgccctgtgattttcactgccgactggcgcgctctttattaaaggaaatcaaataaaatgaaatgaaatatttaccaggccctctgcgctgctcccattcaatttgagcaaaaggcaaatgcctgtcgccttggattccgttggccaaatgccagcatgttggccataattaaagagtaagccggctgcacttaattttacacgcatgacccaacaccaaatgccattcgatacgatcgtataattctttggcaaaaaaaaaaaaaaaataagtaagggcaagagaccgataccgataccgaaccgaaaaaatcgcttgacatttatgacaacatttgcccacatgaacgccataaattagcttcacgcaaaaactttgcgccatccgctgtcataacaatatcaaaacttaaatattgacaatgccattcacatcgacatcgaatcgcattgccgtgcaccgctctgtttagccgtgctcggctttatggcaacgcataatttaaccatatttttgcagagaaaaccctttcacacacgccatgggcacggcagagactttcactttggttttccgttttcggtttcagcagctttggcatcggctttgccttgctggctttctggcttttatgtgcaaattgcgagcagtaaataaaaataaatgagtatgaaaattttttacccctatcagcagtatttttttatttgctcgccgagagttcaagaccatgtgtgtaggtcgctggtcctctcctctctccattctggcacctcctccataataatcgtaatgaatggcttatcacgccagctggcgttgtcacccatcgtcatcgcagccatatagccatcgtctggcgcctttgttggttcgatatatccatctctctttgtacatgtgtgttggttgggcgggaatcgcgggaaatggttaataaacgaaagagttgtgcagttgaaggagcaggaatcccggcggcaactcctcgcacgattcgacaataaaattaaatttagcaattcaatttaatgcgttatttgtcgtaaatttttaccgtgccgagcatattgatttactttcacttaaacgaacgaacgttgaaagctggaactggaaaacaaccagactgagataattgccagttgagtcagcacacatggcagcagcgagcagttggccatatgaagatttatggccgcgccgaaatcaaacaccaatttcgcctttcattaaacttcagttttgagtgcttgctttaagattttttcgcaactttatctgccttagccaggagttggaacgcagtccttggtccttggcactttgtcgcataaacataaacacttagaaattcagcgggaaaaacgagtggggccattcagcaaccggcgtaaaaacaaacaacaatgtgtccacaatggtgcagaattattttttggcttgttttcttttcactcgcaggcggcataatccattttgaataaaattccgaacgaacagacacggcaaaggagccaaactggtttcgagaacgacggatacacggagaaaaatagttaaatagttcggtttataatcagcaataaaagtatgcagcatttccataacgctcttcataaaatggatttaatgacaaatgtgctacctaacaatagagacagaaacagtttgtaaatttactttaaatgtctgcaggatttggggatgtttttcaataatatccagctaaattattgagtccagactatgctattatttattctccccagtgtattaaaagcaggagttcggccccatcctttgttgtggcggtcggcgtttgccttttttttggcgtttgtcgccggcgatggcaacacgcttaaaacatgagcacggaaaacatttacataaaatcgtcttaaagtatttgcgcgcctcatcgtcctcgtcgttgaatcctgaaagagaggagaggagaaggaggaagagcgaaaggactcggatgcgcccgtaggccaaataaattacacaaaatgtcgtcgggccccatttctgtgggccattttgtgctattaaatacgataaagtgggtcggagagaaaaaaaaaaaattaaaaaaataaaacgaaaactgggataaatgggaggcaaaggcccaaaagaaattatagaaattgcatttatttggcaaaagcatgaataagtttttaatttgcattgcgctcttaattcagtgtaccataatctggcactaaatgcaaatataattaccccaagcggcgagataaactttcgtttgtgcgaattgaattaaatttgccaactgaaattgcattgcgtaaatgaatttgtagtttaatttgccgcctttgcgacggggtaactttgaaatcaacttttgcactcgccgcacatgtcgtttggggagccattcggccaccagagaaatcaaaaaagttcaaaattaaatgagacagaagcgagggcaaaggaggagggcagcctcccaaggccacaggaggtggcaggttcttgttgccacacagactcactggctcacgattcccaccctggtgcaactttggctccgagtatcattgactcaatgggggccagattcaatttagcatatatgagtttaatttcgacattcataaatccaaaccaacaaagcccccgtatgattcatgtagtctccctgtcctgcctaattatgcaaaagtttgccccgcttccagctcttactttttattgccacggctctacttctcttgggtcaattttaattacgctcattttgaaccttttaatgtaaatgaaaaacaaagtggaaaagcgttgggaaagtgcggaacaaaacaaaagtaagggcaaacggaatggaatcgaggaaatttaaaaataaaacaaaaaaaaataataataataataacaaaaaaccgtaaagcagggtgtgtaaaatttgacagcggcaacgaagtgaaaattgcctcagcataattcagagaaagcccgcatctagcagtcgcagtttccttttctctcgaattttgtacataattaaaaaaaaaaatatgcacattgacatttgaggacaggccatgtcataaatattaatttttcccccctttttttttcttttggctcttaaataattccgtttgcttgtttatctgcatgctggttaagcctttgacttggttacatcataagcttcaatggaaaccctttccgcatgtgccatgcatatttacctttgactctcggaaatccatctaattttgcatgccaaaaggaaatattacctcatcctcgtccactcacatccacagcatacttgatcctctggctgctcctgctcctaagcccgcgtgtataatcgtcaatcatcataattccgggcactttgccgcacacgttacgcatacgcccccatgtcgatagctcatttttacaaatgaagcgcattttacagttcgccataaaagcaagagcctttgccgttgccattgccattcctttgtctttcattaacacgccagcacgacgatgaagacgaatgacactcggatatttctttggagctagtaaaacagaaaggaatgggaaaatttcaaggcagacacgaaaagaagctggttcatgcattcatttgcgcttcgtctgcggcgccagggttttattgagttattgttgccatcgttggcactaagcccgacctcagttttctcaccatcatacacagggcggaaatggagcactcattgtgaggctttgatcatttcccccttttgcccagccaagatgaaaactgcattggcaagagtggccgaaaagcagaggaaactctcctttgagaccgcgataaattccaataccacatacacatcctttttcaactgtcacatcccccattcagtctcttctgttctattctattttgcgatgttcccgtctgctggcatttttatttcatttggctttatgaaattagtaaatgccaggccgttgttgctgctaccaagaatttcatgccatcaaggagcagcaacaagaatagaatgcggaaaaatccaactcaagcgtggttgttgttgtgggaataaacgttaaaatatgatttgatattatggccgggacggcagccatgtagcttggccatttgttatgcttgttatgaattcgagagttccaggatatcacaaagcacgatccggagatggagtgcttcgcatcaatggcattttgattgcaaatattaagtcattcgacatcggcaatgttgagtaaatgtcctgacccgaggcaacaagcggacgggataactttaacttaactttaacattaaaaaaaggatacgctaaagattgatagactttagatacttataaataagattttcggaagaatctatacaccatcggttctgataaaagttttaaaaagttcttacataatccaaacgcaataaagttgaggaatacatcagacctttaactatctcgccgtaaatcgaaatcatacttcaaggtacaaacttaagaaatatttcgctgctgaaacgaaagtgtgactttcgcacaccacgggaaatcccttaatttccttcttcttttcgcaactcttttgactgtgattctgaccgcattgccaacttatgttctgcgtcagtcgcagtttccgatcataaacttaccgcacacactcgcacaacgaacgtataggcacataaataagacgctggagacggaggagtccaagagtccggaggagaagaagaagcaaagccaaccaaaccgtggtgtgcccaaaccaatcccatttgcagcaccttcaacctatgcttcgcacttgtcttccgaggcacaaggaacaactcacagcacacatatcatttgtctgtctgactgcctccgcctgtgtgtgtccttgtgtatttttttttttttttgtctcccattgtagttgtcgttgtacttgtatttgtatttgttgattgtagtttgttgccgccttcgttgtcgtgtttgtggttacactttgcgtgctgtgtgtgtctgtgtctgtgcactttgcgcaccgctaacccgcttttccccgttaaccagtaacccgaaacccacacggcgtatacgtattttttgtcccagccctttgcatgcggtcgacccccggcctgtgtgtgagtatgagttcgtgtgggtgtgagagtgcggataactgcgcatatgtgtgcgttggcctattgtgctaataggcaacactatcgtattttaacagcttttatttacctacacgtatgcgcactcgctcaccagaaagaaaaataacttttacttgttcttacggcggcagtgcacttaaataaaaaatacatttattgtacttcttaaatgtgtataaaataatgtggttaataattaattcagtcacattttatgctcgttatattggaaaaatatctaatggatgtggaaagtttgataaggaaaccatattcaaatataaaaactttttaatgcatcttttataggctctccttgtcgagaaagtggtattccctgcaatatttaaccgaagtgaaattgcctttaagcgctggcagtttactttatgaattaaaagggacccgtctgccactcagtgagtcagtcagtcattcaatcgcccacttatccacatgtcatccgtggagaggggggacttccacttggcgccccgtccgccggtattccgtcctccgccagctcgtctgtgatccggtcccaacatgattggcattttcaagcgccagcccagaccgtaggtaaccatcccgccagccctcgtttccgtgtcgggatgtatggtcctttgttaacacatttccctcattcttcgatacttgtgttttttttctccatttttttttcttggcgcactgataaaaatggtgaaatgacaggttttataattggcgataaaatgccattaacaagggacattgtaagtcctgtccagtctgtccagaatggcacggcaactggttacgtgcttgctcggccacctgagcaaccagttttgagtggcatactcacacatacatactaacacaatcgagtgggaaagaatataatggaatccacatcagctgcagctgatgctcggacttctttaagcctttctttaaaacatccacgcccaagattttgagggaagggggccaccaaataaagtgatgagtaataaattgcctttttgggccgttaagcatgtgaagtcaataaaatttttaatggctccatagcactcgacttgcgtttaataactcaaaaaaaaagtggaaagagccgggatagctgccgaaatggaagttgtgctcacagttaagggggtaattcaactaggaggcagcgccccggtttccggttgatactttcacatccaatggacagggaactcggcggaagtagcaagtaacagcacatcctgcgttgggcgccagtaaactgtaataaacactaaaacgtaaaatgctggtgcacagactcaacttgctcctacccgcctgctcttccttcggtgttcccagtgccatttgactgacaaatgtggccaaggaaatggcaaggaaattaaaacaaatataaaatgctagctagctaggcaagagcagcaacacccacagaataacaacaacagcggaaaacacacttagaaaatagcaatgccctccatggcattttattgtgatacttttattatggtcaagataaacaaaacaaaatcaaacaaaatgctaattatttcaacatcaatatcaattgccaaagttattagtaaatttaatcgtattaggatttattctcagtgctcttaggactgtggacaaacttgcccggccaaatgaaaataaatatggggctaacttttctgctaacaggcaggacgaaggcgttggcggcatgtgggcggggcaggcggttctttttctgttgcgctagtcatttgccataaaagtcaacaactttccctggcgcaacgctgataaaggccagtccatgactaccgactgaattacgcgtaatcgttgcgagtgcttaaaaattaaattaaaattttatttactccagtgccgcgccgccgaggggattcgtgtcgaatacgggatttcagttgggaagttgggtgatggtggccatggggtgtcccaccttaaccttatcgccggcgcacgaacaccatccatgccatcaagggggtcataatgtaccgctgggtgataagaaatcgatttgtcaccgggacgtgagactcaattggcgcttaaacagaagccaaaaccgcgaggacataaatcaggcattcgcacacatgcacacgagttgaatgtctctgcgcatcgaggacgtctaagtttattacagttattccagcgagttgttttaaatcaaatccccaacaaaatactctcagcttttgtggcaaatgtgcgcagctcagatttggctcgaaggacagctggcgatgcggataatagactatcagataccccgtacttactgctaaatattgatgacttcttgttgtattgcatatgttgaaacacctttaatatatgtatatttctttacacttttctctaacaactgcgttattattacttatttatcttcgtgcatccacaatatcaagaaattaatacacccctgaaacgcagaagtgttggtaccaaaagaattgaaagaaatttcggagaaatggcattgtcaagcctaactatgagcccctggctctaatgattattagcttgcaggtgtgcgcggtgtctgtgtttagcgctgagttatccccgatttacaagtaaatcctcgagtgaaatataatttgcatgtgtttttgtttctttttttttttttagcaaaaattcagctgagtcgattgagcgatgacaagagcaactgcacgattttggccgacggggtagagatggcaagtaaatgccagcgcgcttcgcttgatgttaccggtttacatatttcgcgagtaaatcccctttgccagacagccaaagtaaaggaaaagcgccaggatgaatgcttggcgtagtcgtttctggatttcctctagctttctctgcccgtctttcgtttatggcacagcgcacttttccgattttcacgattcccccatttggtctcagcggcaatgttttcgcctgagttgcacgtcgaatattttcagcgattgcctcaaaagccgcagagtaaacaagcgcgttcacattaactttcacttactttttcggcagaatggttgtgtgtgtgtgcctttcccttttgctcgcactcacacagtcactcacaatttaaacgcttcatttcactttatttcgactgcgatttcaatttaaattccatggtttttcattttcccttttggctgatgcttgaacatcttttactttggcatgctctgctgtggctttccagatttcccactcccacgctcatgaaaatgagtggatctcggtgattttaatttttaatttcgcatttaccagcaatccattgattagcacaagtttccaaccagtggcctttgctttaatcaaaaatgcagcgaaaagtcgaaaaagatacgcgaaaaccgccaattaaaatcgtcttaagcgatgattttcagatgtatgtatggaagagactatgcaggatgtgattaccattctgtcgagtgtattccgtggctgccggaatgttttaattaacttttgtttgcctaaaagtttcattcgaaacattttcctcgcaggtccctggcattcttgcagccacattggaaatcagttccggttgcagggcaagattcccgctgaatctgagcgaagtccatggagcagagcagcatgccgaaattttcagctgcggttgacaagcgaaagtcccgattgcatcgcttgccaagccgcacgcattaaaatagattgctgtttactttcaatttagttggccgccatctcaatctcaatcctttgcgtttcgcggcgaagtcccttggcaaatatttgccttttattaacattttccatggcacttcgcggatagttctcgttttcgttatcgttcacgttggctctggtaccatatacctgtcacctcccatcgcgtccagttggcaatattaactgacatatttcaccggcatacccgtcaaataactaaagctgtcactgccgccccggggctgtatgaaattcccaaattcccagaattgcaccgcacaaaaaaaaaaaagtagtgcataaaaagaactagccggagcaaaacgcattgtttcgctttggttatagctggagaatgtcaaccggcgacaatgactccactttatactccgctgcccaactatgcagggcaaacttttgccctctcggctggaatttttttattcggaatttatttcattagcttaatgcccagagtggaattcctgagctttgggcaaagttctgtcatagttaatgagcagcagggagccttaccttaccttaccctttccccatcaacgtcatcatcattactttctgacatctttcccgatgcggataagtgtcaagctttcggatcctgaccaggtgaaaagttcgctcagttggtcttgtccaacgcactaacattttactttcctgtaggccccccaacttgggccttcaacatagtcgagccatcaaatttattacgatgtggaaatacgcacagttggcacagtggcaacgaagagtttaggccgttgagctaggctttacactggccataattttcttaccaaaattgggaaatttacttggcatcatatgttaccaatacatgctataataaacaaagaatttaaaacgaaaatggaaccatatattaaatctatataattgtccaaaagtattcaaaatcattactgtactttattttatgacggatcaggcattaaaacaaagtttttaaccactcgtaagattcgagttcctcaagaccagaatttaagctttctgttggtaaacttcagctgtttactaaatttggccattttcctaatgactttaagaaagtttttattaaatttagcaatattttccatagtgctgtacttgctgtcgactttcagaggccattatcacggcgaggcgagagaaagacagcgccgtaaagagaagcgtccagagtgcgaccataaatggcttttggtctggttggaggcaagcaaagtgacaggaacaagctgctccagctcgactcctgcttcaggttctgctatttctactcctagtactactactattgctcctgaatttggtcctgtgcaatggaggactggagacagcagccacaacacagataaacaaggctttctcctgctgttgccgctgtcataaccgcatatatcgctcataaacgccgtcataaaagtgaaacagacaaacacccaatacaaatatgtgataaaaaaaaggccgtcgcgatacaaaacaaacaactataacgttgctcgtccctagttttgtggctaagtaaaaacattgattacttgcaaaatataaaggacagcaacacttccctattatagtgtgtgactttttgttttattggtttgctcaggacaagctcatttcaaaatgcattttctccattttttgattttattactacagaaggatcgtatacgttatacacacaaaacttgctcgttgcatacggttcgtatgcgcaatttcagtgccaggttctggcctaattcttcacgcttccgctaattaaacgcctggaaagctgagcagattattgcatttgctctcctccctgtttgtcaatctctcgttccatctgtgtgtgttgataaacgtttagcgtcattaaaaaggcaacaacaaggacaacgggattcacatcaatgccggccaactgccggggccaaatggagagatggatgcagaagcggacgagatgccggcagcgattctcggcccgtttacttccagcgccattgccatcgccatcgcctacctatcacatcaccccagattcgcccgcttttcaagcccgcaacggatgaaaagagtctagcttagccggcagcaactttggcagctgcaagttgccattctctctcatctcacacagatacgcaggatgcacgctttttgtccttgttgccggccattgttatcactgactcgctgctgaagagccaacaacggaaaaagaaactaggctatgtcgtcgtcaggtcctgttcaaattaaactgaaaatcttgtccgcccgccagacaacgccgacttgtctggaagcgatgtccctgccaccaaaccactccataataaaaaaaaccaacccacgcactcggcttgccattcccctagttgtcaaacattgttatgagttaaagtggcagcactttttctagcacaattccaaacccatttcaccccttcacttgaagtaataattgtcgccgagatttgtaaggatattctgccctaaaatttaatacatatatatataattatagaataattatctacatactagaataaagcggcaaaataagactggatggtttaaaaggggtgacattaagctcagctggctcattaagcttcatgccagcgtttttctctttagatcagcgtatgttgtaattaaacttaccgaattcagctttgaccaaacttggaacgttctttcccaaaaggatagatagccggaaaggaaaggagaatgtacgataaaatactcttaaacaatggcccaaaacaaaacaccgaaatgaggtggggtagataggaaaatctccagggcaaatcgatagctcttttacttttagccacgactgtggcactgatgggttaagcttgcgcctaatggccgccgaagttgacacagtcagctcttaataatggaatcaggcaaaaagaaatccaatagcagtagcaacacaggaaaaacaggccaacagcaggagcactggtaggaaaacttttgtgttgatttattaaattaattgctacctcatgggctcagcgatggaaaagcagaccgagtgggagcatgtgagttaacttttatttgtctttaatttaatttatacgaaaaacggtgaaacttttttcctgacagccataggggctgcgtaagatgtgactgaatggtgagtatgagctagacaggaaaaataaaaacggaagaagaaaacttcataaaaaaaagttgctcttctttctccataaacgatttttggtttatttcgtgtgatatacggagaaatgaagattgcggagatgatttattcacagaatgcacggcatgccgtaaaaggtggaaggtggaaggccagggcctggggcatggggcatgagaatggaaaccgaaatgaattgggcccctacgtgttgctgttccacgcaatttccggacaaatatcccaagaccccccatcctattgctccttatttcccgctctccctgatagctcacactttatcactcagccaagaacatcggtttgcatcgcatcacatttcgcagacattttgcacttgatttaatgtcacccccaggagaaagcctcaccctcagaaaagtagaacttcccttagtgcttcaaccagccagcttccttttgaacccgcttcgatttgttgcgttgccaattttccagcagctaatggcgttacaatatgccattgttattctaggtgtttctcgtggcctacactgaaaatcgaagtgctgtttggattttattgagaaggtccttaaatgtgcataataagaagaagtctgtaaatctttttagcattgtttagtatgcgacgatattttatttgtctataagttgatgtataactcatgatcgaaattttaaggcactaactttttgttgccatttaagtttgctgaagatttctatacaactaccttattttgggacatattttttcgtatccttttattgtagtgtactttcgaactccccttctgcaaaggggacgagaaaaatgactccgcaaaacctcacggtgcgaagtgctcatttatttcgaaaagggggaagccccggtcgaacctcttaaggggaagttaactgctgctgcccctggtgttgctgttgctactgtagttgttgctgttgttgttgctgctgctgctgctgctacttccgttggaatatgttgcacgttaagcgttctccttacaatttattgctgggcgtctgtgtggctgactgtcaacccataaaaacttcgactctcaaaccggcgtggaaaagtggtgcggggcggttcctgccgcttcttgccgggtgaagttcggggtctatgggtgtggccgtttattgcatttacagttacttaattctttagcttgaacttgccacacaaacaacaattattgctcacctcagaacagcagaagagaactgagctccattgctcgttccccatccttcgttttgcggctggcgtgacacttggccaaaagaggctgggctggttggctggcaggtggtaaaaacattatgatcgttcaaaacttttgcagcggttttaaatggtgctcgcaaattacagctcagcattttggattttttgtttctttttgggcgggggtgttggtaaaatggggctttgttgcttttattgctgctgttacgcgcattgattgtattttgagtgacgggcaccgcaaaaaagcttttaagtcattaatttcattttgagagccagccagccaacctcaaaggattttgaagtgaacattttcgctgatgatgcctgcagcgtatatgtgtgctggttggttgcgtttgggtttctaaggggtttctacggattttatccccgcccgaaccgtatttcctgtataaatgccacacattacagcagcgaaataaagttgctctgggtgcgtgaaaatgtctggcgaatataaattcactaataacagagatttatgcacatattccgccagacaaaacaggcgaacttgaaaatgtaaaacaatcacagaaacgcacacacacacacacacacaaaaaaggaaaacattgaaaactggcaaatgtttttggtccagagataagagcgactataaatatttgagagcttgccttcgtatgtgaataatcggaaaacacaatctgcatccaaatgaatcaaataaattagtttggccaattttgaggccaaaatcaagtgtcggcaacgggacgtatgcgcaataatctaaccgacagggaaaactgttgctgttgtggcatctttttggcaaagacctaggcttaaccaagctaaaacttttccgcctgccgctgtttgattaaaataatttccacttaacctcatgctatacccatcgtctttttcggctttatccgtgagcatcagagccgaaggacacaaaaaggcaatgtaattaagagggcacgcgcacacgcaaaactatccgggaaattagtatgaagaacttaatgcatacgccagaagccaaagtggaagtcgaactcaaagccaaccaaataaaaggtatctaagcacacaaaacgcccaacatcactgacttttggcataaacggctggcattgattgttcctgctcgtgtgttagtgagtgtctgctggtgtgtgtgtgtgtgtgtgcgcgtgaaaaatatgccaaagagctcctttggccactcctgcaagtgtgttagtgtgctgtgctcatcctttcaagttcacttggaaaaatacgttctaaaagtatataataatacctgaatatataagtctgcattaatgccttttaaaagctaatatgtaaagcatacattttacgggaatattgttaagtaactctatgaaatgatgttgaatagatgaatatgatcgtttaaaggaattccagttgtagggcaattcagaagttttatgccaagtgtaaggatactcttcaaatgaagtggcccagtgtctgtatgttctgacagtaagatttacaatgtggccaccgaggcacgcatgtgtgcgacagagtgggcatgagggcggaatgaaagagacgagatcgcagggaaaaagtcgggttataaatgtctaggtggcgccatttggctgtgagctaagctaactcgaaatgggtttggggctgccaaatggaatcgttggaatggcggaagagaggggggcatgaaaggatcccggggcaaagggcgaaagggatgtggaacaagggttcgcaaattgtattgtttttgtgtaaattagttcactttgtgcgtgtctgtgtgtgtccgcttcagctgcaactagaacaaacagcagctagcaggacgacgacgtgtttggaccttttaatttgcatgttttatgttcacttcatgagatttgagttggggctgagtcggtcctgcggtttgggtgttagcataaaatattcaaccggccacgaccacatgtgtgtacgctccaatgtgtgagtgtgtttttgtgtgtgtgtgtgggggggggggggcacggcataaactttagctgtgatcataatttatagctggcccatgtttgtgccagccacaccacacacactgtcgaaaaaggaagctaaccataccataccatttcatacacagccgagtttcaatttgactttcgtctaagcaaaatcccaaccacaacctcaattctgctaatacttttccagccgttgttatttatttacgtagcttggtgaaaccactttaatcaaaccaggccgctcatctggcctggaaattaagttctctgcaccctagtaacaggtttggtccacttccgtgtaagccatttagttataagccggcaacacgaacgcgtttaatgacgagcttcggtcagtcagatggccagtcagtcgattttatttatggacacattttatggcacttttagcgggccaatggcgttaacgatgcagaagcatgcaaaggatttaagcaaagccactatgtgtttagttacatgctcatggcgttcgcctactaaactcatcgtgcagttttgcttttatttcagcaaagacattcgttttactaaatctatagtatatataaaagtatgcagatcaaatgtatgtatgaatgtttttgttggatacattaaaatcactaaaaaagttttttaaaattcaagagttgtaagcattattgaatcacttaatgatacacatgtttaatacgcaaacttctagcatgcttaagtatattaatgtcaaacttcagattcattccatatgttcgaaagatatttctccaaatcattattccctccacattggcggcaagcagattagaaatgctgcgtgactggatcgaaacccagtgccgaaatgagtgcgaaaaggcaattacaaaatcgcccacagatatttgactttgcagcggggcaaacatgtcaataaatcgggcatcgggacacaaaagctccggcaggatatagagataaattccatttgtagttatatattataactggattgtgtacgtgctgccgcaaaagaagaaatatgcgtttttcggctgtggcaggacacgaccatccaagcacatgttaaactctttacacagacataaacagcgagcggggatacgtgcgtggaattcagtttcgctgccagtaattgaagccacaaatgcggacaaagaatgcgacccaaaattgatgaaatcacaaagaaggatgtatgtcgatggggcactggcattgcatcatctcgtgccactacagaggcggagaccgaacattgtttaagggattcaatatgctattttgtccacaaaaatatatactttatataacattgattccaacaaatatgaatatgaatacttagtaaaactttatgagcagtataatataatactatttgaaaagtccatgatttggtacttcttttacgtttattaattattaattaatttcaataagggtggaattccaaccccttctgcaactatgccactgcactcacataccgcagtcgagcatatcaaattgtatgtggcctttgctttcgtccgtgtttgccatttgtttggtggggcgaaaagcgagtggaaaaggggaatgcggcgagcaatcaaatggaaaatgcagcaacaatccgcaatctgttgacatgttgcgcgagtgcagctgaagtgttgtcgagctggagctagagtcgaatctgataccgtgtctgaaccccaagccggagatatgtcgcatttggagcagcaaaagtatggtaaaaatgtatatatatatatatgtatgtataaagaagagccagtgaacgaaactcgaacagcagaagatatgacaccgaagctcggcgtcaacggaaattgctgttagtgtgcattgggctgccaaggactcacctagcaggacacttcatttctacactaagccaaaaaaatatgtcattgaacccacagctgcagatgaaatttaagttttatactactaaaagttgtagtactgtaaatagttaaatagcattcaaatagtatcattgtatcatcaatgaaaatcccaagaattgcttatatatccactttttcctctcagtgcctttctcagtgaggtcgagtgagttggctggctggacacttgcgattcccaccataaatctggaaatgaaataagtgtgtgccttggtatatttgacatttggtcactcaccagcgcaatgacagtgaacgagtgtctgtctcggcttttccgttgccagtttgtttttgtttgttctgcttgtttgcctgcgtggtcagcagaagcacccacgtacgcacttgtgtacagaaggatatctatcgcagccagccgaaacccatccaccaccgccatccatctgtctagattcgacgaatgtgtaagacgacaagccaaaatgggaataaatgagatattaccaatttgtattgaatgccccaaatgacataatagagtggcttacatgagactacctccttctcctcctcctcgtttgtggagcgttaggcaaacacaattaggaagctagccaagcaaatactcgcccggcatttgccgtggcaaaggcgttgccaaatgctaaagcaattatcaagcatacgccgtgtggcaatgaagtagaggcaccagcaaagcaaaataataaaaaatatataccaccacctaggaaaagaccaaaaaaaatcagagcgaatgggaagcaacacccagcggatcaggggacacataaacgagaaaaatatgtcaaaacaacgtttcccatttcccccccaaaatggacaaagcatgtgcaccctgccagccagctaggtccttgatggcatgaattaaatggactacaaaacaacaaaagcaaaaaacaaaaggatctgacggcacaaaaaacacaaaaaatggaaaggaaaggaacgaaagcattgcggaacatcgtaaaacaacgggcggctagcagtcgggcgaaaaaatttgtacacaaattgtaagggaataaaatttaagtatgcgcatattgattttatgatcagacataactacgcataggactagggtacatgacatttctgaaaactgcaaagcaatcacgaacgtggaccaacatggaataaaagcgagcaatcgccgccgaaacatttgccatgattttcatctgtagtgtgtgtcagtaaatatggttttgtgctttcatatttttccgcctaatgcaaaattgattggacccgaagaaatgtgtaccataaatatttatactcacgcttcattgcatcgctgaagtggcgagccagtggccttggacttctttagttacggaaaactggcagttaataaaggggcgagctgccacagcggaacttataatctcgtttgctcaattcttgcattatacgcttcatgaaaaatttttaaatccgctaaaccttcggctcagcctgctggcaaagttcgtggataaagggcaaataaacgagcaacaatgtatggaatacttctgagacagacagacctaggaaactgaaacagggcaggcccaataaaaagagcaccaaatagctggccccaaaaagtaggcagcgtttctactgtaagcgaaaccgaaatcgagacgagcatcaaggacgagccacaaggaaacgatgctagccaatatactcgtacaaaggcagcagcggctgtcccaaatgtacgccacaaaatattgtttacaaatctcttcagcgacgcccacaaatttgtatgcggggcattgttatccctgttgttcgtttgtcatgcgggtcagaggttgaagatttcaatatttactctggcctctgccctctcgccacccgcctgctgttggctggcaaaaagtttctgccgagcccatctccgttctctattcgacttggcccacaaggcaaagatggcttacagtttcttcatctcttgattaaattacatggatgcgactggcagccagagggcgtcgctcttcctattctgctgacatgcgagcacaattaatgaaaactttcctgctgaccaaccctccgccggccgacacacataaatcgccagccgagtggggacaagtcaggggcacacaactgccataaagtagactgaagcggcgtactctaaaaatattacgaaacacttagagaaaaacataattagatgcaattggaatgcataagctttattttatggaaggatttttacatatgattctacgatttttaaatgcagtaaaaaccaatttctgcttgatttgtgctgtttaagatatatttaaatatatgctttatttctttcatccaacaagtaattatatctaatgtatatgcttgaatatcaagtatacgcctagtgcacaatatgttcactttggtatccaagtaaccggctgagaatcctttgtttttttttttttttttttgagtgcaaccccagcggcgaaagatgacgcctgagctcatctccacggcacttgtgtcctgctcctcggggacgcctccatgctcaaggagtctcgtgctccgttttcgcttcgcgcacgagtgtgtgttaacagagcaataattatgtcacattctgggtaaatcgataccgagatccgcagcctcgcagcctggcagcctggcagcatcgcagctgacgcacattttcacagtaacttgaactttaactcgactttaaatgcggcgccaagcggcgcaagggaaaaaaatgcgaacttttcgctcaactggggcgaacggcggcagcaacgaccgccattattgtcctttaaatgacatttgccatgactgcagcggacgtcgacagatgccgaagctgcccttttgcccatcgctcgtcccgcacccggaaagaagggaaatggcgaaataaaacggagcaaaagctctgcggaaaagtgtcaaataagaaactaaatcgcatgtcgtctgttgtctgccggacccttttgtgcgccgtcggtcaaagcgtttcgaatttaaagctttccccgtaatcctggcggggattgcccatcgaaggaggaggaggtggtggtggaggaggaggaggaggaaccgctgcggctggtgggtaaatcgctgtcggagtcgtctgatgattccatcgcggtcgaagtggcaggagcagcaagggcggcataatggagcagctttgtgcctcggggcagcatttaattacgctcgtgttgcttgtaatgaggcaaattgctttttgctgtcaattaaagtaaagttttcgcattcggccgcctgagcccgcccacatctagagccaatcaaattcgttaaggttcccatatacccactctagccgaggctattgcgataatgccggttgtaaaatgtgctctacaacaccgcctctaatttcacgcatacccattctttttcagcgaagctctcttcttcctcatcttcttcttttttcccgccggcacacatccgtttccgcccgcagcagtttctccttccgcaatcgcgttctagtttccagtgcaaaaactgacagcaaatgcgtgtcgtggcactaggaaaaactataacttgtatgcttaaatacaataatcgaacttttgaaactgccaccttgttagagaaagattaatggtgattggagtttattgtgtttgtataaataaaaacaaacaaattgatatgaattttttcaatcattgcataagagaatatacataaaagataaacattccgtgagggtaatacttttattatttaattaaaatccaataataatatctacttaggttgtgaattattgcaaagataaaataatagctcttgcaagaagtacagtattaaataaccactagtacttttagtaaatttaattgtcagaagttgtcagcattttcgcgcagtgttcaagtcgccgtgtgagcgtgggtttgtcgtgtgcatcgtctcagaacacgtttgtaaacatcttaaatgtgcttttaatgggcagcttccccggcaaaaggcaggaacagtcagacaggcagtcgtgcagatgctgccactcactacacttgttttggtcctgccacccagtgtggccaagccatccaggatcaccacgaaacccgccccttgacgcctgcgacagaggcacagtgtctgccattactttaccgccattgccgtattttaataacgctaattagtgctctaattagttgaagccttagttcgtcttgggcgggtgtgtgtgtgtgcgcgcttgtttaacgattttaaaacacgcagagagcgttgtgcaatcgcttaatattaagtgcactgaatatgcaattgccaacgagcaggcattgctctcgtgccaaggagcggcgtttaaaaattataaaaaaaatttaaattaaattatggatggaatttcacataacaaaacgtatgcccttcctgtctgacttccacgccaactctccacaattttccattgttttcattcgacaatggttgttgcgtgcatcaagcgcattccgctacaatgcaaaatggttggctgccacggcgaacggaccgcgaaataaagttgcaattaattagccattaatgaaattgcactcacgcacacactcacatgcgtggcgtgtgtgtgtgtggtgcttgggtgccgtaatgaaaacgaatgctgccaatactgatactatttgtggccgtaaacttctgaccgacgaatacaatcattttcattgagttctggtcgaagaggatttaaaggatagcaatccttccacttaatcaaattgatattccggcaattgccagtgaaacggaaactttttaattatgcttgattgacttgagcatgcaaggcaaatcaatatcaatattgtctaaggtcgccgcaaggcttcatttcaattttaatttcaggtgtatattgcgtatacgcaccgttagctgctctccgaagtttgtgaacgacagcggtcagtaaaataggaatagctctgtatagcactatatattttaaaacagatatgttaatgtgaatcaatttatatcaagtgaacttcatatagtaggcatgctaatcttaatcattacaatattaacattattatgtatattcttgcagttacatctatttggtaaatttttctttgctttactttattatcttaacctatgccgtatattaaaatgcaatattgcatattgcaagcaatacgcacatgcgtattttttagtactttaaaccataaattacagccgtcggcagagaaagcaaacaagcattgcaatggaaattgcgtgatatgtggaaagctgttttgcttgttgagcgcccgggcgttcctgtagttgtacttgtcgtgttgttatcgttgctgtccctgctattggactgcggtcgagtcaccgcaccaccacccaccacccacaaccaagaacctatatggaccccctgcaacccctggccagctgctccttcctcatgtgttcgaccgcatggccaaagccccaatggcaacttgtccatggctgcaacagcggttgttcatttgtccggcttttgccaacgacgagtgtcatggtgtttgtaccactcagcaaccaaccaaccaacccacccaccatcccatccacctcctttcgtgtcctccattggtttgtttgtgtgtcaataaccattaagcgttaaaatttgtgaaacattgttgttgctgtgggtttgctgctcctgctgcatgctgcctgcaaaaccaacaagatttgtacgcccggcacagcacagtaattatttttggcccaagcaaagctggccagttggaaatttggccagcacaattcggcataaacacgttttagcctgatttcgattttagctacattacgagtgcagaccactggccagtcgcttccgcacgaatatatatcatttaaaatttccaattggcttgccacttgcaaaaacaaacattggcacattaggtttccattcaaagtgcactcagaattgagttatggcaaaactaaaacgccatctgtatttcatttgccgtataataaagtcaattttcaacaattgcttaatttaaaattaaatatttatatatttaaagtattcaatatttaaggacccaagagaataataatatggatcattaaaatttttagaaatcatacattttttacgcgtatttatttcatttaaaatttctaaaatgtcaaagcttaactttttcagtgtctatggctctggccggttaactgcccatttaggcccgaaacacggctcagtggcagcttccatggctcccaatgcgaaaagactcgtatttaatttactgttaaaattaacgacgccgttggccgctctcggggtcgcacttgtgtacaagtttgcggagccccaaacaagcatttggcaacaatttgttacaactggcaactgcagatgattaacaatgcatgcgacattgtggttaaaggcataatattagcatacatttaggcccacacacacacacacacacacacacacacacacgcacttgtgtacaattcaatggaagggacaaccgaaagccatatgaaaattaattttctgctattttccgtaacataccctgggcttattgtgctatttatgtgcctgccattatggcaagacaaaagcccgtattaattacacaactcatttgtttttcgtgagcaccgaaacacaccaatgacacaaaatcaataggcagtccggaacagctcgcttatcgccactaaccttccgaccaattgggaatagagtcatcaagggggtgggccgggttggctctttcgatttggccacacaatgagcccgcaaccggtaatcaaataaaacgcaagtcaaatcgtgttgcataattatagtaatttagcgccaaacatcaatcacaatttgcgtttgcctacaaaaaacaaaaaggcaaatccattaaacgggtatcggtgaattataaataccctttggtaaagaagttttcaaatgtctttcgctttttcaaaagcgttaaaaactaaatgatactttaaaattaaactcaaaatattaagctgttcgagtttattatgtaaaaaggattcttgtttttaatttatatttgctagcatggaagcgaattaacatttttttatttttatttgatcgaaatcgaacacatgttttataatgttcgattgaggcattccttttataagagtacgcgaagtggaaagctagtctgaattgaccgcagctgaaaatgcggaaacaaattgccgtggactaggtcaggcaccttcaggaaaacacgcctccccccgattttccgcccacactctgcgtgtcaacaagcaatttccgccgccgacgattccataaaggcagcaacaaatccttagtccttctgcattttacaactactacagcagcaacagttgccgagctcttttgttgctattttattttaacgataatattaagctggcggctgctaacggataggccaggctggcaatcagcataaagtggttgccgttaaaaatatcaggccgcataataaaaacgccgtttcgcagcggatacgaaggagaggaaaatcctggagggggcggaggggttatggtaaatgttgtgccacacgcagcgatacagccagcggacgaaatcaaataataaaaccataaaactcgccacaacaattaaaaagcctgcagcataattccggaaatgtgtttttctaccattgcgaacgtcgaacattttgttggcctttttttttagtggcgccccagcaaatgcatttgcatggcttagtgaatgactagcggttctgaaaaattgcaatttaatgaagcgtgccgtctgccgcaattaagcggcaataacaaatcggcacgacccaaggcttaaaaaacaccctcgagtcgaagagtttttgctgcggaattaatttattgtatcgcaatggaaaaaaaaaagcaggcccccaataagaaaatcgaatacataacgcggacaatcagattaacaaagcaatactttactagcactataaagtatgttctttaaattaagttcagttacgcccataagttactgtatcttagtttttatatgaccatgatctataagacataaaatgtatatgtcccacagcatagctttttatgatcctataagtaagataggtatcctatcagtatatttataattcttttttacgagtgtaattagtgctctggcatttccccacactcttcattagtaacatttttaattgtcaaaaaattggctctggctggacattgtcgcggcgtaaatgaggcgatagctggccaactggacggatttgcggcattagctctcgtttgagtggcactccagcctgcgaacgaaaggagccacttgatttacgtttatggcaagtgcgggcaagcgttaagttgtgaaaatgtggaaatgcgaaaaggcagtcgcaaatgaagtcagctggcaatgacgacagcctgggaaagcaaaatgaatgctctaatagaaaataaggaatggcaatgggcaaatgccaatgcgaagtgcagtcaattgaaatgcaagcttcggccagaggatgtggaacttcctgacgaggagcagtttgaagtcaatgcgaagaccctcgtctcgtctcgaaaaaaaaaaaaaaagaaaaactgcagccaggcaaattggctatgcaaactctgtgcaaaatggctgcttcagcgagcagcgacaaacaagagggcaaatcgagctggaattgggctgaggaagtgggggccgaattggcacgagatccccccttcaactattgacaacattgtcaaaggggcggcaacgagggccaagcagcgaacatttcttttggtcaaattgaaaactgagctcggtagtcgtcgccgccgcctgtagttgcactttagatttattgattgtctcagtgcgttgcgttgcagtgtccttggcgagtccgaatgtgtcctgcagtccttcgcagtcctggcttattgctgttgaaaaacttgcacaagcaccgacaacaatgctgatgatgacagcagccactaccaactctttccacattttctgctgtcccaccattctactactcgtcctcggacgaaacgcgcttttttttcatttgcagagcaaatatacacatatattttaaatcgcattaaaaggatttcgccgagtaatcctagaatgcaataattaaataattaggattttaaattgtaattttattttttttcaaaaataaatgaactgttttttagatgaatgaatgaaatgaaacgaacataaattaaaactattttcaagagcagtttgagccagcgcattgacattccgaagaatcatagtttatcgcatttatttctgtttttccgagtgttgtcgctacacacacacacacacacacactttgtttttcgtacttttgtgagcttgactcaacttttgttctgcgtccttctttttccctgctcaaactttctgcagtgcaatgcggattgaaattcttttgtgtttacagcggaatttcctctttattttctttcattacatattatttgcgattgctgctggcagctattggtggccacaagcccacgaggcgtatgatttacctttaaagcatcgctcatacgccacgttgaacgcagtacacgagcgcgaccgaagcagaggaatttaatatttttaattacgctcatttcagcctgcttttccatgtttacatttcaataaatttccactcggtctaccgtcaaccctttcatcatttttcaccatccattttgctgtgagctgttttttttttatttcatccttttttccaaggcacttgtcatcatcaacacttttagctgttgcttttgctcaagctcctgcccgcctaacgaatttggtggcgcataatgagtttttgtttccgtcagcttaagttcgccaatgcagaggatgaagcggtggcaacaacaattgccattgccatttaattaaaaattgcagaataattatttttccttttcgcctcgttccctgttttccttactctgtctctgctttcgcacgctacttcttcggggagcgcgtgggaaaacttttaaataaacaaaggcgccctgtgcaatttgaaaatctgcaaattagcacaaatgcagcttgtgggcggattgaggcggcattgagagatagaaagtctgcaggaggagcaggaagctccaaaggtgcatggcaatgggaaatgggttaaggggaaaaggaaagtggtaaatggtaaatgggaaaaggaaaggaaaaaggctaaagggaaatgcagcaacaaagtgaagttttcaattacattaaatccgctgcataaagttatcgtcacgcacagttgacaatttatttgttagcccactagtttccagctcggccaacacgttcttggcccgcacaaatgtcagtttaagagctttgttccaatgcgttaataaaatattcttccgcacattctacccgccgctcgactcgacatcattatcgcagtgtgcaaaactttgggcccactattttgctacaggtgtttcccgagtgacgtaaacacacgtttggcatatgcgcaacttttcggcctaccaacaaaagtttttcggccaactttggctttaatgccaacgaaacgaaactcattcctttggcccactaaaattcacgatggaggtgagagacggttccgcgtgaagcgctgacaaatgctgtcaatatatcagccttaaaccgtaaatgatgagaccataagagtagcttgaacacagttgtttcgatgcaactgcagcatacagtgcaaagaaacatttatccttcgagtttggatctaaagatttgccaaataaaagcaccctcatctattgttccttttagtgtattccttaatattagattatttaagaaactctggtacaaactgtacatgatatgatacaaattgagaaattcgcacccagtttctcgcagtgcagttagcgtgctgcctgtgcggcaagcaataagttgaaaaccgagacagcccggctggcagcagcagcgtcagcattcaagaatccagcttaagtagctgttggtggctctactcatctgctcggatcctctgttggcgttctcctgctcgtctctacgtgccacttgatgtatatttcggcaacattatacccggcgcttaatactttatgcttattttgttgccacaaccccggttttagtaggtggcgcgttggtcggatgggtagaggctatgatatttatattccgctttggcagcaggataaagttgtctagctcagcctgtttcgggtgcaacttcgccttgcggcttatgataaactgggctgcacttaagctgcctctgcataacaggccagctatccagccagatatttggctatatgctgtgtatttacagctggctcctcttcccggcaattcaatttgcctgcctgcatgtgagcgtaagcagcttaaaaccttaaataaatttcgtttgtagccacccggcttctttctccagatgtacacactctggatatcaagtacgtaaagaattttttataaattgctagtcgatttcttaaccggctactgcaattccaccagggggaagcagcttaacttgaccagctgatgtcgggcacagatattcgcagcacaaggatgcatgcactgtgagaaatggaaacagcaagccagcaaaatcaacagattatgttggtgcattgtagagcaagggattcgctttaaagtgtctcctttcccagcctttggcattttctcggcgtgtagaattatgcattttccaggagcgttgaatgcggattgaggtgagctacaagcagtggcagtaacaacgggacaaaagcttttcattatgcacgccactcgccggcgaacaacacgaacagcgactcaaaagggcaaagctgctggggcaattcgttcgttctccactcaacccctttctccggccccactaccccccccccccttgctgtcaagtgcactttttcgaatgcctttcatcaaaacacttaatttgcataatttttgtgaagagagttggacgggcagtaagtttgagacgatttaattccggcagctttaaagaacaaaaaaaaaaaaaaaatggaaaatgcttttccaagcacgagaaaatgtgccgcgaaacgtttttcgccgccaggttgaggaatctcctttgtgcggtgcgggaatctaatacttttacttcatttaacgttataaaatttcttgctctttgcatatttcacataaatgccttaggaaaatggaacccggggctcagaattgccgacggaagcagccacagacaaaaacattttcggccagacataaaaggcggaatgcatttttcagtaaatcagactaatgcacttaatgaaaccccgctatcaagcctgaaaatatggccaaaagcaacaagccaggctaaagcgatagtaaatatcaaagaaaaggcgattcaaagtcagaggatgttgggtcgtaaatttaatctggcagacgatagttgaggtaacttggtaaagttaatgctccttaagctccaacaaaggctacaagtcaagttcagggcattcaatgggaaaatgaaactagttgatggctaaaagggctaaaattaattaagaccacaaagaacgaaaaatagtgcagagttcctttggctgtcgataaaagcaaatttagctgcagaagccaattgaataaaatgcatttcaggtttggcatgataaagacattgggaaatcttaaccaaattgccatttaaatcttaaataaatcacttttattttttattattgtatattgcattttacaagaaatcaaaaatttatttaatatttaattgctcatagctatatttatttatcattttgcaagtaaattgcattttacgaaaaatcaaaaatcgtattgaatttttaatgacagtaatgtttagttacttttctgtaaactttcgacactacactggacttaacctttggcagtcattttctaaatccatttggcccatagcccgataatgtctaaccttcgtcctttttcgatttgttgcagctaagcgaggacattggctacgtgctgtactcggcactgggctccttctacatacccagttgcatcatggtctttgtgtacatacgaatttactttgccgccaaggcgcgggcgaggagaggcattaaaaagcatccccgcaaaacgaacaacgaacaggtgagtggttggggctattatttatgaatttgacccatcaaaatgggcacttatttacacacacctaatgcctaatggactccacacctcggggcgtcgcaaaatctcacttttgagccattattgcggttggccgcaaaatgtgtcaggcatggaaatgggatttttacgattcaatggacaaatgtaagtcttctagacgactgcggcatatgcggcgtttgtgtaatattcacacacacacacacacctttccgcttaccccaaaaagtaattgtgcattactccaggatgctgcaaattgagcacacatgcctcgcttcaatttcccatcaacaacttgtggtaactacgtgtaggatttacccccacttccccttgcccaaagccatcgtgaattgcaacttgccaacgctgcaattttggccgctgcagcagttgcagttggccacgttaaggcaaacggccattatgcaggcccattcaatccaatggcatttgctgacgccacacccgctcttaacggcctttgttggaaaataatcgctgaaaatttaatcgaaactccgccccaaaatcaactgattgagtgaaaagtctctaatgatcgtcaattaggtagcgcaacgactgccaatgcagtgcaatttgcattttcaattaactatatgagcaatatacactgacagaaagagaagggtgtgtgctggttatacattcacgactggacagtgccggcaacatcagcgacacgtctcgaccattttgtgcaaacaaatgctagagtccaagcgagcggcccaaacgagcgattaacaaacaggaaaggggttgcattttccgtggcgatgaggggtggagggggtgggatgggtggaaaaacaagcagagacagcggcagcagaggaaaaaccgaaatcaggaagaacagagggagatgaccgcacatatgctgacaacgcgatttgccttgagcattgtttctgcacccattttacacagggtacttactacatgggaactaaagttaagattacaaaggaaaacatttaataaggtctattttaaatgtgcatcagagctactagttcattagtgcatatttgaatattagaatactacctaaaatacatttttaatgctattatgttatacattctgttgtttgatctttaattttacaaactacattataaataactatattatactttttatgataattacttttaactaaacaattcattattctgcttaaaattcaagggtattcccactctcgatcttcgaattcttctattttattttcattttcgttggggcgccccgtgtctgtgttaattgccccgggtaattgttgctgcctctcgagcattgaatatgcacttccccggcagtgccccctccattttggccacgatccggcatccacatccctatcccgcatccccatctccaaccaaaagcaacagccccatctccatgtttgtgtaatccgcgcgctcggacgcgtttccctgccgcctgttggcttaaacaggattttcgaaatggaaaacttctgtagcaagtgtttggccatctgtccctgttctcgactcgcctgccgctgcacttgtgcggatctgcaacctaatttgcaatgcccgagcatgtgagacagttaatcacacagaatcactttgaaaactatgaaccgtgccagcaacaacaggtctggccaactaaaaatattttgccagcactttatgatctctaaatcaatatcagtgtgggaggaccggaagcaatagaacagatattcttaagtcttaagttcttaagtagcttgtacagctctttaaatttgtaaaataatataacttataatattagttaattggaaaatgatacaatcagtacataattagctgaaaccattttaggatgtttatgttaatcaagacagtttaggatctttgtaatatctaagagtattttattactaaagattttccataaaatctatgtgcccaaagtattctattgcacctcgtgaccttttaccgcattaatgttgctttttcattttcaggtaacgagcttcaccaccgccaagaaaggaacaataccgatgccctcctcgagcggcgtgtccgctttgcagctgcaccagcagcgccaaatagccaccatcgagacaccaccgaacagcgccagcctaccgatgcagatacccacggtgaccatggacctggcctccgacatatccacctcggaggcgggggaactggaggcggtggccgcccaaacggtgcttgcctatgcaaatcccaatggtgcgggcacgaattcggtcaccgtggtgagcagcgggaacgggggccctggggcgtcgggtgttccacccagctcgccgaaggagacgcttcaggtgagcacgatagccaccggtcgggtgggtctcaatgtgcccgtgccaccgtccatgggcagcaatagttccatcaatgtgctgaacaacaacaacggtacccgtggcgatggatggaggtgccaccgccgccggcgggggaaatggtagtgctgtagcgacgcctggtggactgcagcaaacgggcggtaatgagctgcgcgtctctccgatcgccggacggtgtcgagccctatccgtgggcgtggacacggacatggtgagtgaattcgatccatccagcagcgattcgggcgtggtcagtcgctgtgccgtggtcaagccgctcaagtttcgcctttgccagccgatcttcgggcgcaagtcgagtaaccagcagcggcgcaacgaggccaaagcggcggccaagaatcaacagtccagtggagtggccagcaaaaatcagcagcagcagcagcagcaacagcagcagcaggtagtaaagtcggaactggagccggccataccgaagacaccgaagcccagggatccggagaaggagaagcgacgaattgcgcgaaagaaggagaagcgggccaccctaattctgggcctgatcatgggcagcttcatcgcctgctggctgcccttcttcttcctgtacatcctggtgccggcatgtagcagccattgcaacataccggaatcggcgttcgccgtcgccttctggctgggctacatgaattcggcgctcaatccggccatctataccatcttcaacaaggacttccgacgcgccttccggcgcatcctgttcaagtgatgtttggcctatgtgtgctgttacaggtgcgtttacgccagcatcgagaaggcaaccgaacgtgccatgggcagcacaccaatgggctatggtcatggcatgtatcagcactacaggcgttagatttgcttcgttttggcagtgccataggtctctacaaaaaacatatcctattccaattccccatcccagaactgcaaagctattgatatatttatatatatgcacatatcccatattatccattggattatttcatataatgcctcaagttcaatacagttcaaatggttttctttaaaggtttttagcaacataatttttctacaagttccaaaagataaaatattttaaaataagcttcttgtttcagctatcgataatatcgactaaccgaataatccatagttttgcagctctatccactcccataatttttttctttgaataaaaaaaaagtaacgaacattgtagctcatttcaaaagcaatgaacggctgtgaatttgatggaatctctcaatttcaatttacgcattttggtttcatttcgtttcatttcgtttggattctcgagcacccttgaacccagagaccccaatcccggaggccccataacccccatggcccacagaactcccagaccaaccgaacgaacttaccgcaacccacacacttttcacactcgacgagctcatagaaatgcatgagctgagcaaacaagaatttgagctgggcaaacatctattatgctccctgaatggatgtgtccgccagcgacgtctatggccattcaacttaaaataatttcgcacaatttccatttgcggctgcattgccaatgacaaatatcagtgcagactgcaaatgtttcgaaagtcggactcaggtagtcccagatccacattgttccatgctggctttcaaaatgcaggtcaacaagtgtgaacgctgaagtcgagcgatggcaacaaattaatttaatttatttttaatatttt

SEQ ID NO: 27137 - DNA, 1038 bp, DROSOPHILA
atggattatagccgactgaatgccaacatcaatacgggcaacatcagcaccgatgactttctggccgtcttctcgaccggaaagccggacaatgccaccctcaatccgcccctgctcagtgtcgatggtcagctgaccctgccgccgggatcgggatatgtcaatgtcaacgatacgatattcttcctgaatggcagcttctacaacagcagcctgcagctggcggcgggattctataatcaaagcagtgcttccggggcgacatcgggcaatttgaccaatccgaatcacacagaagtccactgggatggccggtatcccagtggatatacgcttacgcacatcgtgatcgcctccattattgtgacgatcctgatgattatcatcgtggtgggcaacatgctggtgatcatagccattgccacggagaagtcgttgaagaatatacagaactggttcattgcctcgttggcggtggccgacttctttctgggcctcatcatcatgccattttcgctggccaatgagctaatgggctactggatcttcggcagctggtggtgtgacatccactccgcgatggacgtcctcctctgcaccgcctcgatcatgaacctgtgcctcatctcgttagatcgctactggagcatcaccaaggccgtcgactatctgaagtcgagaacgccggcgcgagccgccgtcatgatcacggcagtctggattatgtccgccctcatctgcataccgccgctcctcggctggaaggtgaagatgccagagggaccgctgcccaagtgcgaggagaagcgggccaccctaattctgggcctgatcatgggcagcttcatcgcctgctggctgcccttcttcttcctgtacatcctggtgccggcatgtagcagccattgcaacataccggaatcggcgttcgccgtcgccttctggctgggctacatgaattcggcgctcaatccggccatctataccatcttcaacaaggacttccgacgcgccttccggcgcatcctgttcaagtga

SEQ ID NO: 27138 - protein, 345 aa, DROSOPHILA
MDYSRLNANINTGNISTDDFLAVFSTGKPDNATLNPPLLSVDGQLTLPPGSGYVNVNDTIFFLNGSFYNSSLQLAAGFYNQSSASGATSGNLTNPNHTEVHWDGRYPSGYTLTHIVIASIIVTILMIIIVVGNMLVIIAIATEKSLKNIQNWFIASLAVADFFLGLIIMPFSLANELMGYWIFGSWWCDIHSAMDVLLCTASIMNLCLISLDRYWSITKAVDYLKSRTPARAAVMITAVWIMSALICIPPLLGWKVKMPEGPLPKCEEKRATLILGLIMGSFIACWLPFFFLYILVPACSSHCNIPESAFAVAFWLGYMNSALNPAIYTIFNKDFRRAFRRILFK

SEQ ID NO: 27139 - DNA, 22085 bp, DROSOPHILA
catatattcggatatgtacttgttgaaagggcgtcgggagcacctttggcgattgccagtcgacctggcctcggtgtgaaaaatgaaacataaattaaatctgctacaccgaattcagcgcagagtgtcgggcttaggatacttaagcggcggccgcacctcctctttcactttatgatttcagccaaatgaaaatttatgaagcagatggcacaagctgatgccaaagccaaagccgaggctaaaaagaaagccagtcggttgcggcgaaaaatatgaacttcaaattcggtggtcttcaagttttgtgtgtgtggcaaatgaaaattatgactcattaaataatgaagtggtggccataaattacactttacattgcagtagccgccgtgtttacctaatgtctaaatcttataaatcatatatatatatatgcatatatcagacaagcggagttaatcatgactgcagtttgcggagaaaaactctcgaatagccgtgtgccgccttgtattccattaataccacttaaaactagtaattagttggctaaaacgacgcaggcactacagctttcaaacacgactatgagttatgagctccctttatccagctaatttagataagactctgtacgcggtctgggaaaaatacttccgattaagtactctaggtcgaggcaacttcccacccgccgagcaaggccgttgggtctatcatcatcatcatcatcatcatcatcaccaccactgacgaactgacgttagcttattatatgattttactgtctggcaaacatttgtgtctagcccgattccgtttaactcgatacaccgaccagtacaacaagagcacgttctgcgtataaaatgaaaacacctggcgaaacacccgacaccctagtatttgctttggcattatcagcgtagatccatatcgctcggtcttataaatgagggcacagggccagaagctgcaagcattccttgagcgatcttagacaaggtcggtcatttagtttatttttcaattcagtggtcaacttgaaaggagtttgaagtaatctatctactcgaaacatttccatattcacgtgagtaattggttaaaattcacattcacatcggatcgtttaaacagctgtcagtggtttttgagttgacccattaaaggtttcgggtcttttgtgtgcagagagaaacttctggacggaaatattatttttttttttttaagcttatttttggcagtcgcgtatgcctaggcagatattattctcagttgtcttttagctgtgctcggtgaattattatagctcaatgtttagctcaatgaatattccatatggctatcctccgaaatttccgtttgccgagtaagccacatgagtgttaaacctttgaatcgttgcaagtgtttctactttgcggaagcttcggcttaaaatctatgccgttggccttgccaggcagcactcgaaagtttccagacaatgttcctaatgagttctcaacaagtggactagcagtggcaaaagcataaactctatgcaaattgattcactttcaacatcagcaacttcatttgagttcgttacgtatgcggccagttgtcggcttaagaacccagcagccgtgtagtaagcaggctaagtaagctgctttagttatgacaaagcacagcgtttcgagaaacacacacacacacacacacacaggatcacaggatgttccacggacacaggacccacgccgagtggcaacacgagttgcctaataaatgatgtggcggccacaggagacgacttaagagaaacctctcaaaacgttgtgcagtgaaaacaaagaagttttaatttaagatacaaattcagcttacagactattaaggaatatttttgttcgtatcttatgtacgaaacaaggccttgagttgtacttgttttcttttcacataccaaccaaatcatactagcctatttctcagtgcatctcccagaagtaaagatgacaaaatgttgtagtagctgtagttgttttagctgttgctgtcaatcaagacaagctgaatttttgcgacattgttgctggacaagctgctgctgccaaacgagtttactttgtcctttccgctgtcattgttccgctcccgatgcgccagtgactgccgctagtcctccagttggtcatgtaattgctatactgctattactttgggccaagttattaagtgattgttattcctgctgccgctggtgcttttgttccgttgatgcaaaagcataatctaacgattatgcgaagcagctcggtctggccaaatgtaaattaactcgtgttcgagctgagcatccgttgctcgtggctaattttgtgtagtctgctttttcgggcaggcgagttgcaaattaatttcgatttttgcgaacagttcggccatggctgtccgaaacaatttgccaaattgccattgcgaatatgtgtgtgtatgcggtgtgtgtggcggcacaaactgttgcagctggctcaactaattgcctttaattatgaatggaactggcaactggctgcctcgtcaccaaaacacacgcactaaggataatcgctgtacgctgcttgtcagacatggcgtttgagtaatggctgtctaggtaataatgcattatcgatttaaagtgtcaaccgatacgaaaagtgccatttgcattgaagtgcggacaataactaattgccccccatccaactggaatattttcctgtcaattaagccgataaaatgtggccaggagtcaggagccaggagcagaggagtcgagcgagccgtatttatctgtaaatatcgtttacatgacattaattgcatattgatagtgtttgctcaattgtttgcccttgtacgctctatttgtgtttgctttgaacgactcgctccgctccgttgatgcaactttgtccggtcggagtggccatcaatcaatcaagcgatccatagatcaatcaatgcgccaagtttgttaccgccaactttggctcccgccgtatccaactaattgagccccaactcggcgagcttgtcaaacagttttggccccgagttagctgcaatttgcgactcatgaatatttatgcgcgatataattaaatatgctaattacaactgattgtacgcacaatcatttgaaattataattctcagcgaagcggagcgagttcacttcgcgccggcaaaagcaacacgagcagccaggacacaaacagccaatccgccaggataacacgcattgtgaaactgacaatttagcataaattcaaatgaaatcaacacaaaaagggggcgtgacttagcaacagttgccagcttaaattgctttgcagtgtgaaaaattaggggcagtagggtgcgggggatgtgctgggaattaaataaattacattgttgccggcataaagttgacgctgccagctaaacaatttgtgcagctatcagggctacccagccaaatgccacccctatcccacaccctttccccctttcacccatcgggcaacattggccttcgggatggggtccttgcacatcctgctgcacctccactttgattattgaaccacccacatcagctgccatggccagccggatgagccggatggctaattttttgtgctccaagtaagtgaatttaagttttaataactgacattggccatcaaagatcgagctgctacaagccaggtttatccgggttaattgaaaatccaaaaaggcaaccggtgaaggccagagcatattttaacatagttttgccctccctcaattgcgccaacataatattcgagagcatgtcttaagctggcctctatatattgccaagaaattgcgcataaattgcgaaagaaattagttttcgtgttctgtagaccgacaagagttttgccattaaattaagcagctcagcatgcaaatgaaaaggaggagcttaaaagctgcattgggagctaaataatcctaacttaaaactaattctacacatgtgttcaactaaagatccaacacatttcagattggagatattcgaaaaacataagtaattaaatacattttgatttgtatactaaagattacttctctggatttagaaaactttaaactcctgtactacgcaataaattcccaaagtcagcacacaatcaggcagcaattgaaggccacattaaagcgtgctcatacaaaacatcgatgaataattaaaatttgtattgccatatgcacactcattacataaatacttcattaagcagactggacgggccaaaagcactttgtccccgaccggacataaagagcctcccaaatgatagccgttcacttgaacaaatcaccagcacgtggccaataaaatggggatgggctctagagcttctgctcattccgccatccagtggaaatagtttaccaaacgtagatagccaaaagggaggcgttgcagccataaatatccatttgcggcatttccatggtgacaaaaatgtagccagtctaatttattatcaacagcctttgtgcaaacaaagggaccaaacaagctttttaatttccacaatctcaaaggacgaacgaaggaccaaggacttgggtactggtcactggacaggccaagaccagaccgtttcattagttcaattagctggacaggtgctggctggatgtcaagtggcagctttttaaacgatgattagtggccattcgttttcgtcctgggccaggacgaaatacaagacaaattgttgtttgtttagctcccgacaggaggcacttgaatgcaaatttatgtgcccgaaaggattccccctgtcagccggtccttagcattggcaggtcgcagctgagggattccccaacatgttttctaatttgctttttgagcgctggtctccggggtggaaactaaaatttgttgacacaattttaaagaacatgaagtctaattaagatgccttcaatattaaaaataattggtaaacgattatttaacaaaaaatattaaacagagaaaagtggatagtggtttaatttcaaactattttttgcacaatccttaagagcgaaaagaagccattatcatattattttaaagtggataaacaaacaattttttgttttcaaataccttatggtctacaaattttgtcactgccacaggtggccagtggccagcacaatgagctaatggccagaagtcggaggtgttagagatagcaaaagggccaacagacactgcacccggagactaactaacccaattatttgtaaaatgcgagcacagaaaaaataactgagaaaccaaactgaaaagaaaccgcagcccattgttcctacgccacagcaggtgaaacccgagacacagaaaagttttccaggggttttttgcagaaggggatcggaggagatgggaaaagcgggaaaactggggaaaacttcgcacagcacgcgtaatgaaaactttgttagggcacacaccaatggtgcacagagcgagcgaggaaaatggcacagaaatagacaaaaaaaaaaatatatatatatatatatgagagggaaaaacagcttttcccggcagtgccactcgatggtgtcgagtgctccggctgctggacacaaaagtggcgacaacgggaaattagttgtgcacgcttgctagttgcaacgcaaaacccgggcattagccggctgtcctagatgccctgccgctggggttgaccactaaattgccgagatgaagtcgccgctccggctccggctccggcttctggctgatgttgatcaaattatcagcatgtggcgactgccaagtggctgatgaccgtcgcttaatgcgctcccaacgtccttcgtccttgctccttttgtagcatacttttcagagaccagcaaattgcttaagctgaattgccgagcatcgagagtggaacgttcacgcagaaaaatggcaattaattggtagacttatataaatacgagcagctcaatagccatagaatctaagaattcgatcgatcacatcatgacaggcctttaaaaaatgaatagatagactagtaataaagttggaatttaaaggcttgacgacttaattgaaactgctataaacaataagtttgcattttcataaaccaagtatgtgcttttgtttctcgtgctctttgcctgctcaatacgacattaagaagttcaaaagttccaatcacgattttttaaacaatattccgccgtgtaattcaaacgaagcctgcctaattgtttgacaggacaacttgtaacgcgaaaagttttgctttacttcacgtctgaaatgcgacggggccacaatgacaggcaacaacaagttgcaattgtcacttttgttgaaactttctcgaaatttacaaagtaccagtaacttactcccttttttttttttttgctcattttcgttttgaccaaggctacacactttttgccaaagtcatgctggaaataaattataaaaatgtccgcggaaaattatgttttttttttttgcggcgtgaggcagtgggagtgaaaggagcatttgattccttcgccggtcaagcgccactcgttataaatgatcgcaattgaaagtttaaaccccatacagggctagttgaaaaattgacattattttcggttggcaacaaacagtcaacggacgataaataagaggcaacttaagtcgagtatttatttttcgggcatcctttgataaatgactttgacctggccgatgtgcaaaagtaaaaaaaaaagtggtagaggaaagccgcacatgggcgtgccctgccacgccctccgagtgacttttctcattaagcctggccaaggcgaacgtggtcgaaaagaaatcaaactaaagttttgcacaaaattcttggggtcgccggcccgaagggacgtgaacatgtgtaaagcgtcgagcggttaaagctaaacaaacaattgccaaatgcaatcgagttggttttggcctcgcccccaaaggagcaggcgggtggaccctgattggtctaaaggacgaaaaacagtagaatggggtggtaaggggcacagttgcatgttggcaaatggcaggaagaagtttgccaaccgcatgcttcaacttcaatttgctggaaggattgttacggggaactgggatcgctgcttacagcttgactcgtatttcattactcgaactggtattaagtggcaaacttttgtatttaacaacttttagcagccgagcagcaaaaatgaagaagatgaaccgaccaaagtttgccatggcaaagccaatggaaaacaaaaaaaaaaaaaaaaaagaaatgtgaatcgtagaatgaggaacaaaaagtaagttgcagtcacttgacttaactgcaattctctcgaaattcacttgtcaaaatttcgctcagaaacaattaaattttctttaggttttttgaacttgaaatgcattgaacatatttaatattgtatagtacagtaggtataacttgtttaagaaaagcaataagtataaatacaattaagtattttatagtgtaatatcgctagggattttaatgaatcaggagagctaaccgtttttggtggtgcaaaagccaattggcaagaacatgtggccaagagcacagaggtggcagttaaaagctccaaagattcccgaaattgggacaacactttgcactttgcaatctgtgaaagttgttgcatccccccacttcgggaaatctgtcaaataaaagtttgattggcacacccccctgttgcacgggagttttggagccatgactttgccagtgcattaattagcaaatgcagcgaactgaggaaactttcgagcattgccatgaactgcatgccgtgcatgcaactttgtggcgccccccatacacgcatccaactcatctgaagtggcgcataaattgagtgcatagcgaatgcgtacatatacgtatatatgcaacaatgtggcatatagtgtaatttcccccgcattaccataattatccctgtcatgcccacagctccgccatcaccatcaccatcaacaagctgatcaggcttcgcggcaggcggcactccttaatgccaggtcatgcaaggtagtggaaagcgaaagttttacatacgttctgcgtcgacagaaggcggaaaagcggaaaagtggaaaaacggaagagcgcacccactctcacagctccggccgtctttactttttgctggccgttggccaatgtcggcgctgcactttggctaaattacattttcaatttgtcagctggcggcgaactgcaggccattaaatggcaaattaagttcagcttcggcttttattttatttgccaagctgctgatgctgctggcgtgcttgcaatttttgcatttttccattctccggcggcaaatgtgtttttgatatgcgtttcattgtctgacgatcttggcgcattaacgtggcagattttcggctctgcgtcgtggagatggtgggcaggtggaatatgctgaatatttcatgagtgtcataaatttctcctttacacgcgcttcagttttgccgcccttttatttttaataactttccattgtggctgtcagtggcaggcaggcaacagcaacagcaacacacgtgcttttcctgctcgccaggactgaggactcaggactcctcgagtgtgaggacatgtcagcgattcgttgttgcttttgtcactccttcaagctgttttataatttatgatgcttggcatcgaagactcctttaagcacacacacgaagacacacccacccacacaccacacatgtcgccaacttttgtataatttttcaaaaaaactgaactgcatgaatattaactgcaagtggcagaatatggcggcagcagcacatcctgccatccgaaatcctggcccatcttggctgccacttttttttattgtgtgtgcgcccggcgaaagtttcaagtgccagcttgatccggaaggggcggtggccacgccctgctaacttatgcatacgtgtagctaagtctccttttttttacccgccgccagccagccagccatcttcagcatcaacctccactcgtccttttgttttcggcaaaggatttttcatacatatttgatgcaaatgttcgcaaattgtcgtcgctgtctattggacattttgtggccgcattcggttcgcacattcgcccatcaaacaaaagagcagatacactgggaacaaacttgtatataagcacttaaattgtgcttagtttaacaaaacaaagtttaaataatatttttcgaaggtatttaaaacatttgttgaacgtccgaaggttaaggttatatatatactttttatgcacttgtggacatctaagtggagtgcaggtggcacttcgcatggattacggataatttgcttaagcttggcaagctgaaaataacaatgaggcagccacaaagcagatccttggaactgtccgtttcgactcctggctcctgcgtcctgttgcccgactcctggcttttgtctcccggcttatcacatggccgaaaaagcgaagggacaaagatgagctagctggtcaggatcctgctgcgacggctgtcaggcaagtgacacggcagctgtgctttaaacaaagctaagctcgtggtaaaaacaacatgactaatagttttgacagagccaggcaaaacaaaaggccagacagcatgtcagataaaagccaaagcgatggcaaatgatggtgttcgctgggaaggcgaaactgcatgctaaatgttgtcaattagttgtagttggtgagccaaaaaaaaaaaacgaatgaccgaatgacttggcgaattggctcgcaaaaagttgaccagttggcgacccttttgcaatgggtattttacattatccagaggggcaatagtcatctttgtacaacaaatcaattatttctaatcatgtgaaacgtatgggaatttcaagacttgtaaacgtatctctgacttgcagatttatttgatttaaaacacaagcttgaatacgatttcttattagacacactacatttcaatactgtcaatcaggttgtcaattagtgttagtgtatgctttctagaatcaatcagtatttatgacaaagctttcttttgttcggaaatttaagacaatctcaaaaataggaactagaaaagggtggggcaagatgttaatattcgcatacataagccagcagcaaccataactttaaacttgaataactacaagctcttaacataaaaactaatgaaacataacttccaattatttccttctctaacccctttgaatttgtaacatcgacttttgagaagatacacattgagcaagaagtctgctttacgacagcttcaggtgaaggagaaaatcctaagctgggtgggttatgccatttcttttggtcgccgggatccatggacctcggaatcaccaagaatcacagggcagctcaacagcttggcttggctataaaaccacaaagtcgccgccaaagtcacacttaagctcaactctgccctctcttctgattacacccactcatgcttacagcaactgaagtacagtggaatgtccttacggcgggacgtgcatacagatgtcagcaagtggggcgaagttcataaattcaaagaacgagccaaattttccaagggtgcaccgtaagcaaaaattgggaggtttttgaaaggtgaaagaacattgcagttatgaaattttgaaaacattttctaaattaagtttgcgtttatggatttttaatggcagaactcctaaacctaaactgttgaacatttttggctttgtattatagcattagcatttaaatgcagtataatttttagtcattgcgcttggggttttacgaatttcacccacaaagaaagttagtttattgtcactctgtgccatctttttgctccctttaagttttgtgcagcctcgtctttttcgcctggctcatttcgcctggcccctggcccccatgttaatgttgatggggttcgtttggatgtgggttgttgcaagtgttatgatgggtgcaggcaatccacaccacaaggcacccacaccattcgcctgcggatatgcaacaatgttgtcaagtttcctgcttgacacaacgtggccgccgagccacggagcgctcagttggcattatgtccatcgggcgtgactaaaatgcacatgctcaactgtgctggaaaacgttttatccagctcacatctcacctaaaagccaacagccccccccccccccccttccgccactccgaaagttgaagagattgtgtttgttttttgccggtgaccaacttgaattttgattttgattctcatttcttgcacactttttttttcagcagaagcagaagcaatagcaatagcagcatcaacatggccaaggacttgagcactatgggatgggattatctgatgtttgtactgtttatagccctcaccgttttgggcccgttgtggaaacgcatttttggcaaaaagaaggagcgcagcaaggccgactatgtttttgccaccggcggagtttcgatagtggcagtcatgatttccattgcccgaggaaccttgggagtgagatccgtgctaggtgagtctttaaatgccttaattacttcttattaaatcttaatcttgtaacaattttaacaaaggctatcccagtgaattgtactaccgcggatcggccatgtgggagatcatctacggcatgatgagcgcctatcccatcgtttgcttcatgttcgtgcccgtgtactttaatctgggcatcacctccgtctatcagtacatcgatctcaggtaagtcgagctaccaactcgagctaccaagtccaagaaaagccactccccaaagcgccacatcgtttaattagtaagaagcgaaacgaagcgaaggaaaacgatgcgaagtaaaacggcaggcaacaggacaggaaaattgttatttaaacattcgttttaattccgccaaatgcgacgcagaagcagcagcgactactgtccaagggtcctgtgtcgcctctcttatcgccgaaccgcacacaattttattcttcattaaggaccccaaatgaaagtgaacagaaaagcgccacggggctcagttcagttcagtttagctcaggttctgcttttacttttgccaggctgcgagtggcacaggttcgctgcgttgctaaataaatttgaattacatttcacacaaaaaaaaaaaaatcggccaaacagaggagcacaacaacaacaatgagtcgctaacaaatggccaaacaaaagccaagccggcagagcaaataatctatagatttgtccttgccccgccatggaaagcaactcttggtcatggagtcgcagtagtgaacttggtcgcttggatgctatcgtccagttgtcgtcagcgctgctattgggccacctcgtttccctccgcccctcaccctaagtttaactgctcctactattccatttccatttccatttccatctgtcgcaagttgtcgcctcgtgggcctaattgttttttaagttcgaaattagttaacaaatttgttatcaaatgttttgcagtttcgacaacagaattcaattaattgcaaaaacagacaaggcaaaaaggaggggggttggctgtttggtcagagcataatttgattgaaatttaattggcatgtgccgcacattgacaaaattctcggtgggttttctcacagggcaaaggaactggtcgtgggcaaaagctgtgcagaattgacaaattatttaaatgtttgcttgaagaactgaatgtaatttgttaattagcataaacaaactgaaatacaagaagaactaatggggagtctaagagaaattaatgataaaatcaatgccatgtttctactactgtgatgagtctcaaaagtccaaggattttgccatgtttgaataaattttttacaagtcctacattaaatcctgcttaacaagaatttggttaatacctaaaagtaaaatcatgcaatctaccaaaaaaggtttaattgatgacttcttcttcaatcacctatagactttcattaagcaattcaataaattgtttaatgggtttaaaactcagttaaattaatgaccatatcaatgactgataatgctggtttccaaaaaaaaaaaataccattttataaatgtacattttactcggttcggacgcaacactcaaactaattgaatagcgaacgagtcaagccacttcatcaatcttagtcaattggctttagccccaaaagcgggcaaatcaagaaggcaggaagaaggaggaagggcgtgggatacgaagaaaagggttgcggatgcgcaacatggccaaatgttgccccaaaaagttgggcgcacaacatttggatgcctcattgtcgcttgtcatcgcaactggcgcccagcgacatgtttatgcatacaacttcatcaaaataggctgagcctctcgactggcggatgaaaatggatgtggaaatggaaatggggtctagggcacacacagacggaggccgataagtgaatatgctacaaattggcaaaagccacttggccaaacacatccaaccaggccaaataaagcaagtttgaggctgagaaaaaatgaggaaaaagacaaaagcatgacgaggacaatgccatacatgaagaatggtatagttaaaccagtgggccaagtcatacccattctttcttaatattactaatatgattatcaaaatgattaaatatcaaaagaatgcatatgaaattgctaacattctaagatactttagatatgatgtaggcacctaagtgaattgtaggtatcctgatacctactctatctttcccgttgcatacaatcccaacaagacaatatacctttgaagccaatgactaccgggtatcaagccaaaaaaaaaaaacccattgaaagaagcaaaggaaaaagaaggaaacacaaagaagccactcggtctgaggctgttgacaaattgtatgacaattcgtttgtgccataatgtttataaatagcgcgtgttgttgcctgtcactggcatcaggcatcaaggatcaagcaccgagccccaggatctccgtcctacgaaaaacttgcgaaacaaaaacccaagacatcccaagcacaatcacacacacacacacacacacacgcacatagccgcccaaaagtcgtggattctctcacttgtcagtcgcctgtcgcaagtgatgtctgccactcaaatctgtggaggagtgggtggattgggcggatcgggtggattgggcggattggttgaatgggggaatgtggcatgacccttgactcgctgccaactcaagtgttagccaactcgcacagagatttgctatctgggcaaccatcgagttcaatggtcaagtaaagttcggctttgttcgccccggataattcatactgccggtgatttcgtgatgggggaggagctagtaggagatggcaattacatgtaaataaattgataccgagcttgtgtgccagaaaagcgggagagatcaatgccaacagtcgttggcacttagcaaatggaaaaaatgcattccggcttccaccatggtttatttacgagtacaagggtggccaaagtgcttctgagtgaatgacaaccaaatgaaaaaaggccacgcaaaaaaccaggttggctgcccaggatcggaggtttggggagaggtgaaggagttcgcaggggtcggtgttttaggacgacatgcatacgcataaataaagacgttttcggcggcgctacaaagtgaggccgtgatttgcaattcaaaggcaacaaagttgttttttttttttgtgggagcaacacacatgacctgcggtggtaacaagaatggggatattgggaccaagccaagaatgatacaaaataaaggtagttagataaagatacaaatgggtgagttcttcaacaaaatgccaacagagttcagataaattaggcgattttagaactaaaacatcgagcttaatttaaactgacctttatttacaaaacgtaaaagaattatctcaactgcacacgataaatcaatttcaagtgatttgaacatcaatcctaatcaataataatccttaaagccagtttgctctgggtatcttgaagtcgattaaatcaagcgaaaccattcacctttgataccttctctgccaccctttttatgagcggcttttagcgcattgtaggcactcacaggacaccgacttcgtatggctgattatgtttatttatgcatgacagttaatgcattcaaatgtgtcacccttgttgttgcctcagattggctttgattgtaaaattaactcgatcctccccacaggagacacgaaagtgtggagctggaagcgacttggattgggattggctggctaaacggcgattatgtggccattgtacaaaaccactcgtcatattaaatttgccattaatttatgcctttgtcgccctggccgaaaattggcttagcggcttcccatgataaatgatgacaccgagttgcagagtaaactcaattcgcaggggcgttggattcgaggagcacgaaaagtgggggatacttaatcccccagtacggccagggttcaattaatggaagggggtggtggtggtgctgacctgctcattcgctggcaacctattttcacaccctccagtgatggtggtcattgacgttgtcctgccagcttgccagccagcctgcctggtatcctgccatcctgatggttaagtgagtgtgggatggcggtgtaaatgggagcgcagccgccagctgcgagtgtccttgctggtaattgcttgcccgctggcatggctgcagcaattattgcatactttgcggcacttacatttcatttaaagttattaagcgacaatcgcatcgcagtacgtctttaatcaactcagccaagtaaattatgccggccaagcgatccgctgactggttaaatcaattaaactaaaacaaaagccaggagcaggccaacgttcaatcaactggacggcggtgacagccccaggtcattactcaaacacacacacacacacacacagtcggagtgagatggagatgaaatgacagacagacggattggacagaagaggagaggtgagtagagcagggcaaatcctgggccaggacaactggccgagcacttattgtgatgaacacaatgttaacaggctaaatgagaaacaaatgccacaatcagacaacgttggaaaaacaaggagcagaagacgaaatgaaaggcaaccgaaaacaataaatcgcataaatcatattaaattgacatatcaggctaaaattgaccgcaagcagtgtggatgtgtgtgtgtgtgtgtgtttgtctctgcttgtgggatattttatcctacaataatatttctttatcaatttccacaacaagctcaagctcagagcttagtcctgggaaaagcaagaagagcaagaaaatctagaaaaaaccaaagaacacgaattagatgagacgcagcaaagagggcggcgaatgcctaaataaatgtttgaccaacaaagcaagccgaatcatatcataccactccatatcgcaccgaaattcccgcccaatgccacgcccactcaatcaacacatatatgaggcgtgtgtcatacagtccctgtccctgtccatgtccatgtccttggccaaattggccaggcttttacgatggccctgaagtttcctctgcggaattttccgattgttttcctccggcccacagacacagctgtgtcgcaattaaaatgtgtatcaagcatacgacgcgttgtcatgtaaaacgcttaagctgctcatccccccttccaccacggacaagcaatgtaaagtcgatcgggtaaatatgttaagcccgcttaatgcaaacctagcctgagggcgtttcgggggcgtggccccaacatcccgcatatgccaattgagagagggaaaagtgcaacatcattaattaatgcacagtacgatggtttgcagcctgcggccacgttttataataaccagaacattaaggcgattaaagatgaaatccagtgcaactcgtcccacatctaagtgtgcacttaatcccccctgccgaacacctgggtcaccaatcgctcataaaccttccccccgccaccagcaccttcaagtccaggacctcagccaagacacggcccgttgacagcccaactcgtctcagatcaatattggccaagggcaattaatcatttagtgggccatctcacacacgtcgcccaatgcagagacaccgaatgacaaacagagaggagcagagcaggagactgggcaaatggagcggagttgggcacaggacaaaagtggattatacagtcagcccagatgttcaacaagaaattacttgtgattacaatgcacagttcggtgcaaggatatagcaactatcaatagagattgtccatagtcctgcattataaatcatgttggaaaacccaaccccaatagatttgtttaatgatttacagtcatattatatgacaattatgcagattaaatattgatattaataaaaacaaaatcgcatttgccgagcgaatgtgattaacgattatttcattaatctcttaaagagaatgcaattattgttaaaaacaaaaaaaaaacgaaatcataaaagccaacacaagctataaagctgaatattcctggcaaaatacaaccacttcatgctttaaaattcccagcgtctaaccgccttttataacaatttaatagcttcggaacggactgttaactttatgcgccaactagtggcttaaagctcaggatgccaatcaaaggattacggacgcaaagccatttatttattaagagccatgccgtgcccgctggatgcgtgtgcgcaggcacttcagacattcgaccatggccacataacgcacactaaacgatcattaggtggacccccaaagcagtgaccccccccccacctcctcacccatcttgtcgcacatttcgcatcaaattaacacacaaatttttacaacctagtccataaaagcgctggtctgaactataaaaacaatcaaaacgagttacagagccgccaattttcttaggtttttctcgtccatgtcgtaaactcgacccgcccgttgctcccgattccacatagcttctttacagcggtagtaaatcataaaaaaaagggggctagagcaataatgaaaaacaagaaatgccacccgagcaggggacacacattaaaagttaaaaaaaaaaatatatatatatatagaacaagcaaaaaaaaaaaacggatggagctgcttaaatttagtagtacgatgcactcacctgctcctgttttcgtccatattcttattcttcattcttatccttatccattgcttttcctttcgttttctaggttcaagagccgcacggtgagatgcctggcatcggcgacatatatcgtgcggcagatctgcaaccttggcatcaccgtgtacactcccagcgtggccctctcgacggtgattggcataccctactgggcctccattacgggcatggccgtcatttgcatattcttcaccattatggtacgtactgtgctcatcgctgtgccacgggaatgccagcgatttaatgatgaaaatatttaaattcctcttcacccttgttccaactcattagggcggcctgaaggcggctatcaacgcggacgtcatccagacagtgaccattctggttgtcactgtggcggtttgtatccagggaactatctctacgggcggcgtgaagaaggtttaccaactaaatcgggacaatggtaagcagtggcagtgggtgtgggatttgtttcgattgatcatggcagcttattagccagctgccaggatgtgtgcgtgtgtgtgtgtgtgtgtgtgtatagtgctgacgaatgatgactattaaaatggcatccattgtggattgccgttcgctttgcttctgttcctgcgtcggctcattatgcacataaatgatgatgataaaagtgtcataaaacagcggcatccgaatccgaggtgggaaggaggaaatggcagcctcgcatgacgacagtaataaatgtgtgtcggcggagcgtttgtcactcgagtttgagttgttggctgtcattgtgcggcaatcgtagggctcctgggaatcccttcacgtgctcctcctctaacggcagctcaatctttttcccgccataaacatgcactaaggacttcgttccttctattttcaggacgtctcaacttttggaacttcacgggcgatatgactgtcagagtggataccacatcggcttggctgggccaactgttcatgtccctctcccagatcggctgtcagcagaactttatgcagcgttatgtcagcctcaagtcgctcaagcaagtgcgtcggtaagtgactatcttcggcgaaccacctattaacgaaaatctattaattaattaaaaaatcttatctgattttgcagagttatgctgaccaatgtgcctttggtcttcttcttcttttccatctcctggatctctggcatggtcatctattccacgtacatcaactgcgatccctacgccgagggctacattaagaaacccgatgagattctgccattctttgtggaggatcagctcggttttctgcccggtttcgtgggcattttcatggccactctgttcaatggcgccctttggtaaatagctcacattctcacaaagttctttcactaatccaagctaacattccagcatgatggtgtcgaatctgaattcattggcaacggttatttgggaggacttcatctcacagttgccgaaattcaagggactctccgacaaacagcagctacgaattctgaagtcgatcactgtcgtctgtggactgattattatgggcgtggcctttggagttggtctgctggcgggcgttattgagtcctcgctgctggtgttctcggccacatcgggtcctttgttgggttgcttcatcctggccatgatggttccgattgcgaattggaagggcacctccgccggcatggtcaccgcctgcgcctttgtgctttggatcattggcggtggcatgaccgttaccaaggacaatcccctgctgcccacctccacagatgtgggtttttaaagcatttccgttttaagcttgatgcctaatactttgcttctttacaaaatgtagggctgcaccaacgataccttcgcgcagtccattggcaagcccatcgtggaacagggacagatgccctggctgttgtcgcacacgcctattgatggtttcaaccagagctttgtgcccacacagcccacaattgcacctgaaaggtgagataatttaattattctaaaagtattgcgtaagatagtacgtcacctggtgaaaatgtgcactagaactttgttatcctgatattaatgtacgcttaattccaatgcagatccggactggagaccttctactcgatcagcttcatgtactacagtttaattggcacggcactgaccgtgatcattggcacagtgatcagcttgctgactcagcatccggatgacgcctacgacggcaagctgctgcatccgttgatctttcggctgtgcgagcgtttctccggccgaaagccgtactacgtgaagcacgaggaggagtccggactgaatgggcggagcagcagtgactcctcggccacgacaaccacatgcaaggcggagaaggtgaatcacggctacgagtcctcgccggaggacaaggagaagagcagtcccatcgccgtggtattcaccacctccgagggaacgggatcagcaggggatcagcagtcgatatgcgacagcagtaggatccaattggacattgtgccgggcgagggcgaaacgggagtgtatcgccaactggccgggcgatctgcgctctgagggttaactatgttgcatacgtagatagtctgaccctaaaacttagtccgtagtacgtaagctaagccgtagaatagagcaagttagttagccaagtgtttcatgtctataaagatgctgtgattttctgtgcgcgactgttgttgagcaattgctcgcgcatttcattcgcatgtacttaacgcatatgtgtgtgcgtgtcagcatgcaataaataaagacaaataaacgtattttttataaaaaacaaacacaaagaattacatttctaacgtcaatttttacttttcgcgcgctgaaactttctaaacttggccagtgctgcccatcaaattggtctatcgataactgcgatgaccagggcaacgagagtgcagcgtgagtcacgactgttacgtgacgtaagttaagcggggaatgaagtggatttgtaattagatatccaaagtataagcatgaatataaaaatataaaataagctgtttaggtattttaccaagcattgtatttgacataaacatgaattttaaagcagctttatttactcgtgagccatcgtgactgctcccagctgttctccggtttctcccatcactattatatttatgggtctttttgtttggcgtttttgcggccccccaaagaatgcgaaaataaaacgcaaaaagtctgatccctaagcaatcaaacgtacaacatggccacgttggagaagcccaaaaaggaggtgagtcgtgggcagtaaaaagtaacgaacctaataatgaaattgcagaagagcaaaaagtctcgcaacagagtgccgatcgaaaaagaggaagaggaacctgctgagttatcaacaagtgaagaacaaagaccagcggagaatgtgtctctgttggaggaattcgagcgcgttgcgaccttggccagcagttccagtggcgaggcaatcataagccacgagtgctgcatttccagcgatgtaggagtaacgtcgcaagagccagaaggaaca

SEQ ID NO: 27140 - DNA, 2170 bp, DROSOPHILA
acaaggtcggtcatttagtttatttttcaattcagtggtcaacttgaaaggagtttgaagtaatctatctactcgaaacatttccatattcacaagcagaagcaatagcaatagcagcatcaacatggccaaggacttgagcactatgggatgggattatctgatgtttgtactgtttatagccctcaccgttttgggcccgttgtggaaacgcatttttggcaaaaagaaggagcgcagcaaggccgactatgtttttgccaccggcggagtttcgatagtggcagtcatgatttccattgcccgaggaaccttgggagtgagatccgtgctaggctatcccagtgaattgtactaccgcggatcggccatgtgggagatcatctacggcatgatgagcgcctatcccatcgtttgcttcatgttcgtgcccgtgtactttaatctgggcatcacctccgtctatcagtacatcgatctcaggttcaagagccgcacggtgagatgcctggcatcggcgacatatatcgtgcggcagatctgcaaccttggcatcaccgtgtacactcccagcgtggccctctcgacggtgattggcataccctactgggcctccattacgggcatggccgtcatttgcatattcttcaccattatgggcggcctgaaggcggctatcaacgcggacgtcatccagacagtgaccattctggttgtcactgtggcggtttgtatccagggaactatctctacgggcggcgtgaagaaggtttaccaactaaatcgggacaatggacgtctcaacttttggaacttcacgggcgatatgactgtcagagtggataccacatcggcttggctgggccaactgttcatgtccctctcccagatcggctgtcagcagaactttatgcagcgttatgtcagcctcaagtcgctcaagcaagtgcgtcgagttatgctgaccaatgtgcctttggtcttcttcttcttttccatctcctggatctctggcatggtcatctattccacgtacatcaactgcgatccctacgccgagggctacattaagaaacccgatgagattctgccattctttgtggaggatcagctcggttttctgcccggtttcgtgggcattttcatggccactctgttcaatggcgccctttgcatgatggtgtcgaatctgaattcattggcaacggttatttgggaggacttcatctcacagttgccgaaattcaagggactctccgacaaacagcagctacgaattctgaagtcgatcactgtcgtctgtggactgattattatgggcgtggcctttggagttggtctgctggcgggcgttattgagtcctcgctgctggtgttctcggccacatcgggtcctttgttgggttgcttcatcctggccatgatggttccgattgcgaattggaagggcacctccgccggcatggtcaccgcctgcgcctttgtgctttggatcattggcggtggcatgaccgttaccaaggacaatcccctgctgcccacctccacagatggctgcaccaacgataccttcgcgcagtccattggcaagcccatcgtggaacagggacagatgccctggctgttgtcgcacacgcctattgatggtttcaaccagagctttgtgcccacacagcccacaattgcacctgaaagatccggactggagaccttctactcgatcagcttcatgtactacagtttaattggcacggcactgaccgtgatcattggcacagtgatcagcttgctgactcagcatccggatgacgcctacgacggcaagctgctgcatccgttgatctttcggctgtgcgagcgtttctccggccgaaagccgtactacgtgaagcacgaggaggagtccggactgaatgggcggagcagcagtgactcctcggccacgacaaccacatgcaaggcggagaaggtgaatcacggctacgagtcctcgccggaggacaaggagaagagcagtcccatcgccgtggtattcaccacctccgagggaacgggatcagcaggggatcagcagtcgatatgcgacagcagtaggatccaattggacattgtgccgggcgagggcgaaacgggagtgtatcgccaactggccgggcgatctgcgctctga

SEQ ID NO: 27141 - protein, 681 aa, DROSOPHILA
MAKDLSTMGWDYLMFVLFIALTVLGPLWKRIFGKKKERSKADYVFATGGVSIVAVMISIARGTLGVRSVLGYPSELYYRGSAMWEIIYGMMSAYPIVCFMFVPVYFNLGITSVYQYIDLRFKSRTVRCLASATYIVRQICNLGITVYTPSVALSTVIGIPYWASITGMAVICIFFTIMGGLKAAINADVIQTVTILVVTVAVCIQGTISTGGVKKVYQLNRDNGRLNFWNFTGDMTVRVDTTSAWLGQLFMSLSQIGCQQNFMQRYVSLKSLKQVRRVMLTNVPLVFFFFSISWISGMVIYSTYINCDPYAEGYIKKPDEILPFFVEDQLGFLPGFVGIFMATLFNGALCMMVSNLNSLATVIWEDFISQLPKFKGLSDKQQLRILKSITVVCGLIIMGVAFGVGLLAGVIESSLLVFSATSGPLLGCFILAMMVPIANWKGTSAGMVTACAFVLWIIGGGMTVTKDNPLLPTSTDGCTNDTFAQSIGKPIVEQGQMPWLLSHTPIDGFNQSFVPTQPTIAPERSGLETFYSISFMYYSLIGTALTVIIGTVISLLTQHPDDAYDGKLLHPLIFRLCERFSGRKPYYVKHEEESGLNGRSSSDSSATTTTCKAEKVNHGYESSPEDKEKSSPIAVVFTTSEGTGSAGDQQSICDSSRIQLDIVPGEGETGVYRQLAGRSAL

SEQ ID NO: 27142 - DNA, 3738 bp, DROSOPHILA
ttttttgagtgggcgtgggagggtttcaatttgtgcaacttgtgatatgtctgcgatatggatgccattgctttttaagcggcggcacttgggcaaaagtggtcctctggtcagctgagctgcttacacagctagcttgtatatagatatatatattatatatatgtatgcgtgtatataatatctgatacttgtgtgtatacttgatggggcgggagttcgataccgagtccgaatcctccccttatcaactatctatgactaggctttggtttctctagcttcactgactgatagacacgaaaacggctgcatgagtactgagtatagggcataggcgatccgatcggaccgctctatatagcatatatgcgttatattagtgatgggtatatcttaggcctggtagtttggcggcttacttggacatggataggaatatagagttgttaaatatcattactgaaacattgattctttttggcatttctaaatagtgaaatgttcgcatataatgtcatctttacaaatagcttaatgttattggtatatggtattaactttctattttggtatcagctttgttaattacaaaaaaaaaattcagttcacactttcgcttgccttcgtaaattttgttactttgaattggatttaaaaaaaataagctttccatcctttttgggtcctttaggtccatttccacatccaagtaaactcaagtcctaccttacccatcactgttctcggttgcttcaacattcgtgtatgatacaaaacttggtgcggtgcaaggcattaactagctgctattttaactatctgcatgtaatgctcgttatagtgtacgtaccacttgcctatatgtctataggaataatatatgtgtatgtgtcttgtgtctagattagagtggattcaacagagaacagaatattgcacacggaggtgtgcaaaagaacacgatttaaaactaggagtatctgttcggggcaacagtttaaaatccttgcctaaagggattcgctggggcggcaggacctctgctctggacctgctgctgttgttgttgttgctgctgctgctgctgctggaagggattggccacacggggctgaccttgcggggcgtagctgccgccctgctcctgatagcccggctggtagccctgatcctgctgatatccttgctggtatccctgctgctgctgctggtactcgtactgctggtcatccagattcgtctcctgctcctgctgatactgctggccgtactccagatgattcttgacgccaccctcgacgggtttctggtcgtgcatcacataggtctggtactctttgttgggcgggtcctgcatcaggatgttggcctcattctcgaacggcttgaagtcgtagatgttgcgcagctttcgcagcacgggcacataggccagattcgagaaggctatcaaaaagttgagagccgtaaacccaatggcctccaccactccgccggcgataatgggccctacggcataggcgatcgagtaggatatatctgctatggcatagatactaccgtacaccgacacatatcgcacgtccaccagataaccgagtgtgggtagtagagccgtgtctattagggcaattccgaagcagatcacacagatgggcagcatgagcatcttgtagccgctgcagaatggtatgatgaagcaggagaagccctccagggccaatccaccggcagccattagccactggtgctgcggatacttgcgggccatcttcaccgtaatgaccacgcccagcacgtgtgggaagaaggcgggcagccagaccatgccgatcttccagttgtcagtggtcatgttatcctccatccacagcgaaatggttggctccagaaaggccagcgccacattggacatggtcagtgccccggcacagactgcaatatagggatccatcagcaggcgccagatgggtattacttggtcctgcacatccttgctttgcttcatcgcctccttgaccggtttcatcaccagcagcagcatcagcccgtccagtaggcacaccagtgccaggatcagaaagggcacttcctttccggcgaactggtagagcgctccgccaaacggaggcgccaccaggcatccgaaactgatgaaggccaacgcaatgccaagggcctgcgaacgttcgttctcctcggtgaaccgatcggctatcatggccaaaccggcggtgtccgcaaaggcggaaccggctccctgcagggatcgggcgaagaacaggacactgtagctgctgccacaagcaaagactgccgtcgagaagaacatgatggtcaggccgatcatcatgggcaaatcgtagccgatcttgtcgatgaggccgcccgaaaacggattcaccatcagctggacgatggccttcgaggcgaataggatgcccgtggccgagtcctgcccgtgatgatcatgatgcacgggtatgatctttcccgtgatattatccctcaacggtggaggcgtcggcccgtcatcgaagctgccaatctctcttaaatagtcgggtataatcggtactatcaccatatacagcatgttgtccagcagcagggctatcgatacaatcacgaggatgaggcgtcgctggttcaccggctcctggatcttctcccacacgatgtccttgacctcgcgcacctccaaggttgataacaggtatttggaatgaggccattttggttgcaattaattaatttcaattgctgaggtgtacaaagttctgatccagtttctttgggacttcctctccctctctctctctctctctctctgcctctcttcttttccttgtttgtactcttctctgttgccttaaagcttttatgcgccgatcggcgggcttgccattcttacagccggaaattgcttagctctcgctacgaatatggccgcttccgtttccgctccgctaattgcccgctctgaggtggtttatcgttgcttgtggttaactgtattgtttgctcctgctcttgatgttgttgctgtgtggttttacatgttttggtgtgcttgttgtagttggaggtgtacgagttgttggcatgccagtgaacaacctttaacgacacagaaacaagatttcgttagtcttttctttaattttgcagcttgattgccgtgctacatttattttcttaattttttagcagcactctctctctctcgcacatgtgctcctctctgcttctctttcttactcttaactaggattagctggttagttgggtctattttatgattgaaatgttgtttctgtgttgcaaaaggctgcctgctggtgaacagaaattgtattttattaggattagttcgtggcattcgcattgtttcgattacataggattagggatatctttcagtttcaggttcttcttttcgagggacacacatttcaatcataaaacgaataccgaaaagtacgtgttaagtaaattctacaattaattcattgaacacatttgtgggtccagggtgattatataagggtgtagcaattattttaattggattttgtgggcatgtaaacgtagccaagtgttcttagagccacgcggttgcactcatctacgcagtaattataattattgcttttacttcacagaaaaaagacccactcaacttgcacgacatccgaaaatacttgaatgcgaacaaaagggagcttaagtcga

SEQ ID NO: 27143 - DNA, 1738 bp, DROSOPHILA
atggcctcattccaaatacctgttatcaaccttggaggtgcgcgaggtcaaggacatcgtgtgggagaagatccaggagccggtgaaccagcgacgcctcatcctcgtgattgtatcgatagccctgctgctggacaacatgctgtatatggtgatagtaccgattatacccgactatttaagagagattggcagcttcgatgacgggccgacgcctccaccgttgagggataatatcacgggaaagatcatacccgtgcatcatgatcatcacgggcaggactcggccacgggcatcctattcgcctcgaaggccatcgtccagctgatggtgaatccgttttcgggcggcctcatcgacaagatcggctacgatttgcccatgatgatcggcctgaccatcatgttcttctcgacggcagtctttgcttgtggcagcagctacagtgtcctgttcttcgcccgatccctgcagggagccggttccgcctttgcggacaccgccggtttggccatgatagccgatcggttcaccgaggagaacgaacgttcgcaggcccttggcattgcgttggccttcatcagtttcggatgcctggtggcgcctccgtttggcggagcgctctaccagttcgccggaaaggaagtgccctttctgatcctggcactggtgtgcctactggacgggctgatgctgctgctggtgatgaaaccggtcaaggaggcgatgaagcaaagcaaggatgtgcaggaccaagtaatacccatctggcgcctgctgatggatccctatattgcagtctgtgccggggcactgaccatgtccaatgtggcgctggcctttctggagccaaccatttcgctgtggatggaggataacatgaccactgacaactggaagatcggcatggtctggctgcccgccttcttcccacacgtgctgggcgtggtcattacggtgaagatggcccgcaagtatccgcagcaccagtggctaatggctgccggtggattggccctggagggcttctcctgcttcatcataccattctgcagcggctacaagatgctcatgctgcccatctgtgtgatctgcttcggaattgccctaatagacacggctctactacccacactcggttatctggtggacgtgcgatatgtgtcggtgtacggtagtatctatgccatagcagatatatcctactcgatcgcctatgccgtagggcccattatcgccggcggagtggtggaggccattgggtttacggctctcaactttttgatagccttctcgaatctggcctatgtgcccgtgctgcgaaagctgcgcaacatctacgacttcaagccgttcgagaatgaggccaacatcctgatgcaggacccgcccaacaaagagtaccagacctatgtgatgcacgaccagaaacccgtcgagggtggcgtcaagaatcatctggagtacggccagcagtatcagcaggagcaggagacgaatctggatgaccagcagtacgagtaccagcagcagcagcagggataccagcaaggatatcagcaggatcagggctaccagccgggctatcaggagcagggcggcagctacgccccgcaaggtcagccccgtgtggccaatcccttccagcagcagcagcagcagcaacaacaacaacagcagcaggtccagagcagaggtcctgccgccccagcgaatccctttaggcaaggattttaa

SEQ ID NO: 27144 - protein, 532 aa, DROSOPHILA
MLYMVIVPIIPDYLREIGSFDDGPTPPPLRDNITGKIIPVHHDHHGQDSATGILFASKAIVQLMVNPFSGGLIDKIGYDLPMMIGLTIMFFSTAVFACGSSYSVLFFARSLQGAGSAFADTAGLAMIADRFTEENERSQALGIALAFISFGCLVAPPFGGALYQFAGKEVPFLILALVCLLDGLMLLLVMKPVKEAMKQSKDVQDQVIPIWRLLMDPYIAVCAGALTMSNVALAFLEPTISLWMEDNMTTDNWKIGMVWLPAFFPHVLGVVITVKMARKYPQHQWLMAAGGLALEGFSCFIIPFCSGYKMLMLPICVICFGIALIDTALLPTLGYLVDVRYVSVYGSIYAIADISYSIAYAVGPIIAGGVVEAIGFTALNFLIAFSNLAYVPVLRKLRNIYDFKPFENEANILMQDPPNKEYQTYVMHDQKPVEGGVKNHLEYGQQYQQEQETNLDDQQYEYQQQQQGYQQGYQQDQGYQPGYQEQGGSYAPQGQPRVANPFQQQQQQQQQQQQQVQSRGPAAPANPFRQGF

SEQ ID NO: 27145 - DNA, 5314 bp, DROSOPHILA
gtgcgaagaaagggtgggtcggtcgtttgcaagtcgaaagacttgcaaaagttttacaagaaaacttattgaggcttaactgtagagtgagacatagagagagtgagtgagagagggaacgtgggtgaggggggtggcgatagacacagatctggagcagagagtgggagtgggatagatttagcgaacgagcgagcaggcgatatttgagttgagttttagttgagagtttagttgagttaagagaggtctggcattcgcttacacatcaatgatatatgggttatatattaggttacacataggttcatacactacgttttcggattagtacgttcttagagcgagagagtgagagcatgagagaaagagagagggcgagcgatcgatgagcgttagtgagtgggttagtaaatatcgattatcgaggggcggatcgaggacttcgctttcaatggtgatggtggtgaggatagcaagagtcaggattctctctcgcacacacgcacacgcacgcaaagagagtttacacacacataaatgggtgcacagagaaaaaaaaaagctgcaactctccaaatggtcatctaaattttaacatattacaattaattttctagacatttttctgaacatttataaactaactccaacattatttgagatatgatcaaaaatattactataaatatttctatcccatttcatccctttctatcccgtattatacattaaaaaacgtcaatctaatatttttgatttttactacctttataactactttcaaaattctatgtacgtatacttttgtaacatcgaaaagaattttaaaatatatatcttacagatgggataaaagtattgaataatttgaaagtaacacaattattaattattattctaatttttgatatttttaagattatagaatattctaagcagctgatcttttgtaaatgaccaaatgtaggtgatatttttttctctgtgcagtggttagttagttaacgctagcaaaacgcggatacgcaattacggaacactgaaagtgggacttgtgggtggcaacgttcctcttgatgcgccgcagggagcagtagtaggccatcacggctcgcaggctcttccacttcgttgtctgctgctggccattggaggcattggcagtggcggctgcggatgcggatgccgaggaggtggcgaaggcgccactccgggactgatcctccgctgccacaagctcctcgggatgctcgctgatgaacgacgagagggtcttcatcgctggcaatggcctgggacccaccggcgtgctggcgctctggtcggaggacggactgttcacatggaggcgcacctggcgccgctgacgggcctggtgcggatgcggatacggatgcggatgcgtatgcggatgttgatgcggttgtgccggcgtcagtataagtctatccctctcagtataccttaaactagtggtggtggggcagccgcagtggtgcagttgcccactggttagcgacgagctgccggatctatatatatatatatgttcatgatccgatcgagcgatgcgagaagtggatactctgattataacatgcgaatttgcgaaggggatcgacccacggctgccactttttaatcaaattatttataacaaatgtagtttaaatatctatctctgtatatttttatactcattcttgttcaggatcaattaatcgatctgcccgtctcattttattccaaaaaatctatcgatatggcagaaaaactatgaaatttcgctaggtcgcactaggtaagtaacgggtatctgatagtcgggaaactcgactacagtattctctcttgtttttctttaattttatgataaatgttaagccatttgtaataaggcaatatttttgacaaagaagtgtttttatggttgtaagggcaagaatgtggttaaaattttgtaaaattcaaaacagcacgagaactcggtgaaatgaaagcgaattggattactttagaactgtttttcgggggaatgtgacccgggttatgctcttgattaaattgtttgtcctggcggcacattagcattctggaagtggcagccgtggctcagtgtggttgtggtggttcatggtttcatggtttcgttctggagagtggcgctgagtggattcgtgtgccaaaagattagctccgcccggcgagggcccattaggccaaagagttgtcaacttctgtcccccgggaaggcggttcgtcctcttacaaccgccttccgtcttccgtcgcctttgtttgcctgggtcgagttaattaatgaaatcatgtacacacacatacaccccgacagcctgacactgtgacacttcgacacacacacacacacacacacttacataggcagcaaggacatgggcaatcccggctaattgtcattgctaatttcctttttgccaccacaatggcacaataaacacaaacaaaagttgagtatgtgtgtgtgtgcgtgtgagcgagtgtgtctgtctgagtgacagctccattcaactgcaaaagcaagaaaaatttgaaaccacagtctcaacatttacttgtaatcgactgcctggacagtgcgtttcaaaactgtaaggcaagcgtacgcttctcagttttgtgtgctgtaataataattataaaatttgattatttcgattgaaaatacaagtattcatttaatcattttatcaattttgcttgacttaaacaagcagcttaatagcttatgaaaatttagtaagctctgttcgccgtacagcaatgaaacgcagtgtccctgtatcgagcttctttttgtctcatctaaaactcctgatttgattaaccaaaacccaaattggaaacttttgaagttccatccgcattcgcattcacattcccattcagatttcaaatcccatttcacaatgccaggcctttggtaccgaccgcaaggattcgcatggacgtagatggatattcgggtggcgaagaaggggacgacttgctaattggtaatttcatttaattgaatcgggcttattgttgctgcttttcattcttttgcattctgctcgtccttgtcttacggatacggatgccagtacggatgtgatgtcgcttacggttgatcaaatacagagtacaaaaagctgtcaaggcgagcgaagcccaacaaagtatgctacacatttatcaattacgcttacggcacgtgcctatgtatatgtagttactgcacgagtatgggtgttgtgtgttgcgttgtgtaagtgtagttgagtgttttttttttagtgtgtctatgtgtgtgtgtgtgtgtgggcgaactgcaggacaagcagcgccggattatgtttatgtgtttggtaacaacttggcacgatttgaataaatcatctttgttatgcttcttctcgttttttaccctgctttcaacttttattttacacatgtcggggtgtgtgcactgagcgaaaagtgcaccctaaaatcgggcttttgatacatttctaatgataattttctaattaactgacctgctcaacaacacttaactaaatgaaagcagctattatttatgcaagaagcaaagcaagtttacttaaacgaaaatccaatttccaattccttacgcacaaaacacccaatgcttcagttcactgctccccgactttagttgccatattttcgctcagtgcgtgggtgtgggtgttcaattgcttggtcagtgtgtgtgtgcgtgtgtggctgtgcgaatcgaacttaccgctggctgggactcttgctgtccgatgagtgcgccgcactgttgttgtcgtcatcgcggaccatcttgtggtggtgccgcttgtgatagccaccgtcgctgtgtccgccagcaccaccggatccgccggcaccgcctgctccgccgcctcctccgccaccggagatactggtgcccgtgggactgatgacatccgtgtcgctgttgcagtcgtgcacctgacgggccacatccttgacaaacttgcccgcttcgtgctcgtgcgcttccatctgcaaggatgataattggacggataagttggatgggcggcattaattgggcttattgcgattactgtggctgtacatgggtatatatgtatgtatatagatatctctatgccgacacccaagttgaggtgcctcatcaatcgcaattgagcgcatcttaattgctaattatgcaaattcaacccgaaacagggccaaatgtcaatgattgcagtacagcggcgggcaagaaggcagcacctccgacatgccctttatgggaatttctactgttctctatactagcttaataaaaaatataaacatttaaggaaatgatttccaacttatgttatgttttgcagatatatttagtgactgagctaaacttaaggttttcgccgataaatgtgtatatttggatgctactagtgcggccacaggtgtacatgtatggcagcagcgtcgacattcgaatctgtaactgcatctggcactgagcctttgccattttgcccacggtgcattttaaatcgaatgatgttgacgataataattaaactttgatttgattgccagtgacacgaaaacttggccaactcggagccttcaggtgggcgagagtttcccgggaaaactgaactgggaaatggatgggtgtggccttgtggcgattgaattgggtggcgcggaaccagtcatgagctctgaaaacttttgtcgaacgagcttttaaaatttaaatattgcattattgaatccactacgagttggtcgaatactaaaattgccttaaagtcaattttttatgcagcgtccacttttagcacaacggagaatttaataaattttatttaattgttaaacactgcgccacattgctgaattgtcaaaaatgaatcagtttaattggcatcgcaaaagttaaacaaaacaaagctttatctgtttattgaaacgaaaattatatctaactataaccatgtttaattaatgtcatgtataaaatataattgagaacgaaactccatagcaaatagttatgaaatcaaataatccttggaaaaagggaaattcaatatgtacttaagttgatgatgttcttggaaatcattttaaaattacataagcctattaccaaaattcaattaaatatgttaagcatgctaataccacagaaataagtatttacaggttgtgtgttatttaaaaaaaaaatcctgtccgtaatttatttaacacatcaagcttacgaaaaaaaactctatta

SEQ ID NO: 27146 - DNA, 816 bp, DROSOPHILA
atgtcggagatggaagcgcacgagcacgaagcgggcaagtttgtcaaggatgtggcccgtcaggtgcacgactgcaacagcgacacggatgtcatcagtcccacgggcaccagtatctccggtggcggaggaggcggcggagcaggcggtgccggcggatccggtggtgctggcggacacagcgacggtggctatcacaagcggcaccaccacaagatggtccgcgatgacgacaacaacagtgcggcgcactcatcggacagcaagagtcccagccagcgatccggcagctcgtcgctaaccagtgggcaactgcaccactgcggctgccccaccaccactagtttaaggtatactgagagggatagacttatactgacgccggcacaaccgcatcaacatccgcatacgcatccgcatccgtatccgcatccgcaccaggcccgtcagcggcgccaggtgcgcctccatgtgaacagtccgtcctccgaccagagcgccagcacgccggtgggtcccaggccattgccagcgatgaagaccctctcgtcgttcatcagcgagcatcccgaggagcttgtggcagcggaggatcagtcccggagtggcgccttcgccacctcctcggcatccgcatccgcagccgccactgccaatgcctccaatggccagcagcagacaacgaagtggaagagcctgcgagccgtgatggcctactactgctccctgcggcgcatcaagaggaacgttgccacccacaagtcccactttcagtgttccgtaattgcgtatccgcgttttgctagcgttaactaa

SEQ ID NO: 27147 - protein, 271 aa, DROSOPHILA
MSEMEAHEHEAGKFVKDVARQVHDCNSDTDVISPTGTSISGGGGGGGAGGAGGSGGAGGHSDGGYHKRHHHKMVRDDDNNSAAHSSDSKSPSQRSGSSSLTSGQLHHCGCPTTTSLRYTERDRLILTPAQPHQHPHTHPHPYPHPHQARQRRQVRLHVNSPSSDQSASTPVGPRPLPAMKTLSSFISEHPEELVAAEDQSRSGAFATSSASASAAATANASNGQQQTTKWKSLRAVMAYYCSLRRIKRNVATHKSHFQCSVIAYPRFASVN

SEQ ID NO: 27148 - DNA, 2615 bp, DROSOPHILA
aaggtgccgaagaacaaattaatgacaggaaaataccgctgcttaccatttggttttcaagtgtgcctaattaataataataataaaaggtttaccatacgtgttttatcaaattggtaggcctctttgttaagccccaagttatgccctttatgtgctagcttcaccctatccatatagtttgtatccaacaaaactatactcaataccgttcacatttgccccaatgtgcggcgtcgcgaacaaaacacaacatgttcgaacgcaggttcggttcgaggcccactgcgaacttggttcgatggcgagttcgagctcgaggcgagttgcagtctttggtttttatggtgcattataagttttacttaagttacatttcgaacaagagagaatgctatatctgagttccccgactatctgttacccgttactcagcttgtctgaatgcaaacgtgaaattccataatttgtcgatacatattggggaataaaataagacaaaattttaaaaatgatcaaaagtgtgggcgtgacagttttgggcggttttcgggcgttagagtgggcgtggcaaaacgttttatagcaaatcgatagaaatttacaagactaataaaactgtattataatattaaacttgcgctgcgtctatgtctcaagaatctgtatgcttaatctgaagcttctagcttttatagcttcttggaattaggcgctcatacggacataaccagaccgacttggctattgatcctgatcaagaatatatatacttcatatggtcggaaacgcttccttctgcgtgttacatacacttcaacaattctagtataaccttttactctacaagtaacgggtataaaaatgtatcaaaacaatagaaaaaaaattccaaaggagtgttttttatttataaagttaattctcaacaagacttgaagtcataccaaaatctaaagtttaaaggcgcttattatatataattaatgacctgcctgttcttagtcctcatccgaggaagtttcattctggatcttgtcggacttgcgcttttgcaactcctgctccacgtcggggtccttgaccaggtgctctaacttgatgtcggacaagttgggacagtcgcgcaccgggcataggatgccaatgttgtccttgatgatcattaaaaccgtttcgcggtcgtagatatggccgcaccttttgttgcgcacggggtgctttatcaatagcttggaccaggggatcgtggaacgggacgacctcgacgccgaagtcttccatgataaggtcctcatcaaggccggcgatattcttttgagcttctgattccaccgcattcatgttcgtgtcctcaagtgagttattgacatcgatgcgcatctgctccacagcttcggggcgctccttgcagacttcctcggacttctcgatggtgttgctagagtttttggttagcaacttctccccgtcatcgctggaattggacacgactgtgggtgggtgtgttttaaagatgttaaagattttaaagatgtatcggtttgtcacatggctcaccttctgccatttccttgaagagcttttggtgggatttcgggtccattttgatcataaattttattcacacgctttttaaattgcaaatccagaatatttagatcgaattgtcaagactgacgcttcggttaagctaggaccgataagttcgataggcagcatatcgaatcgttcttttgcgaactgttaataatcgtgagttagcgtcgatggaggaacgatggaatatggaacacagcgaagtttttatttatttattttttcgttatttatgggtgaatcctaaaagataaaaatgcaaaagtgttaagaaaagaaacggtaactatctatgtacgacataagtttatagaacattgaaaaatggactccccactctttggggaatatctccactcgcagagcgtgttccaaaatgcacgctaatgtctaatgtgttcgcgtggcagtttcgtgcggtttgtggcgttagagtgggcgtggcaacatgggcctgcgctgcgtctatatctccggaatctgcttgtatactccctgagatctcggcgttcatacggacatgaccagatcgactcggctattgatcctgatcaagaatggaatggaatggaaaagaatactttatatggtcggaaacgcttccttctgcctgttgcacacttttcaacgaatctacgagtgacggatataaatatgtttgaaaattaactaatataaaaaaccgaaaagttaatacaatgtttcatagaaatatagttccccatatatgagcccaatttggttcatataccctcgacgacaaaagctgcaaaagagtgttaataaaaatgcgacttaattattttgaaaacataactcgattctccactgaccgttgatttcggtcaacgaaatggaaattcgtgcaacaaaaagccaaaaattattggcggtcctacccaaatcaactggcgactggacgtgacccttaacgctgagggattatgatccaatttgtaactcgaaaagagtcgggaatgttaatcagctgccaattagctgtctgttcagcagat

SEQ ID NO: 27149 - DNA, 529 bp, DROSOPHILA
atgatcaaaatggacccgaaatcccaccaaaagctcttcaaggaaatggcagaagtcgtgtccaattccagcgatgacggggagaagttgctaaccaaaaactctagcaacaccatcgagaagtccgaggaagtctgcaaggagcgccccgaagctgtggagcagatgcgcatcgatgtcaataactcacttgaggacacgaacatgaatgcggtggaatcagaagctcaaaagaatatcgccggccttgatgaggaccttatcatggaagacttcggcgtcgaggtcgtcccgttccacgatcccctgcaccccgtgcgcaacaaaaggtgcggccatatctacgaccgcgaaacggttttaatgatcatcaaggacaacattggcatcctatgcccggtgcgcgactgtcccaacttgtccgacatcaagttagagcacctggtcaaggaccccgacgtggagcaggagttgcaaaagcgcaagtccgacaagatccagaatgaaacttcctcggatgaggactaag

SEQ ID NO: 27150 - protein, 175 aa, DROSOPHILA
MIKMDPKSHQKLFKEMAEVVSNSSDDGEKLLTKNSSNTIEKSEEVCKERPEAVEQMRIDVNNSLEDTNMNAVESEAQKNIAGLDEDLIMEDFGVEVVPFHDPLHPVRNKRCGHIYDRETVLMIIKDNIGILCPVRDCPNLSDIKLEHLVKDPDVEQELQKRKSDKIQNETSSDED

SEQ ID NO: 27151 - DNA, 14200 bp, DROSOPHILA
gatgacactcgcaaatgccttggcctcaaataaatttgcattaaatatttgatttaatttcatgtaaaatgcttacaaattaattgtacaatgtgaaacaaggccatgtatgtaaatgaagcgataaagctgctttcaaaattctttcttcttttcttcgttattttttatgatttattatttatgattaatgtctgcattctccttcagcattaggcgcgagtttaatgacttacggatcagcttacttataagtatatatatatatttttgttctttattaaaaaatgctagaaaacacaaaaatcattagttgtggatttttacttcattttttatttgattttttcttgtttgtttgtttttaagagtaatcttagttcttcttgttgttttatacaaaaaatcaacaaaatagtaaaactaaaactaaagcaaagaattaatttaaaaagggtcacatgaaaactaagaaagctgaataaatcgaaatgaagatagttgattcaaatcggaaattgcgtggaactcataagaaatttatttgcattgctgcgtctatataatcgttttcttcttaatttccctcactatatatgctttttaaatgtttcgttcgttaaaaacttaaagacacttggacaatgtttgaaactgctacgagttgttggttgataaattgttttgggtctcttcaaatttgatttacaattatcgattgatgttgattgcaattatacaattaatatgtaaacattgctgctagacttgttatttatttaatgcctggatgaatattaaaaccattcaaataatgcttaataaataaataaacatgtttatttgtggttgtttctcttgctagtgcgggttctttacttgtccttctcagactcggcagcggcctcgggcttcttgttgccaatggggatggccactcggatcctggaacacaaaagcgatttagaatatctttcttacggagattttaaatggttaaactcacttgtcggtgatttctgtcaatttgctgcgcaccagatccaagtgagtgtcgatcgattgcttgttgttctcgtagaccttgggcaaggtaaacagcgagacaaaggctgcacaaatatagaagataatcagttctgttttcgattggtttaagttaatcctccacttacccaagatgaccagagtcatgccattgaaccaggcacccacgtaggtgaagacccacagaatgacgccgaacttgatcgaatcgatgatatcctcaacaagaaacagacgcctcagctcggagatgaagccattgatatgtgccacagccacgccggcaatgttctgtaccttttcgtgcgacagcgtcagatccagctccaggtaatccctgatttcgtaaggagttacgttagttaaacttttttttttgttgggagacatcagtctacaatactcacttaaaggggtgaccctcgtttgtcttttgcacggcctgtgtcacagatttgtagattctgaaggcgacggtgccgaagagggttaggagcgacaagtaggcgaacacgctgatcaccgagaagctggagatggccgccagtgtgatcaggccagcgccgaagacaatgccggatttcttcacatcgcgccagtagataagggattccactggaaagaagagcaaatggatcaattagaatctgcttttgtccaccatacacatttgatttttcattcccaaattataaccctcataaactgtgaaaagagacgagatacgagtggaaaatgtggactgagaatccccaaatatacgaagcacacatacgttcagcgtctcgcacgcatctatgtacatatatcttttcagctggcggcaattatgcaatctatgagataaatagatgagatacagattcgagaactgtggcaccatctgccgaggtggtaattatcgttagcatttgttcaacggcatgcaactaagctctgatactataatatctgaacccaagcacccccttttctcagcccggttggttcactcacacaatctgttcgacatttttcgggtattcaagttttcgggttttccaacggatcgttcgcggtgctcctacgtttgacgttcgctgccaagttctacacactagagaagtattatttggcgtctgctggtcgggggcagaacgtatatgaaaatgtctagaagaagagggccaaattgtccggacccagccggaaaacaaaagagagccgtaaagagcatagctaccaagtggaaagagcgatggcaaaagagtgtttgagtggcgaacggatatggaaatggcagtcgcaaacgcttataaatcgattgtccagctcgtgccggaatgtatctcttggattcggattcagtcgctgacgtaaacacctctccatctgctataacttggccatcggatcgggcttcattcgctttcgtcggatttgccgataagaagtcactgccccgcggcgtctgggttaacccaattaagatatgtactaaaacaaacaaatcgtctataaatacacatctcaagtgttggaaataggggatttgccaactcattaagtggtcattagtttgaactgatttgttaggttgctcaggtagcaagctacttagggcaatccagtaaggtgctacccgcaaggaaatgatatatgaccaataattaacgacaagcatttattattttatagtaccattgggtttggccaacacattaatatgcttatgatagtatgcttgcttggagattaattgaaatctatatattaatcctcaataaaaatggtatataaatagtataaatggtatatcactttagaatacacctaaacaaatagcatatagatagatatacgaaaagtctgcaagctgggtaaactagtttcagattcgaattcgtctaagttgccaggccagactcgatctgaggggtatattatgtaaatatgggtgaaataaattagaaaggagacgcacaatagtgatgagatggcagcgtctgaggcccttagcttggtgaaaagactgagaaagctctctgatgggagaaagttacccgagtaccaattgaatcgaagagttcgttacaattgcaactggaatcccgctgaagatttctttggttggaactggtttggtttcgttcgccttgaaacccgttttggccgaaagtgaagtgcagcctcatcgggacagcagaacacgaatgtagtgatagaaaataattaccgaaaagaaggcagataagagcgactggcactgataacgtatatcaagtacctgctatttagacacttgtttaataattcaatttaaaattgccaatgcaagctggatttatgatgatgggcgagcattttctgttgattgctggttgccaagcactcagttcacaacgtggcacaaaatgaatatatatgaaattagcactgtgtctagaatggaagcgaaaaaaaatttgcatagcgaaggctggatttcattggatagtgatttttggttatgactttcattgaacattttagccacgttggcgctgatgatattccgctgctgacgttggcagcaatcactgctccgctccataaatacattttattccacgaccccccgaagataagaccctcgttgtgttgctattgttgttttcatgtgggctttaagaacctagagtggtcaacgtggaccagcagccaggtgatagtgaaagcggagatagctccctgatggtttcccaattggtattacctggtccgcgttctggaagcggctgaaaattgccattggagttgttgcgtgagtagcgtttgctgccgcctgccatttttttgtgtattttaaaaacagttagcttggcgccaaaatgtatgcaaagcgggctggactttcgcgtgtctaggcttaattacagcgataaagttagttagttggctagtcacgcacacacacaaccactggcacacgaatgggacgattcggccgaccgtctgaatcgagcgcagcaaaagaactggaagaagtttgagcacaaattaaaccaacaagcctccaatttgccgtcgcatatggggaactgcttggatagagcgagcgggacagcgattgtagcgggtgggggagcaagagaaaggcagagcgagagggcgcgagagtggcggcaaacaagttttttagattcaaaaagcagtgggagccccatcaagcagtgcacagtgggcacgccagcaatccaatcgattaatggactacatatgcaatttaatgtttccaataaacaccattaaagtctataaaatgtgtattcgttcttgatggtagatttgttttttcataaatcagaagattttgttatatccgcttacaaaccaatcaagacaacccactgtgcggtagaagagagctctccattggagagcgggagagagcaagagagacgatccgcattgaaagtaaaagataaggcgcagtaacaacaacaaatccggcatgggggccgcaaggggagcaagggctgtacgtatgtacatatgtcagcaaacgtgtcaacctcaaccacgaacttggactcgcgattcggctgtgtggagccgaagattggagattggacttacatacgtagtgttacgttgagtgacgtagtgggtggggttttgcggttgaatcatgaatccgaagcgtgaccaacaatggcgaaatgcgggaaatgccaacacatacgatgggcctaaatcaataaattaaatctgcactcacatcgcctagcatttgtactgcttatcggggctcaattgggttcaatggactgcttgtgtcagtttgacaaccactgtgcgtggcaataaccaaagccgcgctcaaatgaaaacgcaataggcgggaaaactgcgtactggcgaaatgcgaaaaagcgttagttagtgacatcatcattggcaaacacttaaatccaaccccaatcacatctaacgcttttgcgttgctttccaacatttttatttggcgcgtttgaatgagtaagctgtgtttcaaatgatatcatagcaatgctcgctgacataattcctaaatgcgcgacaacaaacgtacatatgtacatagatgcaattattgtgtgcacctgacattgtcagaaagtctgcagaattgcataaggcaattatagaatagcagcgcattgaagcgaacagaaaataataaaataacccagaaagtacaataataatatgcaaaaaaaaattcaaggtttttttttggtatatatatatccactcacgcacgcaccccccacttgaaaccgcaaaaaagttccatgtttggcgagccactttggcttatcaacccaagttgcccagggggaagtgctgataatagaaaattcttctgagactagaaattgttttaattgtttcgcacagtaatcataaatgaaaaattgtcaccattgatacagcttttctatgaacttattgataacaagttatcaatgataccaaaaatattcacgtaactcctatctaatcgaatattaaacaagtggacttattagccctctacgccaaaattactctttccaatttttccttaagtcctcaacatttttcctaagacactaaaaagaatatttataaataaattatagctgcatttagagagaggggctgatttgaaaagagaggaaaagagagagcacgaggcgaggcgagaaataaaagaaatttccccaagggaaattccgtttcattcgattttcagctggccatgcggtcggccctcatatctagccaaaccctatatgtacatttatatgaacatataataatggaattcttccgcaacaattttcatttaattttacttacacgactcgcggttcaggggcaagtctttgagttcgcccaacgattgcagcagaccctgcagctgttccagaccagcagccatcgtatcttattgtgttgggattgactggattaactgagtatatacggttttagtaatatcactaaagcttttcgcccgactgcaagtggaagacaaaattggaaatgtagcgaaagttcggacgactttttcgcgcggttcacggatcgaggaaatgcgaataatgcaaccgcgggcattaacattagccaactgaacgatcgcgggccagagccgaagacgatcggatccgacctagacgaaagatatagaacccggccgagagttcctcgcacccgctggcggaactgatatggaaagtgccagccagtcgacggggccagataataggataggattaatattattatattatttcattcaccgctgatttatttgctttgcgacgataaccgcattggctaggtaggtgcacgtcttgatattgaatgtgatacagtggtcgctggctatgagagattagttggcttctttaggttactaaaatggccaatagagcagagtgtaccaaataataggtgtttgaaagtaggcaatgatagttagttcctatacagaattatctttctggaactttacactttctagtgaccactgtatccacatttgcatatattgtcagcgttagggcacctatccaagttatataattagaaaagtatccgcacaaaaaacacgaaaaattccgcgagtttttctggggcgggggcacacagattctgaatcggaataatgtcgaatgctaaatgctgcgacgacaatgacagaggcgcggatacgtgttttctgtcagctgcaagtgcaggtcattctacgagttcaaacagctgacacaatccgtggcattcgcagtgtagaaagggtatcctcatcccgcacagacactggcacacacttttaaccaaacgcacgggcacgcagagtgcggaaagaaccatttaccgatcttgttttcgtggtcgcgttctcgtgtttgttttctcgatctcgatctcgatctggacctagatcccgactctggggcaatgtgacgttgtcaaagtccgtacatcaactaaactacaattaatttcagatgcgctcagctcgtcgcagggcgaagcgaatacacacatgcccacacgaacacaagcgcacacacacacacgctgaaattacacacgcaggtacccaacgcagagaacagctgcgagcaatgaaataggttcacttttgtcaagtaaatgtaacacgatgaaaaaccatatgggattttatgtttagattaaaaggcaatggagattctttctttctgtctcagcttcatatgtttaaaaataattacttttataatttcccccacattttacaaaacatttaaaagctcttcaataaatccacaatacgtgaaactaattccttatccgaagatcactaacatcttggcccttactgtaggcaaataagggaagaggaaagggccaatggcgaatttcggaaagctaggtagccgactgattttctcccgaacatgtctctgcacgccacgatcaccgggaacaggtaaaaggaatcacagcgagcgaatgtccaggggagaagatggaagagcaaaaggaagctgaaccgaatcggttaacccgatctataggtcatacaaatgcgaatcggttataatttacagctacagtgaaggtaaacaaattgtcaagatgttgggttaaagtaggggtagtctatactatgcatttatagagattccgcagcttacaattgcttttaatgtacttaaaatctagccaattattgtattgatcgctatggatttaacatatcgagtgcacactgttccaatactctgttggtccccagttcaactgcttgaccgcccagtgcagcctacatcgcaatgtttaaatgttaaaccgcacggctagcagatcaacaccaacaacagcaacaccaacccaaagataatgccaacgacagcaacaaatgacagcgaatggctgaaatacttagctaaaatgctaaaattagcaagcaactgtgagtttgaacattgacgccggccgggtagtcagcatccaaagggggtgcgaacgggacagaacgagattgatgagagcagtaatgaatgagattcaaggttaacgatttcgcgccttgaagaagctgctcactgcttattttcaattgtgagctgcttgcagcaagcagtgcgaactgcttacacaaaagcgctcgaaatttaaaatttagaatgtacctattttcactttttgggatctgacgtcagcatcgataaaaccaaaagctctgggtgctcatgacttggcgacttaacgacgacccttatcttaaatttctaattgcagaccagttatcgcttgccaacgaattaagtcatttctactggcttatcattgttatttgtgcggtttttctaattttgctttttgcacttgaatgcaaatttttcgcatatataaataatcttttttttcggcgctgaattaacaaaggccagaaaaatgccgtcgatgatctaatcgatttcgcctggaagtataaaattaaatatgtatacagacaacaagaaaacttgtcgtccgcggcacgtagcatttctctttttggccgttactcattcgagttcttaagacagttcaagaatttaatgaaataaatacctaaaaaccgttggtttagatagttatatctttaaaattaataccaatgtagtcatggctaaaaactgaaatcatagtcatttcgatatttaaatacgaaatattcataatatatcaaaatttcaccacttcgaatggaaagcacaaactagaacaatggatgactaatcatgattctgaacgctagactggctgcgaaaacaccaatgtctaattaacagttttacattcaccgcccgcttggcttttctctgctggagaatgctaatgtgggccgacttccgactgactgcctcgtttattcaagtattcgagtgcccacagtgggcagtccacggcgagcggcacttaagctcctaaccatgtccaaattgggcaccgcactcgggctgaaagcccggagaaatccatcagcgccacaggttcatgtctagccactcgtgcaaattgtattttggccaatagaggagaatcatgtggaaaagaaggggaagcagatttttgcaaattttggaagtggctgggtaatgaaatattgatattctagagagcttgctgcttttcttatagtatatgtcagtaatatacatatgtacacttaaacttaaaccatgatgaatagctagacaataaatatttacgacatctagatgcaataatgagttagtagcgatgtaaaattaattggcccattaaactattttagtttgacttaagtagaaaatcaaggcaccgattttctttatactgttagtagatttattgatagcaattcgagattctgagcatcacaaatgtaataaaaaagcgatttaattcaaagccaaagtccagcctttgaagtgactaaggaatgcacagtccgagtgcatggttaatgagtgatttttaataataactaaagtcgtcagacggcgaccaaattaaatgcgaattagtcataacaaacgcaaataatttttaataaaaagcggtgcactaagtgagtataagtacatatgtacacagttttatacagacaaatacatactagtacctatagaaagtgcatggagcgttagactgagctcagattgcatgcgaggcctttgccccccagttttgtggtggggaaaacggcagacgccccatatcagttcgagattttcagtggtaaagtgtttttgtgaatatgcaacactagaggagcttctcaaaatcgaaaattttaaatgtcctacaactaagtatgaatttaaaagaaaatgtttggcatttgctgtataacttgactatctttcacaagtcaaaatatagttctggttaagtggttctactgtagtggacggcactgtgccgtttggcggtattgctgggttggcttagcatgcgatccgattacggttaccgctcaccgcatcagtgcaaatcgtttggctgtcgggtaactgaactatatgaaaacgacggctaattgcaatgcgactggacttgcaaccgaatatatgaaaagaatggcagcgaggggtgggggctgcaaagtgagggggcgtggcagcaaccaccatgagcattacagaaaattcaaattatttactatgtaccctccaggtgaaagctgcaccaaacatgaaactaaactttacagtgtagttacaaagaagaaaatgttgcttaaatttatatatgtatttcagtaataaattcatcaataagaggagaggtttaaatacgtactatacatatgtacatatatatgcgtacagttaaaacgttttgaatgttatccgcatcggggcatcccccaatacatgtaatattgccctagaaaagtacagagacaatgcagagtggagcactcgaaaggatatgcggaataatgtggcatactttctggggcactgcttgcagcaaaggaatatgaaaacaacaacagcaacagcaacagcgggagcacaaagcttgtcatttgtacttgtgctcgtaggctcttaaccaaatgggggagcaaaacaaagccaacagcaataataacaacaacgaaaaaggacaaaaaagaacaatgggggtggctcgatgacatcatcatcataatcatataaaacgcatattgacaatcgtttcgtaggatttgtacagttacagttttcagcgcacaggttgggcggtcaagcagcagagtcgcgggcacagtttggtctgcactggacttaccttgcgggtgcaaacgttcgggcttaaaccaggcatctgcaaataggcgattgatatattgattttcgttagtttagcggttagtcgaggtgcgaaaaggtaatgaaaacaggagggataggagatggcgtgcaaaacaaatgctcagtgcacaagcagttagtcagagttaaggaccaagcagttaaagcagtactacaatttaaattttaaagcaaaatcagttaaaatacacaaaagcgttgaaaaccacttgtacaacacagtatatacaaatatattatatggacaaattatacaatccttaagcataaaactaccacccaggccaccgttgacagaggttagttttgttgtttttccaacttatttcacaaatgcggggtgagtttcgtttttttttttttggggaatttcgtttttcctttttcttttaacttactgggatcgagtatggagcaaatcaatgggcgctgcttgcacacgccattctgaccggtttcaccaaatgcggacattatgctggttttaatttgggttttgctttttgcttagcacacttcttcgttagcactacgagttatcctttttattggacagtaacttttccgttatattcgattgttttcgttgagcaaagcgcagcgcagaaagagagcggagagaacgaacgggtattacgacgttaaggtattacgctataagaattttccacttccgtgtggcgacctcacgacgcgtatagagactgaaacgtattgggagaagctttgccgcgaaaagcaggccgggcgttacccccgtcccatcccccctgtaaaggacaaccctaggctcagagcggcggcgccgagagagagagaggatgtctaaactgacccccgctgcgcacactacaaactacagtggagcttcctaacttactgacaaagcgagtccctggaagtgttttcttcaaaaatgtatgcaaaagaattttttaaaaagcttaaaatcgtaagaaattgagatcttttgttataaaaagtttttgaattagtttgttttgaggatttgattagtctctagcatgtgtccactgtaatcgcccggcagggctgaaggcggtgcggattcaatgagagggcagccgcaagtctcgccaagttgagcaaccgtgcttagccctgaactcggtggctcggcagtagcatttgatgtgccgccgagtttggggaaagctcgctagctgggggccatcgatttcacctattgcagctgacccgctgcttggtgagcggagagtttttccgggcggagacttttcttggctttccgcgcagcgcatgcgttggcttccgcaggactcttgttgttttcgttcgacacccaacgagtgggccggaaattaccagacgctgcaacttttgggtgcggtgggtgcagatgctgttgctatcgcccgcacacagcccaaccgccagcttgccctttgaccccgccctgcagttgcgtgcggcgcgagaattagatgggaaatcaatcaaatgggaatcggaaagcaacgcatttttctggccattggttgtctgggcaatcattgctatgttttgctaaattttatacttttggccaactttcgaccaagttatgagacaaatatttgacgcattccacatgagatgtgctgtcaaaatggcaaacttctttgacggtttagcacagttctgtccgaatgaaatcgatatgttggcaggagaatgaaatacggaagcatgttttccgaaacaatttcccagggaaaattataccaaagctttcgcactacgttctttgatactgataaatttgacctactttataagtaggcgaaacctgtgacaatatatggaattcctttgaaaaatcctatactatataaaaacctatactgcggtaaaaaggtaaaatgcaaccaaaaatgatacatcggtttatttttcatcaaaagagaaaatcacttattcgaaataatccacatatattgtcgagaagagtagccttgtccatattggtttttaggttaaatttgacccacgcaccataactttcttaatataggcaactctcgtctggttggaaacatgtgttctttttgtggccccaaaaaaaagcgattcccccacttaatcgatcactggccgcgtgggagatgcaattaaccaaaaataattaaaaaaaaaaaaacacacacattgtttactcggctccactcttcggatttccgcctttgtttaccgatcaacacaacgcacaagtaaaattaaaataaattctatatctgcggtcaggatggtattgttatatgtagttataatacacaaatgtgtaaagttaaaatgtgacgatatcgcgggagctgtcagtgaactacagttgattgcaactatgaccgttggcgataatgggggtgcgataaggtggatgctaaacgagaggggaagatgcaattgagaaatccgtttcggatgcgagagtccaaagcgaaatcaatggcaaattgaaagacaaaagcgcagcgaaagaacaaaagaacaaggcaaatatgtgcgctacagctacagctggtagtggaataacaaaaatagccgcataatcgcactaaaaggatggatgcaacccagactggcagacagaggcgtcaatggaaatcactaattggaaaatatttttccgcagttgctggtcgcctgctgcatgccgtgaaaaactcgcattcgccgcgagggagacgagaattgaattattcgctggccaaattagcgcactgtcgaaaggtagtagaaatgggaatggaaacgtgagattgccaaatagtagcagagattactacgcaacaataaattactttgccgcaaattgctttaatggacacgaagctgaaacacagaaaacacaaaaaaaagaatcgcaatgaaataaagcgaaatatgatgaacggacatgtgtacgtcaatggtgggtacactctatatatatatacatatacatatattatatatagaccaatatagagcttttggaatggagaagctactgagctactgagcagctgattcacgccggttaagtatctcggtaatggtgaaaccagcttcgagaatgttgccccctttttcgtatctactatacccggcgtgatgagttgcccagttgggattagttatgcaatttaccttcttttcacctctgtctgctcatctaaggtttgcctatctgttttacgattcaccttcctatctatttaattgtttctgtttgctttgttggaaacaataaacgttaggagcatcaaacggttaataaataatatccatttcatattcataatatatttgattat

SEQ ID NO: 27152 - DNA, 875 bp, DROSOPHILA
acattttaactttacacatttgtgtattataactacatataacaataccatcctgaccgcagatatagaatttattttaattttacttgtgcgttgtgttgatcggtaaacaaaggcggaaatccgaagagtggagccgagtaaacaatttactgtccaataaaaaggataactcgtagtgctaacgaagaagtgtgctaagcaaaaagcaaaacccaaattaaaaccagcataatgtccgcatttggtgaaaccggtcagaatggcgtgtgcaagcagcgcccattgatttgctccatactcgatcccaatgcctggtttaagcccgaacgtttgcacccgcaagtggaatcccttatctactggcgcgatgtgaagaaatccggcattgtcttcggcgctggcctgatcacactggcggccatctccagcttctcggtgatcagcgtgttcgcctacttgtcgctcctaaccctcttcggcaccgtcgccttcagaatctacaaatctgtgacacaggccgtgcaaaagacaaacgagggtcacccctttaaggattacctggagctggatctgacgctgtcgcacgaaaaggtacagaacattgccggcgtggctgtggcacatatcaatggcttcatctccgagctgaggcgtctgtttcttgttgaggatatcatcgattcgatcaagttcggcgtcattctgtgggtcttcacctacgtgggtgcctggttcaatggcatgactctggtcatcttggcctttgtctcgctgtttaccttgcccaaggtctacgagaacaacaagcaatcgatcgacactcacttggatctggtgcgcagcaaattgacagaaatcaccgacaagtgagt

SEQ ID NO: 27153 - protein, 212 aa, DROSOPHILA
MSAFGETGQNGVCKQRPLICSILDPNAWFKPERLHPQVESLIYWRDVKKSGIVFGAGLITLAAISSFSVISVFAYLSLLTLFGTVAFRIYKSVTQAVQKTNEGHPFKDYLELDLTLSHEKVQNIAGVAVAHINGFISELRRLFLVEDIIDSIKFGVILWVFTYVGAWFNGMTLVILAFVSLFTLPKVYENNKQSIDTHLDLVRSKLTEITDK

SEQ ID NO: 27154 - DNA, 1742 bp, DROSOPHILA
aggagcggagggcagcaacatcggcatagacaccggggtagttagcggcagcacatccgtatccccaggagacaacaccgacgaggactccgccggagaccagtgggccaccggagtcaccctggcacgagtccttgccgctggcaaaagcgcagatcatggagctcttgatctggtttccgtagccataggaggaagaagagcaccggctctggctgacgatgttcacgttgacataacgcagctgggagggaatggagctggagccagaggactcggtaccccatccggagacggaggcagcagcaccgttggcggggttggagctagccagaccgatggccttgatggtggagctgaagctcagagaggagctcagatggagcacagcgatgtcgttgaccatggtgttggcgttgtaaccctcgtggttcttgaaagaggaaaccttggcgacgacgccaccagagctccagtagctggatccggcgcggatctgcagggaggaggcggacacggactgcaggcagtgagcggcggtcacgatcaccctggcggagtagatggatccaccgcaggagtggctgccactgcgctgcagggagatctgccaggggaagctgctgatggtggtagcagtaccgccgacaatgcggccatccaactggggcaggagaccctcggggatggtgcctcccagggcgcaggctacagccgacaacaggatcaggaacttcagcatggtgcgattgaatggatactcttcgaaccgaaaagtgtgcttatatcgggggtcactatctcgggaggcgtttaatcaatggacaagtgagattcctcgtggttaaagtggataacgatgtggagtggtcgtcgtgtgataagctgattatttctaaatatcaccgcctatatcgatggtgaaaatgacgcaacaattatgctgaagttgcagctgtcaatcaagtggagatatttgccgcggggactgtataaaaggggttttgatccgcgaatcagcatacaaacgattaaaatgttgaaattcgcggtacttctttccgttttggcctgcgccttggctggcaccattcccgatggcctgctgccccagttggatggtcgtatcgtcggtggttatgagaccagcatcgacgcccatccctaccaggtgtccttgcagcgctatggatcacacttctgcggtggatccatctactcccacgacattgtgatcaccgccgctcactgcctgcagtcgattgaggccaaggacctgaagattcgtgtgggcagcacctactggcgctccggcggcagtgtccactccgttcgctccttccgcaaccacgagggctacaactcccgcaccatggtcaacgacattgctattattcgcatcgagtccgatctgagcttccgctccagcattcgcgagatccgtattgccgactccaaccctcgtgagggcgccaccgccgtggtttccggctggggcaccaccgagtccggtggcagcaccattcccgatcatctgctggccgttgatctggagatcatcgatgtgtcgcgttgccgctcggatgagttcggatacggaaagaagatcaaggacaccatgctctgcgcctacgccccacacaaggatgcctgccagggtgactccggtggcccacttgtctccggagaccgccttgtcggtgttgtgtcctggggctatggatgcggtgatgtgaggtatc

SEQ ID NO: 27155 - DNA, 742 bp, DROSOPHILA
atgctgaagttcctgatcctgttgtcggctgtagcctgcgccctgggaggcaccatccccgagggtctcctgccccagttggatggccgcattgtcggcggtactgctaccaccatcagcagcttcccctggcagatctccctgcagcgcagtggcagccactcctgcggtggatccatctactccgccagggtgatcgtgaccgccgctcactgcctgcagtccgtgtccgcctcctccctgcagatccgcgccggatccagctactggagctctggtggcgtcgtcgccaaggtttcctctttcaagaaccacgagggttacaacgccaacaccatggtcaacgacatcgctgtgctccatctgagctcctctctgagcttcagctccaccatcaaggccatcggtctggctagctccaaccccgccaacggtgctgctgcctccgtctccggatggggtaccgagtcctctggctccagctccattccctcccagctgcgttatgtcaacgtgaacatcgtcagccagagccggtgctcttcttcctcctatggctacggaaaccagatcaagagctccatgatctgcgcttttgccagcggcaaggactcgtgccagggtgactccggtggcccactggtctccggcggagtcctcgtcggtgttgtctcctggggatacggatgtgctgccgctaactaccccggtgtctatgccgatgttgctgccctccgctcct

SEQ ID NO: 27156 - protein, 247 aa, DROSOPHILA
MLKFLILLSAVACALGGTIPEGLLPQLDGRIVGGTATTISSFPWQISLQRSGSHSCGGSIYSARVIVTAAHCLQSVSASSLQIRAGSSYWSSGGVVAKVSSFKNHEGYNANTMVNDIAVLHLSSSLSFSSTIKAIGLASSNPANGAAASVSGWGTESSGSSSIPSQLRYVNVNIVSQSRCSSSSYGYGNQIKSSMICAFASGKDSCQGDSGGPLVSGGVLVGVVSWGYGCAAANYPGVYADVAALRS

SEQ ID NO: 27157 - DNA, 5988 bp, DROSOPHILA
agctcagctatttattagtgaaatgtcaaaggtcaaatgtctttctcatatgtgtgtgtatatatttaattctcattttatcgtaaattaaacatcataaatccttataatgctgttatagctcgttcttttgtttgttgtggttgctgatgggcttgaatttgttggttttcctaatttttcagtatgtcgcatgcaacaggttccgacaatagattgctagttagcattcgtgtttaatttgcgtttacttataagataggttctcattcagttttatataaaaatagttgttttcttgtttatttacgcttaattaaatgttgctgctgccatttgctcttcctgggattaaatactttgcgctgcctggcggcggaaaattaaaagttaacacaaaaacagaaaacatgaatggaaaacatacaaaattcacaatggcccaagtacaagagcatacgtacattcatactattattttgtttatttttttgtggatttgcattttaagtagctgggttttaaattcatttgcttaacataagatacatatacaattgtttaaagcgcgtttttaaatgcaagtgtaacacaaaaataataatcgcatgcaaagtatgtgttaaataataattagaaagtagcagcagcaatggatttttcgcggtttttccgggttggtttgctttttattgggagggcttgggtggaaattgcctgtttctgtaatcagagtcggacttttcctttgctagcatttcttctcttctcgtttaacattgcacaagtttcgattgttatcattatcttgctttagttatgtgtatataatttcttaaagcgttccatagttcttcattctcataattgttggttctcgctactataaaatgttaaatgttgctgttgtggggcatgctttaggtttacttttttctcgccttttttttttgttacattaactttaaacttaatagattgttagagttgtttcttttttactgttgctgttcttttggaagttggacaaactctgcggttgcttgtcagtttatcgtcgttgttggcctcctcttccctttccgcatctgtttcgacattaaatgtcctgcaaaaagacaaacgatatgtttagaaatctagttattatagaccagcaacacaattccttacctattctccgtttgaggcatgctgctgcagggttaggatcagctgctccttctgctcgacgatgccacgccagtgctcgtcctgctcacgagcacgctcttccaagtccatcaatgtgtttgtctgttcgtaagattttattgtcattggataggttataaattactatagggcaaaagtaattaccgtcttggtgaccagctgggtgagcttgtcgttgcactcccgcagctgcaggttctgtttgtgcagctcctgctgctcggcggcggaggaggattggctattcgaactactattattgctactaatattgttgtgggtgctattgtggttgctactgctactgttgcttgattgtgtggacttatgactactgctgctctgcttctcggacttctccgcgtcgagcttctgccgcagcttatcctgttgctgcttgacatgggtggccaggacctgttccagccactggtcaaaggatgcttgcagggcatttcccgactgcgctttcacagcgtcgggataaaggcgctggtagagatcccggatcctctgctgctcgctcttggctgaactggcactacccccgccattggcggccactgccttctgttgctgcagctgcagctctttgtgttgttgctgcaaagattaatgcatacaattagtttacaatgatttagactctacgaattttcagatggaatcatataggcaagcagaagaagctgacaaagatcatgcacttacgcctacggactgcgctgaatttgttttcgtcttagctgttaatgcttcggcattttgcaacgcttcaatcaacttccaatttttcatacgcacgtcctgacgaaacacgaatacgtggcaattagtaaaggattcaggaaaagcaagaaggatgcagatgcaacgggcaggacgaacgacggcataacgactcaaatgcgacgcgattacatatagttgggctcaaattggtttgaaatccttttcaattcaattatccgcattcattattaatcttcatgcataagtcttgacatatatatgtatcaatttcagtgattacaaagtaaagtgcaataaagtttaaagtaggtggtataaaatagggaatgtaatgggaatgcaacacaaaaagaaaagttttttaatatatatttctagttatagagttcatctctatactcacattatttttctcccgctgctcctggagctcctgttgcagatgttgctccttagcctgcagctgctcggcccgctgttgagcctcctggagctgcgactgcagagcgttggcttgcttctgctgctgggcgtgggcatccgtcagcgagccgacctgcgagcgaagagcactcagctcctgctgcttctgggccagcgcttcggtctgaacctgggcctgctccgactgggcggcggtggcctgaaccgcgctgttggcggcttgggtgagctgttggctgagcgcaacgttgcgagcctctaggacggacaagttctgtcgcagctcctgcaactcggcggcgtggacgcgctgcagctccgactgagtctgttgaacagcgctcagctcctgcttgaggtcggcgttctccgcctccagctgcttgcgctgctctagctcaaagatgctattgttctggcgcgcttccagctcttcgcgttgcagctccagggcttgcagctgctgagcctgctgctgaatcacctcgttcttctgctgggtctctgcattaacgaatgcggtcatttccgccaggcacttttccttgtgtgcgagatcctgttgcaaatgttgcaactgaaccagatcctgcgaattggcttgcttctccctccgaagggtctaaaacaaagaattaatgatttgtaacgaatttgaatataggctatgtttgaaaatattcttataaatctcagaagcttttcttaccgtaagctgttgacgctcaagcgtcaacttgtcattcagactggacagctcctggttgagggcggctagctcctgctccttgccttgcaacttatcgatataagcctggtttcgggcatgcatctgggcgcgttctgtgttaacctcttggcgtagttcgcgaagcttagcctgaattccgatggaggcctcctgctcctcggccaacagcttttccttctcttccagctgacgcttgagtttctggcagatgtcatccgaccactcagagtgcgaagcgggcatatcctgttgcttgtttagcagatagtcgatgagtatctgaatctctgagcgatttagctcggcacgagaaaatacgttcatcagagcgttgacaccaatggtctggttctggtgatcggccagtttatccaaagcatgagccaaatccttacccgttagggtttccttttgattctgtttcttgttttgctgctgctgcttggttttgttgttggcctggttgtgttgcgttttgggtgagccattctgctgctgctgctgttgcttgaggatctgcttggtcactacgggtgcctctgtttcgacagctacgaccttctccttcttggacacattgcctccggcgatctttttctgactttgctgcttgttgttgttgtcttctttgcgttccttttgctcttgcttcttcagctccaccacatccttggggatcttggtttcaaaattattcaaagttggtgtctcctcggcgttagctgcaggcttaacagcaacagtttcgttcttgttgaccaggattccggctgtcttgttgttggctccgttacgtttatccttctttccctttttgccagccccagaaggttggttctccttctcagccacgctactgggtcgtcgctgatcagtgaggacctctgcatcgggttcaaattcaacatgctgcttggagagaccgggttcctcgccagccacggagccctgaccctccgactgaccatcggagtagtcttcggcttcctctggttccggctcgttgttcacatccctctgctgttcccgctgacgttgcttcttttcgcgcttaagttccttcttcttgggcttcttggtagcggcaccaccggccgccttgtagagattggcgctcagggcacgcttctcggctaccacctcctcaaaagtcttgcgccggaagatcttgttgatgaacaggaacgagagcagcgaggcgctgaccacacaaccgatgacgatcagtatgtggaagtccatatttgcatatctttccggtttagccgtggatttttctcagggatctcctttgcgaatgctgttgaataaatagagagtttctcgttactattttgtattttagcaatattagaaggtaaatatttctaggtatttacatttgcaggtgtaaatacatatgaaaaaattaaacaataatgttcgatttcatctaaaaggggaagcccggaattacggccacgttttctccgtttggtttccaaggaaagcaaccaacaaagcaaaaaataatctcaagtgtggaaatgttagaaatgctttttagggtcactcgtgtatatatttttgctatcaaactcatttcgtagcattatcagcttttttcagcttgagaaccactacaatgtagtataaactgatgacgtgggggtcaaaaatcgaaaaacgccgaagaaatgcccactaaaaacgacagatcaacgacactacattcaatggcaattacgctttatatagccggattgtttgagttgaacgtgcttatcggtttaccggccggaaaatggttcagagcgcaacaacacaagttctccttttgtatgaacacgttgttattgctgcagttgactgggcttgctggacgttatattaataaaaacgctgtgcggttgataatttcattgttgttgttgctctgctgagataaaaaaaatgcactgctgaatggctcaatattcctggtattccggattatacagctcaactcgccaataaatccccatgaatttcaaatttaggcaaaaaggtcatttgaatttcatttggcgcaggaagggcgataagaaatctcagctggaattatcgattcctcaaagaactcagcgattaagacggaaaaatgtattccgggcagaagtggggagccgacaaagtcacaaagaataaaattagcttatgaaacagcagctgctgggcagccttgaacgaaagttggtagacatttccagcacccaaaggtgttgacgcagattgaaaggaactcacataacaatccgaaaaaagaataacaatttaaaataactcaaagtctagattctgacgcacacgtatgcaaatttgccaattcgcaaaaaaaatcaacactgtttaatctattttcgttaaactccacgagtctcttccaatggacacgatgcgaatgccaaaggctagtgaaaagattcgcagcagagctgggctcgcaattcgagatctctcctcagctctctacacttgaagcaattcccaagatcgactaaatatttatttttgaataggttattttctggatgttttctgtaagtgcaagttacgttttatgagagcaagattttattgaagaatcagcaaacaaatttgcaataagtcttgagtttaaaatatgcgataacattacttgtatcatcaaaataaaatacgtttatatatttactccgcccagttatctttgaaactttaaaataatatatatttgtagtttgtacatttttgaaataaaaaatactaacattactaacagaacgttttattctcagtgtgcttgcgctccgtggcacttttctctc

SEQ ID NO: 27158 - DNA, 2747 bp, DROSOPHILA
ttcatacaaaaggagaacttgtgttgttgcgctctgaaccattttccggccgcattcgcaaaggagatccctgagaaaaatccacggctaaaccggaaagatatgcaaatatggacttccacatactgatcgtcatcggttgtgtggtcagcgcctcgctgctctcgttcctgttcatcaacaagatcttccggcgcaagacttttgaggaggtggtagccgagaagcgtgccctgagcgccaatctctacaaggcggccggtggtgccgctaccaagaagcccaagaagaaggaacttaagcgcgaaaagaagcaacgtcagcgggaacagcagagggatgtgaacaacgagccggaaccagaggaagccgaagactactccgatggtcagtcggagggtcagggctccgtggctggcgaggaacccggtctctccaagcagcatgttgaatttgaacccgatgcagaggtcctcactgatcagcgacgacccagtagcgtggctgagaaggagaaccaaccttctggggctggcaaaaagggaaagaaggataaacgtaacggagccaacaacaagacagccggaatcctggtcaacaagaacgaaactgttgctgttaagcctgcagctaacgccgaggagacaccaactttgaataattttgaaaccaagatccccaaggatgtggtggagctgaagaagcaagagcaaaaggaacgcaaagaagacaacaacaacaagcagcaaagtcagaaaaagatcgccggaggcaatgtgtccaagaaggagaaggtcgtagctgtcgaaacagaggcacccgtagtgaccaagcagatcctcaagcaacagcagcagcagcagaatggctcacccaaaacgcaacacaaccaggccaacaacaaaaccaagcagcagcagcaaaacaagaaacagaatcaaaaggaaaccctaacgggtaaggatttggctcatgctttggataaactggccgatcaccagaaccagaccattggtgtcaacgctctgatgaacgtattttctcgtgccgagctaaatcgctcagagattcagatactcatcgactatctgctaaacaagcaacaggatatgcccgcttcgcactctgagtggtcggatgacatctgccagaaactcaagcgtcagctggaagagaaggaaaagctgttggccgaggagcaggaggcctccatcggaattcaggctaagcttcgcgaactacgccaagaggttaacacagaacgcgcccagatgcatgcccgaaaccaggcttatatcgataagttgcaaggcaaggagcaggagctagccgccctcaaccaggagctgtccagtctgaatgacaagttgacgcttgagcgtcaacagcttacgacccttcggagggagaagcaagccaattcgcaggatctggttcagttgcaacatttgcaacaggatctcgcacacaaggaaaagtgcctggcggaaatgaccgcattcgttaatgcagagacccagcagaagaacgaggtgattcagcagcaggctcagcagctgcaagccctggagctgcaacgcgaagagctggaagcgcgccagaacaatagcatctttgagctagagcagcgcaagcagctggaggcggagaacgccgacctcaagcaggagctgagcgctgttcaacagactcagtcggagctgcagcgcgtccacgccgccgagttgcaggagctgcgacagaacttgtccgtcctagaggctcgcaacgttgcgctcagccaacagctcacccaagccgccaacagcgcggttcaggccaccgccgcccagtcggagcaggcccaggttcagaccgaagcgctggcccagaagcagcaggagctgagtgctcttcgctcgcaggtcggctcgctgacggatgcccacgcccagcagcagaagcaagccaacgctctgcagtcgcagctccaggaggctcaacagcgggccgagcagctgcaggctaaggagcaacatctgcaacaggagctccaggagcagcgggagaaaaataatcaacaacacaaagagctgcagctgcagcaacagaaggcagtggccgccaatggcgggggtagtgccagttcagccaagagcgagcagcagaggatccgggatctctaccagcgcctttatcccgacgctgtgaaagcgcagtcgggaaatgccctgcaagcatcctttgaccagtggctggaacaggtcctggccacccatgtcaagcagcaacaggataagctgcggcagaagctcgacgcggagaagtccgagaagcagagcagcagtagtcataagtccacacaatcaagcaacagtagcagtagcaaccacaatagcacccacaacaatattagtagcaataatagtagttcgaatagccaatcctcctccgccgccgagcagcaggagctgcacaaacagaacctgcagctgcgggagtgcaacgacaagctcacccagctggtcaccaagacgacaaacacattgatggacttggaagagcgtgctcgtgagcaggacgagcactggcgtggcatcgtcgagcagaaggagcagctgatcctaaccctgcagcagcatgcctcaaacggagaataggacatttaatgtcgaaacagatgcggaaagggaagaggaggccaacaacgacgataaactgacaagcaaccgcagagtttgtccaacttccaaaagaacagcaacagt

SEQ ID NO: 27159 - protein, 842 aa, DROSOPHILA; identical to SEQ ID NO: 16752

SEQ ID NO: 27160 - DNA, 9528 bp, DROSOPHILA
agctcagctatttattagtgaaatgtcaaaggtcaaatgtctttctcatatgtgtgtgtatatatttaattctcattttatcgtaaattaaacatcataaatccttataatgctgttatagctcgttcttttgtttgttgtggttgctgatgggcttgaatttgttggttttcctaatttttcagtatgtcgcatgcaacaggttccgacaatagattgctagttagcattcgtgtttaatttgcgtttacttataagataggttctcattcagttttatataaaaatagttgttttcttgtttatttacgcttaattaaatgttgctgctgccatttgctcttcctgggattaaatactttgcgctgcctggcggcggaaaattaaaagttaacacaaaaacagaaaacatgaatggaaaacatacaaaattcacaatggcccaagtacaagagcatacgtacattcatactattattttgtttatttttttgtggatttgcattttaagtagctgggttttaaattcatttgcttaacataagatacatatacaattgtttaaagcgcgtttttaaatgcaagtgtaacacaaaaataataatcgcatgcaaagtatgtgttaaataataattagaaagtagcagcagcaatggatttttcgcggtttttccgggttggtttgctttttattgggagggcttgggtggaaattgcctgtttctgtaatcagagtcggacttttcctttgctagcatttcttctcttctcgtttaacattgcacaagtttcgattgttatcattatcttgctttagttatgtgtatataatttcttaaagcgttccatagttcttcattctcataattgttggttctcgctactataaaatgttaaatgttgctgttgtggggcatgctttaggtttacttttttctcgccttttttttttgttacattaactttaaacttaatagattgttagagttgtttcttttttactgttgctgttcttttggaagttggacaaactctgcggttgcttgtcagtttatcgtcgttgttggcctcctcttccctttccgcatctgtttcgacattaaatgtcctgcaaaaagacaaacgatatgtttagaaatctagttattatagaccagcaacacaattccttacctattctccgtttgaggcatgctgctgcagggttaggatcagctgctccttctgctcgacgatgccacgccagtgctcgtcctgctcacgagcacgctcttccaagtccatcaatgtgtttgtctgttcgtaagattttattgtcattggataggttataaattactatagggcaaaagtaattaccgtcttggtgaccagctgggtgagcttgtcgttgcactcccgcagctgcaggttctgtttgtgcagctcctgctgctcggcggcggaggaggattggctattcgaactactattattgctactaatattgttgtgggtgctattgtggttgctactgctactgttgcttgattgtgtggacttatgactactgctgctctgcttctcggacttctccgcgtcgagcttctgccgcagcttatcctgttgctgcttgacatgggtggccaggacctgttccagccactggtcaaaggatgcttgcagggcatttcccgactgcgctttcacagcgtcgggataaaggcgctggtagagatcccggatcctctgctgctcgctcttggctgaactggcactacccccgccattggcggccactgccttctgttgctgcagctgcagctctttgtgttgttgctgcaaagattaatgcatacaattagtttacaatgatttagactctacgaattttcagatggaatcatataggcaagcagaagaagctgacaaagatcatgcacttacgcctacggactgcgctgaatttgttttcgtcttagctgttaatgcttcggcattttgcaacgcttcaatcaacttccaatttttcatacgcacgtcctgacgaaacacgaatacgtggcaattagtaaaggattcaggaaaagcaagaaggatgcagatgcaacgggcaggacgaacgacggcataacgactcaaatgcgacgcgattacatatagttgggctcaaattggtttgaaatccttttcaattcaattatccgcattcattattaatcttcatgcataagtcttgacatatatatgtatcaatttcagtgattacaaagtaaagtgcaataaagtttaaagtaggtggtataaaatagggaatgtaatgggaatgcaacacaaaaagaaaagttttttaatatatatttctagttatagagttcatctctatactcacattatttttctcccgctgctcctggagctcctgttgcagatgttgctccttagcctgcagctgctcggcccgctgttgagcctcctggagctgcgactgcagagcgttggcttgcttctgctgctgggcgtgggcatccgtcagcgagccgacctgcgagcgaagagcactcagctcctgctgcttctgggccagcgcttcggtctgaacctgggcctgctccgactgggcggcggtggcctgaaccgcgctgttggcggcttgggtgagctgttggctgagcgcaacgttgcgagcctctaggacggacaagttctgtcgcagctcctgcaactcggcggcgtggacgcgctgcagctccgactgagtctgttgaacagcgctcagctcctgcttgaggtcggcgttctccgcctccagctgcttgcgctgctctagctcaaagatgctattgttctggcgcgcttccagctcttcgcgttgcagctccagggcttgcagctgctgagcctgctgctgaatcacctcgttcttctgctgggtctctgcattaacgaatgcggtcatttccgccaggcacttttccttgtgtgcgagatcctgttgcaaatgttgcaactgaaccagatcctgcgaattggcttgcttctccctccgaagggtctaaaacaaagaattaatgatttgtaacgaatttgaatataggctatgtttgaaaatattcttataaatctcagaagcttttcttaccgtaagctgttgacgctcaagcgtcaacttgtcattcagactggacagctcctggttgagggcggctagctcctgctccttgccttgcaacttatcgatataagcctggtttcgggcatgcatctgggcgcgttctgtgttaacctcttggcgtagttcgcgaagcttagcctgaattccgatggaggcctcctgctcctcggccaacagcttttccttctcttccagctgacgcttgagtttctggcagatgtcatccgaccactcagagtgcgaagcgggcatatcctgttgcttgtttagcagatagtcgatgagtatctgaatctctgagcgatttagctcggcacgagaaaatacgttcatcagagcgttgacaccaatggtctggttctggtgatcggccagtttatccaaagcatgagccaaatccttacccgttagggtttccttttgattctgtttcttgttttgctgctgctgcttggttttgttgttggcctggttgtgttgcgttttgggtgagccattctgctgctgctgctgttgcttgaggatctgcttggtcactacgggtgcctctgtttcgacagctacgaccttctccttcttggacacattgcctccggcgatctttttctgactttgctgcttgttgttgttgtcttctttgcgttccttttgctcttgcttcttcagctccaccacatccttggggatcttggtttcaaaattattcaaagttggtgtctcctcggcgttagctgcaggcttaacagcaacagtttcgttcttgttgaccaggattccggctgtcttgttgttggctccgttacgtttatccttctttccctttttgccagccccagaaggttggttctccttctcagccacgctactgggtcgtcgctgatcagtgaggacctctgcatcgggttcaaattcaacatgctgcttggagagaccgggttcctcgccagccacggagccctgaccctccgactgaccatcggagtagtcttcggcttcctctggttccggctcgttgttcacatccctctgctgttcccgctgacgttgcttcttttcgcgcttaagttccttcttcttgggcttcttggtagcggcaccaccggccgccttgtagagattggcgctcagggcacgcttctcggctaccacctcctcaaaagtcttgcgccggaagatcttgttgatgaacaggaacgagagcagcgaggcgctgaccacacaaccgatgacgatcagtatgtggaagtccatatttgcatatctttccggtttagccgtggatttttctcagggatctcctttgcgaatgctgttgaataaatagagagtttctcgttactattttgtattttagcaatattagaaggtaaatatttctaggtatttacatttgcaggtgtaaatacatatgaaaaaattaaacaataatgttcgatttcatctaaaaggggaagcccggaattacggccacgttttctccgtttggtttccaaggaaagcaaccaacaaagcaaaaaataatctcaagtgtggaaatgttagaaatgctttttagggtcactcgtgtatatatttttgctatcaaactcatttcgtagcattatcagcttttttcagcttgagaaccactacaatgtagtataaactgatgacgtgggggtcaaaaatcgaaaaacgccgaagaaatgcccactaaaaacgacagatcaacgacactacattcaatggcaattacgctttatatagccggattgtttgagttgaacgtgcttatcggtttaccggccggaaaatggttcagagcgcaacaacacaagttctccttttgtatgaacacgttgttattgctgcagttgactgggcttgctggacgttatattaataaaaacgctgtgcggttgataatttcattgttgttgttgctctgctgagataaaaaaaatgcactgctgaatggctcaatattcctggtattccggattatacagctcaactcgccaataaatccccatgaatttcaaatttaggcaaaaaggtcatttgaatttcatttggcgcaggaagggcgataagaaatctcagctggaattatcgattcctcaaagaactcagcgattaagacggaaaaatgtattccgggcagaagtggggagccgacaaagtcacaaagaataaaattagcttatgaaacagcagctgctgggcagccttgaacgaaagttggtagacatttccagcacccaaaggtgttgacgcagattgaaaggaactcacataacaatccgaaaaaagaataacaatttaaaataactcaaagtctagattctgacgcacacgtatgcaaatttgccaattcgcaaaaaaaatcaacactgtttaatctattttcgttaaactccacgagtctcttccaatggacacgatgcgaatgccaaaggctagtgaaaagattcgcagcagagctgggctcgcaattcgagatctctcctcagctctctacacttgaagcaattcccaagatcgactaaatatttatttttgaataggttattttctggatgttttctgtaagtgcaagttacgttttatgagagcaagattttattgaagaatcagcaaacaaatttgcaataagtcttgagtttaaaatatgcgataacattacttgtatcatcaaaataaaatacgtttatatatttactccgcccagttatctttgaaactttaaaataatatatatttgtagtttgtacatttttgaaataaaaaatactaacattactaacagaacgttttattctcagtgtgcttgcgctccgtggcacttttctctcttcgctcccaccacagttagaacaaaacttgaaatttcgctgactccgcgagctcagtggaagaattcacaaattgcaaaaatttcaattcaaggttgttgctctctgcggctgcgataactggcaggtcgggtatttattttcctctgttggcttgtcaagttctggcttcttatttctgctgctttgctggctcgcgtcatgtttctggctaaaagatactgactgtgtttctgtttcttcttatccacaatcaacaaacatttctaaggggctttcaaaaatactgggttacgtgatactgggtagatgaataatccgtatacagcaaatctttccaggtttactctatctacatataactaactcttgatttcatttattaacaaatgtaaccatttttagtgtttccaactgttgtattgcgaccattgtgacaatttagatggttcatagcatcttcactacaatttatgaaagtttttacaactccaattgtctattatctagtcctatgaaaccgacattcattattacggatgggtggactgaccacaaagttaaattaatatttaatggcacaatggaaacgggtttccgtcaaacaaatcgatggcgtttaacggaaagtaagtaaagtccgggctgcggattccgattccgtgagtatagaggcgggggaggaagaagcagcagaagcggtggcggcagaagagagccaaagccaaaagagaataaaaagcacaataaaaacgccggtaaaggtcatcaaccggaagaaaagcgcccatgtgtgcgtgagtgtgactggccagtgtttttgtgtgagtttttgtataaacgagtgtgtgaaagtcgaaatcttgctgccaattatcattatgaccatctataaataattatgtattatggtcgaacagcatgcaaaacacgctggctgctcggcctcgttacagccaactgacaaactggcaaactgacatcgaactgcacagttggcctaattttcccgtttttctttctatctttctgtgccgttgcttccctccctccccctttcttttgcggcgccccagtgttcaattagctgcctgctcacacacacactcgcacttgctggcacatggaatttctcccctgttggtgagccccggccagaaatgccaagttgaccattttctggcctttgaaggcagcgtgtttgaagtgggtcaagtattcgccaatgcgattacatctcttcaaatggaaataaaaaagttattgatcctcgtaactgtgtataattattaaagtccttatgcgaattataaatgtctagatttgtttctaaaaaaaaattgtttttcataatcaacttacatatcctaataacttcttaaaactgaaaacttccaatctatctaaaatttaaccgggttctccattttatattatttttgttctttcataaaaaaataatttgaaattatacttttactagcttgctttcgcagcagcatcactgataacggtgcaagtgctttcctcgctctctctgtcaccgctgagcgagagcgtactcgcactcattcattatttttcatctatttattcataaatgcattttttgcccctgctattttcagcggctcaagagttttaattttagaaagcactgctccctacttttcgtctttttctcccgtaatatttatgcaacatgcaatgctgctttatttatctctgtgggaaagaaagcgtggcatgttttttgcggtgtgtggtgtcttcttgttattcctgcgtgggagcgtcaggttccaagttcgtttccctaattttttcttttggtccacagatggaaggttggtctaaaatgtggagtgactcataaaggctataaataggcaaattgatattgtctaaagctggcggttaatgattattgattgctgacgtagacgtcgatagcatttgttgattgtcaattggttttccccgatgacgaacgatttttgagtctatgatttattggactgcagctgctctgctccgctctctcttttgagctctgctccgctctcgctcctttgataagcccgcatatgcttatgtgtgtgtgtgtggtgaggtcagcgcatcaattatgctcatttcttgtctttttctttgataaaatcagcgaacaacaaatgggaaagggcgggggcagggccccggccagacggcggcgcccgagatttttggcaaatcaaagcagtcagctgtcccctttgctcataattaagcaatggggagcagtgaaagtgtgtcgactactaattggcaccttgaataattgcacaccgataaataaagtagtggcttcctttttcctctcaagacaaaagggcgtcgcactgcacttacacacatacatgtacaccgctctccccttcttatctccagtctctatacttctaacgctgattttcagccgattttaagccacttgcaacgtcaacaattttcacaacatttcacatttacaatgcagtctttcttttccttcttcttttctttttgttggaaacgcatccgccatttgcaagccacttgtgtatgtgtgccggagcgctgcgcctgtttgagtgtgtgtgtgtgttgggttgtcgcgtcgacagttttttcatcactttgcttggatttagatacgctttatcaaaccagttcttacttgcaactgttaaactttttctcaactttcttatgcctttcggctgcggacttacactttttcgttagtgggaaaattgaaacatttgcaaacagagtgaccgtggcgacatactccaaaaatcgcgccagtcacataatagtcctaaatttggacaactagcgatgactcaagccgccggataaatgcgctatgtttttgtagccgagacacgctacgtggggagagcgatgtttttatcgtggacacaaaccaaattgaaattcttcaccgaagattttatcgcgactgtgccatggtcgcactgattagctcaccgaaacgttcattgaatttgttttgattatctcgaaataacaagctattttctcaattttcctgacaaaaatgacatcgattgccaagtccatagtactattggcatccctggccacgttcgcttactccctgtacgtggttggcagcctgatgatgttcctttcgacgcctcgttcgatttccaaggcgcacacctggattttcaatttactggacaacaagtcgcgcctgcagaccgcctatggacccgtggtgttcgataccctctacctgatcggattcatcttccagcacagcttcctcaagtcagccgtggtcaagaagctgttggccaagttgggattgtcgggtgcggagcgcactatttatagcctgacgtcatcgctttgtttacatgtttgtatacccacaaattggacagaaatagctcccaactgcaactttggacatttcagtatttgatcgtcaactggctgcccgctcagtcgattgttctgtggcaaatcgatgtggagcagagtgct

SEQ ID NO: 27161 - DNA, 2844 bp, DROSOPHILA
aaaagaagaaggaaaagaaagactgcattgtaaatgtgaaatgttgtgaaaattgttgacgttgcaagtggcttaaaatcggctgaaaatcagcgttagaagtatagagactggagataagaaggggagagcggtgtacatgtatgtgtcattcgcaaaggagatccctgagaaaaatccacggctaaaccggaaagatatgcaaatatggacttccacatactgatcgtcatcggttgtgtggtcagcgcctcgctgctctcgttcctgttcatcaacaagatcttccggcgcaagacttttgaggaggtggtagccgagaagcgtgccctgagcgccaatctctacaaggcggccggtggtgccgctaccaagaagcccaagaagaaggaacttaagcgcgaaaagaagcaacgtcagcgggaacagcagagggatgtgaacaacgagccggaaccagaggaagccgaagactactccgatggtcagtcggagggtcagggctccgtggctggcgaggaacccggtctctccaagcagcatgttgaatttgaacccgatgcagaggtcctcactgatcagcgacgacccagtagcgtggctgagaaggagaaccaaccttctggggctggcaaaaagggaaagaaggataaacgtaacggagccaacaacaagacagccggaatcctggtcaacaagaacgaaactgttgctgttaagcctgcagctaacgccgaggagacaccaactttgaataattttgaaaccaagatccccaaggatgtggtggagctgaagaagcaagagcaaaaggaacgcaaagaagacaacaacaacaagcagcaaagtcagaaaaagatcgccggaggcaatgtgtccaagaaggagaaggtcgtagctgtcgaaacagaggcacccgtagtgaccaagcagatcctcaagcaacagcagcagcagcagaatggctcacccaaaacgcaacacaaccaggccaacaacaaaaccaagcagcagcagcaaaacaagaaacagaatcaaaaggaaaccctaacgggtaaggatttggctcatgctttggataaactggccgatcaccagaaccagaccattggtgtcaacgctctgatgaacgtattttctcgtgccgagctaaatcgctcagagattcagatactcatcgactatctgctaaacaagcaacaggatatgcccgcttcgcactctgagtggtcggatgacatctgccagaaactcaagcgtcagctggaagagaaggaaaagctgttggccgaggagcaggaggcctccatcggaattcaggctaagcttcgcgaactacgccaagaggttaacacagaacgcgcccagatgcatgcccgaaaccaggcttatatcgataagttgcaaggcaaggagcaggagctagccgccctcaaccaggagctgtccagtctgaatgacaagttgacgcttgagcgtcaacagcttacgacccttcggagggagaagcaagccaattcgcaggatctggttcagttgcaacatttgcaacaggatctcgcacacaaggaaaagtgcctggcggaaatgaccgcattcgttaatgcagagacccagcagaagaacgaggtgattcagcagcaggctcagcagctgcaagccctggagctgcaacgcgaagagctggaagcgcgccagaacaatagcatctttgagctagagcagcgcaagcagctggaggcggagaacgccgacctcaagcaggagctgagcgctgttcaacagactcagtcggagctgcagcgcgtccacgccgccgagttgcaggagctgcgacagaacttgtccgtcctagaggctcgcaacgttgcgctcagccaacagctcacccaagccgccaacagcgcggttcaggccaccgccgcccagtcggagcaggcccaggttcagaccgaagcgctggcccagaagcagcaggagctgagtgctcttcgctcgcaggtcggctcgctgacggatgcccacgcccagcagcagaagcaagccaacgctctgcagtcgcagctccaggaggctcaacagcgggccgagcagctgcaggctaaggagcaacatctgcaacaggagctccaggagcagcgggagaaaaataatcaacaacacaaagagctgcagctgcagcaacagaaggcagtggccgccaatggcgggggtagtgccagttcagccaagagcgagcagcagaggatccgggatctctaccagcgcctttatcccgacgctgtgaaagcgcagtcgggaaatgccctgcaagcatcctttgaccagtggctggaacaggtcctggccacccatgtcaagcagcaacaggataagctgcggcagaagctcgacgcggagaagtccgagaagcagagcagcagtagtcataagtccacacaatcaagcaacagtagcagtagcaaccacaatagcacccacaacaatattagtagcaataatagtagttcgaatagccaatcctcctccgccgccgagcagcaggagctgcacaaacagaacctgcagctgcgggagtgcaacgacaagctcacccagctggtcaccaagacgacaaacacattgatggacttggaagagcgtgctcgtgagcaggacgagcactggcgtggcatcgtcgagcagaaggagcagctgatcctaaccctgcagcagcatgcctcaaacggagaataggacatttaatgtcgaaacagatgcggaaagggaagaggaggccaacaacgacgataaactgacaagcaaccgcagagtttgtccaacttccaaaagaacagcaacagt

SEQ ID NO: 27162 - protein, 842 aa, DROSOPHILA; identical to SEQ ID NO: 16752

SEQ ID NO: 27163 - DNA, 9742 bp, DROSOPHILA
agctcagctatttattagtgaaatgtcaaaggtcaaatgtctttctcatatgtgtgtgtatatatttaattctcattttatcgtaaattaaacatcataaatccttataatgctgttatagctcgttcttttgtttgttgtggttgctgatgggcttgaatttgttggttttcctaatttttcagtatgtcgcatgcaacaggttccgacaatagattgctagttagcattcgtgtttaatttgcgtttacttataagataggttctcattcagttttatataaaaatagttgttttcttgtttatttacgcttaattaaatgttgctgctgccatttgctcttcctgggattaaatactttgcgctgcctggcggcggaaaattaaaagttaacacaaaaacagaaaacatgaatggaaaacatacaaaattcacaatggcccaagtacaagagcatacgtacattcatactattattttgtttatttttttgtggatttgcattttaagtagctgggttttaaattcatttgcttaacataagatacatatacaattgtttaaagcgcgtttttaaatgcaagtgtaacacaaaaataataatcgcatgcaaagtatgtgttaaataataattagaaagtagcagcagcaatggatttttcgcggtttttccgggttggtttgctttttattgggagggcttgggtggaaattgcctgtttctgtaatcagagtcggacttttcctttgctagcatttcttctcttctcgtttaacattgcacaagtttcgattgttatcattatcttgctttagttatgtgtatataatttcttaaagcgttccatagttcttcattctcataattgttggttctcgctactataaaatgttaaatgttgctgttgtggggcatgctttaggtttacttttttctcgccttttttttttgttacattaactttaaacttaatagattgttagagttgtttcttttttactgttgctgttcttttggaagttggacaaactctgcggttgcttgtcagtttatcgtcgttgttggcctcctcttccctttccgcatctgtttcgacattaaatgtcctgcaaaaagacaaacgatatgtttagaaatctagttattatagaccagcaacacaattccttacctattctccgtttgaggcatgctgctgcagggttaggatcagctgctccttctgctcgacgatgccacgccagtgctcgtcctgctcacgagcacgctcttccaagtccatcaatgtgtttgtctgttcgtaagattttattgtcattggataggttataaattactatagggcaaaagtaattaccgtcttggtgaccagctgggtgagcttgtcgttgcactcccgcagctgcaggttctgtttgtgcagctcctgctgctcggcggcggaggaggattggctattcgaactactattattgctactaatattgttgtgggtgctattgtggttgctactgctactgttgcttgattgtgtggacttatgactactgctgctctgcttctcggacttctccgcgtcgagcttctgccgcagcttatcctgttgctgcttgacatgggtggccaggacctgttccagccactggtcaaaggatgcttgcagggcatttcccgactgcgctttcacagcgtcgggataaaggcgctggtagagatcccggatcctctgctgctcgctcttggctgaactggcactacccccgccattggcggccactgccttctgttgctgcagctgcagctctttgtgttgttgctgcaaagattaatgcatacaattagtttacaatgatttagactctacgaattttcagatggaatcatataggcaagcagaagaagctgacaaagatcatgcacttacgcctacggactgcgctgaatttgttttcgtcttagctgttaatgcttcggcattttgcaacgcttcaatcaacttccaatttttcatacgcacgtcctgacgaaacacgaatacgtggcaattagtaaaggattcaggaaaagcaagaaggatgcagatgcaacgggcaggacgaacgacggcataacgactcaaatgcgacgcgattacatatagttgggctcaaattggtttgaaatccttttcaattcaattatccgcattcattattaatcttcatgcataagtcttgacatatatatgtatcaatttcagtgattacaaagtaaagtgcaataaagtttaaagtaggtggtataaaatagggaatgtaatgggaatgcaacacaaaaagaaaagttttttaatatatatttctagttatagagttcatctctatactcacattatttttctcccgctgctcctggagctcctgttgcagatgttgctccttagcctgcagctgctcggcccgctgttgagcctcctggagctgcgactgcagagcgttggcttgcttctgctgctgggcgtgggcatccgtcagcgagccgacctgcgagcgaagagcactcagctcctgctgcttctgggccagcgcttcggtctgaacctgggcctgctccgactgggcggcggtggcctgaaccgcgctgttggcggcttgggtgagctgttggctgagcgcaacgttgcgagcctctaggacggacaagttctgtcgcagctcctgcaactcggcggcgtggacgcgctgcagctccgactgagtctgttgaacagcgctcagctcctgcttgaggtcggcgttctccgcctccagctgcttgcgctgctctagctcaaagatgctattgttctggcgcgcttccagctcttcgcgttgcagctccagggcttgcagctgctgagcctgctgctgaatcacctcgttcttctgctgggtctctgcattaacgaatgcggtcatttccgccaggcacttttccttgtgtgcgagatcctgttgcaaatgttgcaactgaaccagatcctgcgaattggcttgcttctccctccgaagggtctaaaacaaagaattaatgatttgtaacgaatttgaatataggctatgtttgaaaatattcttataaatctcagaagcttttcttaccgtaagctgttgacgctcaagcgtcaacttgtcattcagactggacagctcctggttgagggcggctagctcctgctccttgccttgcaacttatcgatataagcctggtttcgggcatgcatctgggcgcgttctgtgttaacctcttggcgtagttcgcgaagcttagcctgaattccgatggaggcctcctgctcctcggccaacagcttttccttctcttccagctgacgcttgagtttctggcagatgtcatccgaccactcagagtgcgaagcgggcatatcctgttgcttgtttagcagatagtcgatgagtatctgaatctctgagcgatttagctcggcacgagaaaatacgttcatcagagcgttgacaccaatggtctggttctggtgatcggccagtttatccaaagcatgagccaaatccttacccgttagggtttccttttgattctgtttcttgttttgctgctgctgcttggttttgttgttggcctggttgtgttgcgttttgggtgagccattctgctgctgctgctgttgcttgaggatctgcttggtcactacgggtgcctctgtttcgacagctacgaccttctccttcttggacacattgcctccggcgatctttttctgactttgctgcttgttgttgttgtcttctttgcgttccttttgctcttgcttcttcagctccaccacatccttggggatcttggtttcaaaattattcaaagttggtgtctcctcggcgttagctgcaggcttaacagcaacagtttcgttcttgttgaccaggattccggctgtcttgttgttggctccgttacgtttatccttctttccctttttgccagccccagaaggttggttctccttctcagccacgctactgggtcgtcgctgatcagtgaggacctctgcatcgggttcaaattcaacatgctgcttggagagaccgggttcctcgccagccacggagccctgaccctccgactgaccatcggagtagtcttcggcttcctctggttccggctcgttgttcacatccctctgctgttcccgctgacgttgcttcttttcgcgcttaagttccttcttcttgggcttcttggtagcggcaccaccggccgccttgtagagattggcgctcagggcacgcttctcggctaccacctcctcaaaagtcttgcgccggaagatcttgttgatgaacaggaacgagagcagcgaggcgctgaccacacaaccgatgacgatcagtatgtggaagtccatatttgcatatctttccggtttagccgtggatttttctcagggatctcctttgcgaatgctgttgaataaatagagagtttctcgttactattttgtattttagcaatattagaaggtaaatatttctaggtatttacatttgcaggtgtaaatacatatgaaaaaattaaacaataatgttcgatttcatctaaaaggggaagcccggaattacggccacgttttctccgtttggtttccaaggaaagcaaccaacaaagcaaaaaataatctcaagtgtggaaatgttagaaatgctttttagggtcactcgtgtatatatttttgctatcaaactcatttcgtagcattatcagcttttttcagcttgagaaccactacaatgtagtataaactgatgacgtgggggtcaaaaatcgaaaaacgccgaagaaatgcccactaaaaacgacagatcaacgacactacattcaatggcaattacgctttatatagccggattgtttgagttgaacgtgcttatcggtttaccggccggaaaatggttcagagcgcaacaacacaagttctccttttgtatgaacacgttgttattgctgcagttgactgggcttgctggacgttatattaataaaaacgctgtgcggttgataatttcattgttgttgttgctctgctgagataaaaaaaatgcactgctgaatggctcaatattcctggtattccggattatacagctcaactcgccaataaatccccatgaatttcaaatttaggcaaaaaggtcatttgaatttcatttggcgcaggaagggcgataagaaatctcagctggaattatcgattcctcaaagaactcagcgattaagacggaaaaatgtattccgggcagaagtggggagccgacaaagtcacaaagaataaaattagcttatgaaacagcagctgctgggcagccttgaacgaaagttggtagacatttccagcacccaaaggtgttgacgcagattgaaaggaactcacataacaatccgaaaaaagaataacaatttaaaataactcaaagtctagattctgacgcacacgtatgcaaatttgccaattcgcaaaaaaaatcaacactgtttaatctattttcgttaaactccacgagtctcttccaatggacacgatgcgaatgccaaaggctagtgaaaagattcgcagcagagctgggctcgcaattcgagatctctcctcagctctctacacttgaagcaattcccaagatcgactaaatatttatttttgaataggttattttctggatgttttctgtaagtgcaagttacgttttatgagagcaagattttattgaagaatcagcaaacaaatttgcaataagtcttgagtttaaaatatgcgataacattacttgtatcatcaaaataaaatacgtttatatatttactccgcccagttatctttgaaactttaaaataatatatatttgtagtttgtacatttttgaaataaaaaatactaacattactaacagaacgttttattctcagtgtgcttgcgctccgtggcacttttctctcttcgctcccaccacagttagaacaaaacttgaaatttcgctgactccgcgagctcagtggaagaattcacaaattgcaaaaatttcaattcaaggttgttgctctctgcggctgcgataactggcaggtcgggtatttattttcctctgttggcttgtcaagttctggcttcttatttctgctgctttgctggctcgcgtcatgtttctggctaaaagatactgactgtgtttctgtttcttcttatccacaatcaacaaacatttctaaggggctttcaaaaatactgggttacgtgatactgggtagatgaataatccgtatacagcaaatctttccaggtttactctatctacatataactaactcttgatttcatttattaacaaatgtaaccatttttagtgtttccaactgttgtattgcgaccattgtgacaatttagatggttcatagcatcttcactacaatttatgaaagtttttacaactccaattgtctattatctagtcctatgaaaccgacattcattattacggatgggtggactgaccacaaagttaaattaatatttaatggcacaatggaaacgggtttccgtcaaacaaatcgatggcgtttaacggaaagtaagtaaagtccgggctgcggattccgattccgtgagtatagaggcgggggaggaagaagcagcagaagcggtggcggcagaagagagccaaagccaaaagagaataaaaagcacaataaaaacgccggtaaaggtcatcaaccggaagaaaagcgcccatgtgtgcgtgagtgtgactggccagtgtttttgtgtgagtttttgtataaacgagtgtgtgaaagtcgaaatcttgctgccaattatcattatgaccatctataaataattatgtattatggtcgaacagcatgcaaaacacgctggctgctcggcctcgttacagccaactgacaaactggcaaactgacatcgaactgcacagttggcctaattttcccgtttttctttctatctttctgtgccgttgcttccctccctccccctttcttttgcggcgccccagtgttcaattagctgcctgctcacacacacactcgcacttgctggcacatggaatttctcccctgttggtgagccccggccagaaatgccaagttgaccattttctggcctttgaaggcagcgtgtttgaagtgggtcaagtattcgccaatgcgattacatctcttcaaatggaaataaaaaagttattgatcctcgtaactgtgtataattattaaagtccttatgcgaattataaatgtctagatttgtttctaaaaaaaaattgtttttcataatcaacttacatatcctaataacttcttaaaactgaaaacttccaatctatctaaaatttaaccgggttctccattttatattatttttgttctttcataaaaaaataatttgaaattatacttttactagcttgctttcgcagcagcatcactgataacggtgcaagtgctttcctcgctctctctgtcaccgctgagcgagagcgtactcgcactcattcattatttttcatctatttattcataaatgcattttttgcccctgctattttcagcggctcaagagttttaattttagaaagcactgctccctacttttcgtctttttctcccgtaatatttatgcaacatgcaatgctgctttatttatctctgtgggaaagaaagcgtggcatgttttttgcggtgtgtggtgtcttcttgttattcctgcgtgggagcgtcaggttccaagttcgtttccctaattttttcttttggtccacagatggaaggttggtctaaaatgtggagtgactcataaaggctataaataggcaaattgatattgtctaaagctggcggttaatgattattgattgctgacgtagacgtcgatagcatttgttgattgtcaattggttttccccgatgacgaacgatttttgagtctatgatttattggactgcagctgctctgctccgctctctcttttgagctctgctccgctctcgctcctttgataagcccgcatatgcttatgtgtgtgtgtgtggtgaggtcagcgcatcaattatgctcatttcttgtctttttctttgataaaatcagcgaacaacaaatgggaaagggcgggggcagggccccggccagacggcggcgcccgagatttttggcaaatcaaagcagtcagctgtcccctttgctcataattaagcaatggggagcagtgaaagtgtgtcgactactaattggcaccttgaataattgcacaccgataaataaagtagtggcttcctttttcctctcaagacaaaagggcgtcgcactgcacttacacacatacatgtacaccgctctccccttcttatctccagtctctatacttctaacgctgattttcagccgattttaagccacttgcaacgtcaacaattttcacaacatttcacatttacaatgcagtctttcttttccttcttcttttctttttgttggaaacgcatccgccatttgcaagccacttgtgtatgtgtgccggagcgctgcgcctgtttgagtgtgtgtgtgtgttgggttgtcgcgtcgacagttttttcatcactttgcttggatttagatacgctttatcaaaccagttcttacttgcaactgttaaactttttctcaactttcttatgcctttcggctgcggacttacactttttcgttagtgggaaaattgaaacatttgcaaacagagtgaccgtggcgacatactccaaaaatcgcgccagtcacataatagtcctaaatttggacaactagcgatgactcaagccgccggataaatgcgctatgtttttgtagccgagacacgctacgtggggagagcgatgtttttatcgtggacacaaaccaaattgaaattcttcaccgaagattttatcgcgactgtgccatggtcgcactgattagctcaccgaaacgttcattgaatttgttttgattatctcgaaataacaagctattttctcaattttcctgacaaaaatgacatcgattgccaagtccatagtactattggcatccctggccacgttcgcttactccctgtacgtggttggcagcctgatgatgttcctttcgacgcctcgttcgatttccaaggcgcacacctggattttcaatttactggacaacaagtcgcgcctgcagaccgcctatggacccgtggtgttcgataccctctacctgatcggattcatcttccagcacagcttcctcaagtcagccgtggtcaagaagctgttggccaagttgggattgtcgggtgcggagcgcactatttatagcctgacgtcatcgctttgtttacatgtttgtatacccacaaattggacagaaatagctcccaactgcaactttggacatttcagtatttgatcgtcaactggctgcccgctcagtcgattgttctgtggcaaatcgatgtggagcagagtgctccgctttggtggaccttcgtgatcacccatggcatctgctgggttgtcatctttggcggcagtttggtgatggatctgccagagctgctgggcgtcaagcaagcctactacgatctgaaggcctacggaccgcccatcagctacaaatccggggaattgcgcaatctgtacgcccatgtcagacatccctcgtttgtgggcctgtcggtcatcc

SEQ ID NO: 27164 - DNA, 2751 bp, DROSOPHILA
tgtaagtccgcagccgaaaggcataagaaagttgagaaaaagtttaacagttgcaacattcgcaaaggagatccctgagaaaaatccacggctaaaccggaaagatatgcaaatatggacttccacatactgatcgtcatcggttgtgtggtcagcgcctcgctgctctcgttcctgttcatcaacaagatcttccggcgcaagacttttgaggaggtggtagccgagaagcgtgccctgagcgccaatctctacaaggcggccggtggtgccgctaccaagaagcccaagaagaaggaacttaagcgcgaaaagaagcaacgtcagcgggaacagcagagggatgtgaacaacgagccggaaccagaggaagccgaagactactccgatggtcagtcggagggtcagggctccgtggctggcgaggaacccggtctctccaagcagcatgttgaatttgaacccgatgcagaggtcctcactgatcagcgacgacccagtagcgtggctgagaaggagaaccaaccttctggggctggcaaaaagggaaagaaggataaacgtaacggagccaacaacaagacagccggaatcctggtcaacaagaacgaaactgttgctgttaagcctgcagctaacgccgaggagacaccaactttgaataattttgaaaccaagatccccaaggatgtggtggagctgaagaagcaagagcaaaaggaacgcaaagaagacaacaacaacaagcagcaaagtcagaaaaagatcgccggaggcaatgtgtccaagaaggagaaggtcgtagctgtcgaaacagaggcacccgtagtgaccaagcagatcctcaagcaacagcagcagcagcagaatggctcacccaaaacgcaacacaaccaggccaacaacaaaaccaagcagcagcagcaaaacaagaaacagaatcaaaaggaaaccctaacgggtaaggatttggctcatgctttggataaactggccgatcaccagaaccagaccattggtgtcaacgctctgatgaacgtattttctcgtgccgagctaaatcgctcagagattcagatactcatcgactatctgctaaacaagcaacaggatatgcccgcttcgcactctgagtggtcggatgacatctgccagaaactcaagcgtcagctggaagagaaggaaaagctgttggccgaggagcaggaggcctccatcggaattcaggctaagcttcgcgaactacgccaagaggttaacacagaacgcgcccagatgcatgcccgaaaccaggcttatatcgataagttgcaaggcaaggagcaggagctagccgccctcaaccaggagctgtccagtctgaatgacaagttgacgcttgagcgtcaacagcttacgacccttcggagggagaagcaagccaattcgcaggatctggttcagttgcaacatttgcaacaggatctcgcacacaaggaaaagtgcctggcggaaatgaccgcattcgttaatgcagagacccagcagaagaacgaggtgattcagcagcaggctcagcagctgcaagccctggagctgcaacgcgaagagctggaagcgcgccagaacaatagcatctttgagctagagcagcgcaagcagctggaggcggagaacgccgacctcaagcaggagctgagcgctgttcaacagactcagtcggagctgcagcgcgtccacgccgccgagttgcaggagctgcgacagaacttgtccgtcctagaggctcgcaacgttgcgctcagccaacagctcacccaagccgccaacagcgcggttcaggccaccgccgcccagtcggagcaggcccaggttcagaccgaagcgctggcccagaagcagcaggagctgagtgctcttcgctcgcaggtcggctcgctgacggatgcccacgcccagcagcagaagcaagccaacgctctgcagtcgcagctccaggaggctcaacagcgggccgagcagctgcaggctaaggagcaacatctgcaacaggagctccaggagcagcgggagaaaaataatcaacaacacaaagagctgcagctgcagcaacagaaggcagtggccgccaatggcgggggtagtgccagttcagccaagagcgagcagcagaggatccgggatctctaccagcgcctttatcccgacgctgtgaaagcgcagtcgggaaatgccctgcaagcatcctttgaccagtggctggaacaggtcctggccacccatgtcaagcagcaacaggataagctgcggcagaagctcgacgcggagaagtccgagaagcagagcagcagtagtcataagtccacacaatcaagcaacagtagcagtagcaaccacaatagcacccacaacaatattagtagcaataatagtagttcgaatagccaatcctcctccgccgccgagcagcaggagctgcacaaacagaacctgcagctgcgggagtgcaacgacaagctcacccagctggtcaccaagacgacaaacacattgatggacttggaagagcgtgctcgtgagcaggacgagcactggcgtggcatcgtcgagcagaaggagcagctgatcctaaccctgcagcagcatgcctcaaacggagaataggacatttaatgtcgaaacagatgcggaaagggaagaggaggccaacaacgacgataaactgacaagcaaccgcagagtttgtccaacttccaaaagaacagcaacagt

SEQ ID NO: 27165 - protein, 842 aa, DROSOPHILA; identical to SEQ ID NO: 16752

SEQ ID NO: 27166 - DNA, 3144 bp, DROSOPHILA
ctgcagatcaacggctatgatcttaacagcggacttttcatcgtccgtttcgcaggtatcgtagagtttccgagagagcacctgggaccagctgccaggagcagcacacagatcgactgcccgctgaacacctatatatggaaaagtgtgttatattttgttcctaagtagtttcaatgatctaaccatttagaattccgtaggcttcgtccacgtggagcaacttgaaggcactcctggccctccagccttcgtctttggcttgtcggtaatagatatctcgtttgtcctttgatgttttccccattgtaaataaatatatgaaatatcagggatgctctacaatataactgttctttttgagatacgtgaacagtaaaaagaatggttaaaatatggtgtcatgtgcagaaactagccaaagagtaagagattgtagttgttatttatgttttgtaagttagacgattggccagcctatcgatatatcgacaaagaagggatgcgagcgagtggttcgtcagttccaactggttccttttcagcatagtggctccgcggcgaacggaggctttacgaagaaaacataagcacaaagcaataatgctgggagcccaaggttcggttgggctctatgttcaattgtttcaaaataagaaaataaaatggattcattatataaaaatttatttaaaaattttaatttgaatttttccatcgataggataaattgctggtaataaaggtgtaaaaaatgagtgcataataaaagtaacatattttggttatctcgaaatgtacagaataaagatattcagttgatttggaccaaagacaccggaatattctacttattatttattattattatattttatctattatataatattttataagccgataactaaattggattgcttacttctggtaacactaaaatattatatcaaatagttgtcgatttttgtggcggcgcaatgcggtcacattcttaccgcgagatcttcaaaacacgctttgatgaggttttttcaaaattaagtggtaattatgcaccgaataccattgtatatggggtcggagcctcgccccgaggcctctgaatatatcacgatgtccgaggccatgtgtccacgtaacctgatgtgagtaacaggcccacttgtcctgagatcccgcaggttttgcaatattgcgaaatcctagttgtcctgcgataggatcctgcaatgctcatagatagataattatagaataataataatttacaatttcagagaatgcgagctgttcttgaagattctgcgcaaaacaaccgacaaagtttttctcgatttttctgaagttgctgaaggttgccttaacatttccaagaagtgtatgaatatgaaaagtcctacagtgttgaagatggtatatccacattattgatatgatatataaccctattgtaatccagaacacagactttgcagagtctggacgaaattatatgccgcgcacccagcgcctcccctacatgcgtggatgcgattatggccagaagtgtgctctacataaaaaataaccagaatacggtatgtcatcttcacagctgaatacacatctacatcatatgttcacaaccctttttttttgctctagaccgcatgcaatgatttactatattacgagtctttggatccagctctcaagacagcggagggaacgataatctcgcagatacttcactgtatatgcctttttgtgaatcgggagtatgaagcatcgaaagataaactttcagttgtaaaaggcctcattggtaatttgcataatatgttgtaatgatcttctataaatcgctgtttttctttcattttagaagatgggacactagccgatcgaagtggtgagtattactagcgttgttttgaattttctttttaattttaattattttattatattttctagaagttagtccttttctagctcttatagagcaacatgaagagagaatcaaccaagctagaataaatgttgagttttgcaagaaagttcaaaccgagaactttgtgccttttaagggttttaagcttactcggaaaattccgtttgccagccaagcttgtgattattcgtacgtaaagaatgtttgatgtacaatacatttagtaaattcatatgttcccttatagcgaaaaatccattgagaaatctggcggagttttcgcttcatgcgatgtgcctaaaggagaaattgttcttgtggagaatcctgtgtactttcagtttagtgctccatttctgaactgcgagttgtgtggagtgcatcagcaacagctatacacctgtgataactgtcgttatagatcctattgctcaaaatcgtgtatgaaatcagatgcagaagtccaccagtacgagtgctatggatataaaattggactcatcccaatgcttgaggctaacatgctgtttcggttgttttgcgaagcaggggaatatattcttccggctatagtagattatgcgatggatggcgggtaactaacgagtagattttaaacacatgcttatatatcaaaattgactttcttttccccatttcagaatattaagcaatccccgagatgcttggacctttatactggagcatgcccaggaagaggagaaaacttataatcttgttggagaactccttgctacggcgccagattataacctgctgacaagggaaaagtatacagaaatcgtaaccacggcatttcgtttgtcggtttttatttacaatgacacgcgcctcgcagagaaatatttttatttgctggctcttgtgaaaacagacttaattactgtaatggcagctatacttttacgtttgggtggccacgttctattaaattcccagcgagataacttatgctacagacaacgtgaaggtattgatgccatgaatgaaaataatgatgaattcgaaaattgtggtattcttccgatgccaactgatcgtataagcgcaaatgtattcagttactatggagttaatgcgattacagatttcgtagactgttataacaacgttcacgatagtctagcagagatcgaacctgagtatccagagaagttctcaaatgatagtccgatatttcgttttgc

SEQ ID NO: 27167 - DNA, 767 bp, DROSOPHILA
cgagatcttcaaaacacgctttgatgaggttttttcaaaattaagtggtaattatgcaccgaataccattgtatatggggtcggagcctcgccccgaggcctctgaatatatcacgatgtccgaggccatgtgtccacgtaacctgatagaatgcgagctgttcttgaagattctgcgcaaaacaaccgacaaagtttttctcgatttttctgaagttgctgaaggttgccttaacatttccaagaagtgtatgaatatgaaaagtcctacagtgttgaagatgactttgcagagtctggacgaaattatatgccgcgcacccagcgcctcccctacatgcgtggatgcgattatggccagaagtgtgctctacataaaaaataaccagaatacgaccgcatgcaatgatttactatattacgagtctttggatccagctctcaagacagcggagggaacgataatctcgcagatacttcactgtatatgcctttttgtgaatcgggagtatgaagcatcgaaagataaactttcagttgtaaaaggcctcattgaagatgggacactagccgatcgaagtgaagttagtccttttctagctcttatagagcaacatgaagagagaatcaaccaagctagaataaatgttgagttttgcaagaaagttcaaaccgagaactttgtgccttttaagggttttaagcttactcggaaaattccgtttgccagccaagcttgtgattattcgtacgtaaagaatgtttga

SEQ ID NO: 27168 - protein, 237 aa, DROSOPHILA
MHRIPLYMGSEPRPEASEYITMSEAMCPRNLIECELFLKILRKTTDKVFLDFSEVAEGCLNISKKCMNMKSPTVLKMTLQSLDEIICRAPSASPTCVDAIMARSVLYIKNNQNTTACNDLLYYESLDPALKTAEGTIISQILHCICLFVNREYEASKDKLSVVKGLIEDGTLADRSEVSPFLALIEQHEERINQARINVEFCKKVQTENFVPFKGFKLTRKIPFASQACDYSYVKNV

SEQ ID NO: 27169 - DNA, 2324 bp, DROSOPHILA
ttgttgaagcattaacaataggtacgacgaactagagtcaaattctccatcatgtggtcagcatcgcacaaatatatagaatgcatcgagttctgcataattgaaggccacattcgcaaccatgaatcaggcagcccgcttcgctgactgtatcccttccctgtaatttgctagcagaagtaccagccaagtggaagtcccgcccccacgcacattcaaccgaaaaagtctgtgggctaatttgactatcgaaatttatgcgtcgtatctgcgagttcgagtatcgctgcctcttcgtatctgtatctgtatctgtacgctgtgctgcggtggtctattcactctcctgactcgagtgtaaacaaaataaagtggcgcatttatggcgaaggtggctggcccggagaacgtacagaacctggcgcacggaggaggattcccagtccccggagaatgtgtgcgcgcctccccgttctctaattgagcaaaaaccgtgctcggattgccgatgacgtcgatggagcagaggcgaacgggccaaagtcacaataaaccgctttgatttgtgtgggaaacacatattagaggagctgcgtgctaagcaaacaaacttggagccaacgaatgggtggctgattggacgggcgcactggggatatcattcacgttagggtgggtcaatgtctgagaagtacttttgcaaaaatgctctccgttcattacagtgcaacatgtcgtaagttgtttcttcgaatgagaacagtacaggtaacttatacgagtaatagactttctagattggttgtacttgttgtgcataaacaaatctggtttagaatgggttacacatagatcaacttcaatttacaaccacacttcttgctaaaacgtatccttgccatacgtggtatgtacagtaagctatgacttcctaactactgcagcccacccatatcctgtgggaaatcttgggaaatccgtgtcggacgcaggcactcaccatgttgcccgagctctccttggcgtccttggcaaaggcgggcggtccgttggcaatcaggtgcggctcttggatgggtttcatgggcggcggcagctcgaggccgacctcctcgtccggctcatagtcgccggctcctgctcctcctggatgctgagttgagctggggaattgcgacgatggcagcacggtggcgggactggcacctggctgctggttttgctgctcggccagctcctcggcgtgcttctggggtgtcgttgtcgtcttgacaatttcttctatttccgaaagtggattgccgtccattttgccggggctggcctgaaagagtgggaaaagcggggcggaaattcaatgatggtcaggccaaatgcataatgaaaaagtttgagcaacgattattgcattatccccttgtgcagcaggcggctaattgaaaaagttttcccaacccgtgcagcacttgattcaataactttttaaggcaaacaatctctattgaaattgaataaactatatatatatatatattgaattagttgaacgggcaacattgctcatccgccgtgtggccgcaaatagagtcgagttaagggaaaacctccatcattttggggtaattttcaaaataaacacgttctagacgcttgcatgttcagctcgaattgaatcactcgcttatttttgttttcccactcgcgagctcgcacaccacacaggggcccaaattaatttcagttgcataaataagcaacgtaactaaacacaaacacacatgcacactatggttctactgttggttttactaaatttataaccaaaatttgctttgggttaacatggtgaaaagtttcgcccagccagcagataacattgtgtaactattgttcttcgtgagctcaattttccattctgtgtgtacttgttgcgataagataacgaacggtcagctgtttgggcttggcaaaaactggaatttgtcatcgaaaacgatttacaactgcgatgcagcttacaaataagcggaagaaacagctcatggcacgtgttgcttaaaattcccggcgcacagtggaaacgttttgctgttttgcttttcggccaccgtttatggcgaactgtctttcgaaaatatggcctttataaggactttgcgacgacgacgcattttggcaatgcgaagcccgagaatctcgaaaagcgactgaacgccaagcgctgagcggtgcgactgactggctgactggcctaatagttttgcctgttgcccagcatgttttacatatgcaggcacgccaccccacctgccacccaagcaccc

SEQ ID NO: 27170 - DNA, 7142 bp, DROSOPHILA
gcaaaatccaatttgtttaaacaaaacagagagcgcccgttcgtaaaatcgcggtttcttgaaaaatgaaaattttagcttagcccgcgtcaagtcgcgaactgcgtgcaacgcaaaagagtgaccatgaaaatgccagcgagaaatttgcgaaaatcaatgagcaaaagcagcggttcataataataactaataacagagccaaaacaagtgaaattcgaggctggaattcgttatgctgcagtgcccatcgtcggattaaaaaacgggcggagaccccccagtttaacccctccagtgattaacccccggccgctttaaccacccctcccccttcccctgccgacggcatggacggccagcgggccagggatctcctgaccctcctccaggaacgggtcgtcttcctcacgggcggacgggaccggcgcggcggaccgctcctctgcttcccggccacgccccgtcgcgatcgcctcaagccggaggatctgcggcgtctcctcagctacctgatcagcattcccagcgacgccgccaagaacctcggattcacagtcatcattgacatgcgaggcaatggcaactgctcgaccaacgtgaagacgatactgaaggtgctgcaggagcacttcagcgcgaatatccacaacgtggtgatcatcaagccggacaacttctggcagaagcagcgagcctcgatctcctcgcacaagtacaagttcgagacgacgacggtgtcgattgagtcccttaacaaaatcgtcgagagccatcagctgaccggtgactttgagggccagcagctgtacgatcaccagcagtggacggacgcacggttggccatcgaggacttcttctggcaagccggggacatggccgatcgaatcgacgatctgcaggaggacctcaaccgcaacgacttcgccgaggacgtgccgttggccaggcacgccatcgatcaccacaacgagatgcgcaagaagatcaccaagctgcccatcgaggatctcgacatgcagggcaagaagctgctggccaagatcaatgcgatggctccgccaggcggtcaggcccccacaaactctggcggaccggatatggactcgggcccctcctccgccggacagcaatctcagccctcgcagcaatctcgttcggtgggcggcaacccggacatgtctgccgccgtgaacaaagcgctgcggcagatcgaactcatccacaccggtcaggagaaacttctgatgctgtggcagcacaagaaggtgaaactagaccagtgcttccagtggcgcctgttcgaacaggactgcgagaagatgttcgactggatcttgcacaaccgcgatgtgttccagatgagctacgtggagattggacacaattactcggtggccaagtcactgcaggacgagcaccagaagttcgccgttgcatccatgaatgtatccgtgaatatcgacaggattttggccgtggcagctcggctgatcgaaagtcagcattatgcggcccagcacattaaaacgctggctcaacgtttggaccgaacctggaaggactttgccgcgggcttggacgagagaacagctgtcctgcagctgagcgttcttttccaccacaaggcagaacagtactgcaatagcgtggccagctgggcagccgcatgtcaggcctctcagcctctgccctcggatatccagagcttggaaacggccattcggactcatcaatccctgtatgaggctatgtgccaagcttacaccgaggttcattccactagcaagaagctcctctatcagttggatcatttggtgcaggtctgcaatcaacctccgccgcctggtgtcccggatcaccgaaagaatagcaacaatggtagttttaacaagtacgagagacagaatccagcagcggattacagcgaaggcgccagtcatgtattggctgtgattcaccagatcctgagccaccaccgcaccctggaggccaagtggcatcaggaaaggctacgattgcatcagaccctagctcttagactcttccaagaagatgtgaagcaggtcttggattggctgaaaaatcatggcgaagttttcctaagaaagaatacgggtataggcagaaacttccacaaagcccgcgtttatcagacctcgcacgataactttgagaacgttgcacagaacacctatagtaacgcccaaaaactcctggcagctgcggacgaattggctagaagtggcgaagccgatcccaatgagatatattctgtggccagagaattggagcttcaagtgggcagttttgcggaaagagtggagcaaagaagacgccggctggatatggctgtaatattctacacccatgaaaaggacgtgaccgcctggatagacaaacttcgaacggatgtgagcacggatgaaacgcgtctttcgcaggagaacctcgagggcattgaacgcatattgcagcaataccagagggatcagcaggagagctccgtcaatgtctgccttacaaccatctcccagggtgaagctctgctgcaggaaatgcgatccctggagtatgccgacaatactggttccattgccgctctggaggctaccctggaaaagttaaacaaacaaaaagtggagttggaggagctctggtccgcccgcaagtttcgtgccgatctcatactgcgtttgcgctactttgagcgtgatgccagattgctgtccgtgcaaatggagatgtggtccgaggagctccagcatgctgacctctccagggactaccaaaaagccgaacaacttattcgcatgcacaacgagtcggtgacggaaatacagaacgccacttacgaggtcgtgcagcagggtcaggacctgctgcagctctttgagaatgctggcttcatttccatggcggatgccacgcacacggctcaggctaggatcgagtatctgcttgacttcttgcgggaacgggagatcgatctggaggaaatgtccgaggccaagcgggccaagcttgagcaagcggtgcagttatgtcaattccagaacgatgccaaccaggttatctcgtggatccgcaatggagaagccatgctggtggcaagtttcgtgacgcccaacagtttgcaggaggccgagcagctgcgcaagggtcatgagcagttccagattgccatcgagaagacgcacacatcggcggtgcaggttaagtaccgagcagatgccctcatcaatgctaaccattacgacccgctatccatcgatgaaattagcgacgatgtgacgaagaagtggcagcagctggtgacttatgcggaggagcggcacaagctggtgaccgcctcgataaacttctacaaaacagccgagcaggtgtgctcggttctggacagcttagagcgggagtacaaacgtgaggacgactggtgtgacggtggaggaggcagcgacaaagctcaagccattgtccagttgatctcgaaacatcaggagcagaaggaggctttcctaaaggcctgtactttggcgcgtcgcacagctgagacttttctaaaatacgccaaccgatcgcagcagtgctatcagtataaaggcaactgcgaaggccacgtaaagagcaaactggataagctattgactcaggaaaatcaagttctggattactggacgctgcgcaagaaatctctggatcagtgccagcagttcgttctctttgagagaagcgccaaacaggcgatcgaatggattcacaacaccggagaagcgtatctctcctctagatccaatctggtgggcataagcaaggaggaaacagaagggttgctgaaagagcataatgaattccgaagcactgctaaggagactcgcgaaagggtgaagcttctgatccaactagctgatagtttggtggaaaagggtcatgcccatgcgagcgatatcaagcaatgggtggcgtccgtggatcagcggtacaaggacttcagcaaccgcatggacagctactgcgagcagttggagaagtctttgggcatgtcccagcagcagttacttctgggctccgatggaaacagttcgataagctcctcctctggggatcgtcattcggaccccacgctggaagccaagctaaacagcagcaataaggagaacaaggagataaacgaggagaagcgcaagtcagcgaggaggaaagagttcatcatggctgaactgatgcaaacagagagggcgtatgttaatgatctggccacttgcatcaagtgtttccttgaggaattccgagcgggaaaaagtgtaccttctgccctcattggtcaggaagatgtgatattcggcaacataaaggaaatacaccacttccatcagaagattttcctgcgcgagctggagaaatacgagacaatgcctgaggatgtgggccattgctttgtgacctgggcctccaagttcgatatgtatgtgcactactgcaagaacaagcccacatcgaataatttgctggtccagcacggcggcagtttctttgaagaactacaacggcgcctggaggttgatcatcccctgcccgcctatctcatcaaacctgtgcagaggatcaccaaataccagctgttacttaaggatctcctatcctgctgcgaggagagccacggcgaaatcaaagaaggcctcgaggtgatgctcaatgtccccaaaaaggccaacgatgccatgcatctttcgctgctggaaaactgtgatgtctccgtagacaaactgggtgaagttgtgctgcaggatgccttccaagcctgggataccaagcagatcattcgaaagggcagagagcgtcgagtcttcttgtttgagttgtatctcctgttcgctaaggaggtaaaggagtccaacgtagttaagtaccagtttaaaagcaagctcatgaccaccgacatgggcatcacagagcacatcgaaggcgatgagactaagtttgccgtgtggacaggtcgttctcccatgctctcggattgcaggatcgtgctgaaggcaacgagcttggaaaccaagcagatttgggttaagaagctgcgtgaagtcatgcaggagacctgcttctcgggcacctcgttgaccttgcccaagtctccagctaagcattcgggctcctcgcaacgatcctcgcgggacttggatgaacagctcacggaaaatgatcacgatcgctgttcactggctagctttggatcgggtaataccacagatagtgataataagctgggcaaccaggaggccacctgggtggtagcggactacattgccacctccggcagcaatgagctgagcgtgagcaaggggcagcaggtggagattgtcgagccgcccaccgccggagagccagacttctgcctggtgcgcctgaatccgcagcacgacgatgccgccgtgcaggaaggactcgttcctgtctcagtgctcaaaccgccgccgggctcacacaagcacggttccggaaccgcagcgaatgcagcctcatcagcgggctcccagaaatccgacatgcaggatcagagcaatcgcagcaaggcggatgcactctcatcgtccactaaacgtcgcggtttcagcggacgcaactggctgccgctgatgaatcgcaagggaacggacaagccgccaagtagcaaaccgctggtgaagaagccctcggagaaaaacctgagaacaccccagaagcacgccgaggagctggccgagcagcaaaaccagcagccaggtgccagtcccgccaccgtgctgccatcgtcgcaattccccagctcaactcagcatccaggaggagcaggagccggcgactatgagccggacgaggaggtcggcctcgagctgccgccgcccatgaaacccatccaagagccgcacctgattgccaacggaccgcccgcctttgccaaggacgccaaggagagctcgggcaacatggccagccccggcaaaatggacggcaatccactttcggaaatagaagaaattgtcaagacgacaacggagcagcacgagtccaacagtcgcgtggatggaggcggaggtgtggaaaatgccagcaccaacggccatggtcgatcccacgacaacaatgatgagagccacaccgctgtgtctgacaaggctgcagccctcaaaaagcggcaatgcgtctttgcggagctgatgtccacggaggaggcatatgtacaggatctgcatgagatcgtcaatggttacatgacagagattaacaacacgaacagtgatatacccatgcctgaggacctgaagggtggtaaaatgaagttggtcttcaacaatattaaagacatctacgagtggcacagggacttcttcctgagagccctgcgcaactgccaaaaatcgccggcggacctgggtccgctcatcaagcggtcagccaccaagttcgctctgtactacacctattgcagcaacaaaccgctgtccgaatacatagtcagtgcccattatcagtatttcgatagcatacgtcagaagctgggacatcgtctggatctgagtaacttgatcatcaagccggtgcagcgaatcactaaatacgagctactcatcaaggagatcatcaaggccaccgagggagccgggctttacaaggaggtgcccatgctgcaggaggcctaccaacagatgaaggtcgtcgtcaagacggtcaacgatatgatggtggtgctgcgcagcttgcaggacttcgatggggagataaccgcccaaggcagcctgttgatgcagggacccatgaactgcgtggtggatgcggcacagaagcaccgcgagcttcaggtgttcctcttccagcagatcatcatctttgcggatattgagaagaccaagaaccagtatgccagtcccatattcaaatacagatcgcacatacagctcaatcacatgcaaatgaaggaactgggcgactgccgctttcaaataaggtcgactgaccccaagatcccagagatgacgatcatctgccaggcggcgtcgcaggagaactacgcggggtggcgcgatatgctaaacaagatactgcagcagcagaacgacctgatcttcatgctctccaatcccctgtcaaccaaaaacaaatga

SEQ ID NO: 27171 - protein, 2263 aa, DROSOPHILA
MDGQRARDLLTLLQERVVFLTGGRDRRGGPLLCFPATPRRDRLKPEDLRRLLSYLISIPSDAAKNLGFTVIIDMRGNGNCSTNVKTILKVLQEHFSANIHNVVIIKPDNFWQKQRASISSHKYKFETTTVSIESLNKIVESHQLTGDFEGQQLYDHQQWTDARLAIEDFFWQAGDMADRIDDLQEDLNRNDFAEDVPLARHAIDHHNEMRKKITKLPIEDLDMQGKKLLAKINAMAPPGGQAPTNSGGPDMDSGPSSAGQQSQPSQQSRSVGGNPDMSAAVNKALRQIELIHTGQEKLLMLWQHKKVKLDQCFQWRLFEQDCEKMFDWILHNRDVFQMSYVEIGHNYSVAKSLQDEHQKFAVASMNVSVNIDRILAVAARLIESQHYAAQHIKTLAQRLDRTWKDFAAGLDERTAVLQLSVLFHHKAEQYCNSVASWAAACQASQPLPSDIQSLETAIRTHQSLYEAMCQAYTEVHSTSKKLLYQLDHLVQVCNQPPPPGVPDHRKNSNNGSFNKYERQNPAADYSEGASHVLAVIHQILSHHRTLEAKWHQERLRLHQTLALRLFQEDVKQVLDWLKNHGEVFLRKNTGIGRNFHKARVYQTSHDNFENVAQNTYSNAQKLLAAADELARSGEADPNEIYSVARELELQVGSFAERVEQRRRRLDMAVIFYTHEKDVTAWIDKLRTDVSTDETRLSQENLEGIERILQQYQRDQQESSVNVCLTTISQGEALLQEMRSLEYADNTGSIAALEATLEKLNKQKVELEELWSARKFRADLILRLRYFERDARLLSVQMEMWSEELQHADLSRDYQKAEQLIRMHNESVTEIQNATYEVVQQGQDLLQLFENAGFISMADATHTAQARIEYLLDFLREREIDLEEMSEAKRAKLEQAVQLCQFQNDANQVISWIRNGEAMLVASFVTPNSLQEAEQLRKGHEQFQIAIEKTHTSAVQVKYRADALINANHYDPLSIDEISDDVTKKWQQLVTYAEERHKLVTASINFYKTAEQVCSVLDSLEREYKREDDWCDGGGGSDKAQAIVQLISKHQEQKEAFLKACTLARRTAETFLKYANRSQQCYQYKGNCEGHVKSKLDKLLTQENQVLDYWTLRKKSLDQCQQFVLFERSAKQAIEWIHNTGEAYLSSRSNLVGISKEETEGLLKEHNEFRSTAKETRERVKLLIQLADSLVEKGHAHASDIKQWVASVDQRYKDFSNRMDSYCEQLEKSLGMSQQQLLLGSDGNSSISSSSGDRHSDPTLEAKLNSSNKENKEINEEKRKSARRKEFIMAELMQTERAYVNDLATCIKCFLEEFRAGKSVPSALIGQEDVIFGNIKEIHHFHQKIFLRELEKYETMPEDVGHCFVTWASKFDMYVHYCKNKPTSNNLLVQHGGSFFEELQRRLEVDHPLPAYLIKPVQRITKYQLLLKDLLSCCEESHGEIKEGLEVMLNVPKKANDAMHLSLLENCDVSVDKLGEVVLQDAFQAWDTKQIIRKGRERRVFLFELYLLFAKEVKESNVVKYQFKSKLMTTDMGITEHIEGDETKFAVWTGRSPMLSDCRIVLKATSLETKQIWVKKLREVMQETCFSGTSLTLPKSPAKHSGSSQRSSRDLDEQLTENDHDRCSLASFGSGNTTDSDNKLGNQEATWVVADYIATSGSNELSVSKGQQVEIVEPPTAGEPDFCLVRLNPQHDDAAVQEGLVPVSVLKPPPGSHKHGSGTAANAASSAGSQKSDMQDQSNRSKADALSSSTKRRGFSGRNWLPLMNRKGTDKPPSSKPLVKKPSEKNLRTPQKHAEELAEQQNQQPGASPATVLPSSQFPSSTQHPGGAGAGDYEPDEEVGLELPPPMKPIQEPHLIANGPPAFAKDAKESSGNMASPGKMDGNPLSEIEEIVKTTTEQHESNSRVDGGGGVENASTNGHGRSHDNNDESHTAVSDKAAALKKRQCVFAELMSTEEAYVQDLHEIVNGYMTEINNTNSDIPMPEDLKGGKMKLVFNNIKDIYEWHRDFFLRALRNCQKSPADLGPLIKRSATKFALYYTYCSNKPLSEYIVSAHYQYFDSIRQKLGHRLDLSNLIIKPVQRITKYELLIKEIIKATEGAGLYKEVPMLQEAYQQMKVVVKTVNDMMVVLRSLQDFDGEITAQGSLLMQGPMNCVVDAAQKHRELQVFLFQQIIIFADIEKTKNQYASPIFKYRSHIQLNHMQMKELGDCRFQIRSTDPKIPEMTIICQAASQENYAGWRDMLNKILQQQNDLIFMLSNPLSTKNK

SEQ ID NO: 27172 - DNA, 7047 bp, DROSOPHILA
tcttatgcgtaagatgcaacaggatcggattgaaactgcgctaaagagcaggaatggtctggcagccaaagagaccaagcgtccgccgtcgagctccgagatcctaagtctctccgcgatcgacatggcgctaagggacatagatctcaattcggatacatccactgtagaggttgtcaaccacctgtgggagcatggtcgtggaaacaattatgacgatggggaaaacaaggagaaccagagcagcaactcccatgcggagcgcactttgtgcggctccaacaagcttaccgacaccatgagtttcacggactctgtgctaaactcaacggattttcgtcatttgcagcagagcatttcgcgcaagccgctcagtccaaatcctgccgcagatccaatcgtcacgcgctggaagcgtgacgaccaaggagcaattgtggccaacccgacaaccggtaagttggcccaatagcccattaactgtgatgacatcacttcctctttcctgcaggaatatcatacagatggttgccatacagcggtccgacaacaagttgtgggccattcccggtggaatggtcgatcccggcgagaatgtcagtgtcacccttaagcgggagttcaccgaggaggcattgaatttcacggacaaagccaacatggttgagcgattttttcaagcgggaggcgttcaggtataccaaggctacgtagacgattttcgaaacacggacaacgcttggatggaaaccactgcgctgaacttccacgatgaagacgggagccaggtgggacaattggagctaatggccggtgacgatgcctccaatgtgcgctggacggacgtcgactcgaatctcaagctgcacgccaatcatgccgacatagtccgtgagggtgtcatccgacgaaatgcacactggtagaaactagactgaaactattagagttaagatcaactgcctaatggttgaagaaaaaccaattttaaataataacatagccttcaatgaaacaagtaatccctatattatttcaatgcatattaatgtctcactggatgtggttataagttagaaaacattttcctccgttttttggcgcgtagaaaccttcatcttgcccttttaaagatcgctcatcttgaatgatttaactccacagaagcacaactgaaatttaagactatttcgaaagtattcgtataaaaagcttgcatcacttccaataaatgaatctgcgggcggaggacgttgggtgttctgagctgtttggtggttttcacacggatatgtgggcttacagggcttgcacataattgaacacttctggattcatgttcgatactttgctgaacagttccgggtagttggcgcgaatctctttgatgagggccaccgcgctctcggttgtctcgacgtcaggcatctgtttcttgtaactcgcctctatggtgatggccaggatttgctcaagatgtgcctcaatgctggggcgggccttcaagtatagcacacggaacgccttctgaatcacatcgttctccacggtgtcatccttcagtggcaaatggttgagccacacgggcagcacctggccaagcggcactgaatctgggttggtaactatgagacgagcaactgctccgcaaatgttgtccatggcggcaggaacggattccctgacaattgcttcggaaagggcttgcaaaattgtcggataagacctatggatgcaaaaaaaaaacaaaaaacatatacatcaaaactagattctgcagaaaagttcatttccgggaaacccactcgaatgatttttcctcggaatggaagacaatttcgcctagtgcaaaataggagttctgtcgcgctttggcatcagatccctggaaccggcgataaaaatgggacgtagggcatcgaaataagtagcacagcaaccttttaacgccttgcagcagtcagcaagtgcgccatagatgtatgcccgctgttctggtaaatcgcgctcctttaccttcgcctgaaacgaaataattgaatttcagtaagccgttcggaatatcgatggttgtatgaattattgccaagagaagatcgacctctctcctttgccacatcatgttcggtatttcgtgcaaaacctaccagcctttgaatatagaaatggtaaaggcgtccaaaataaagcgagaacagctccggctgaagggttaagccaaacatggggaacagattggcagcgttctcgaacagcatctcgtcgttctcgctttcctccgaacactcatcatctccgccgccgctctcctcgttaaactgacaggccattttatttgtgaagatgtccctgatgcaaccgaatataagttcggcgtgctcctggctgtttatcgccggcacgtacttgaagacatcgtagaggacgtcaagcatgcggagtacgaccgcaacctggtcgtcggtgcgcattatatgtgcaaactttggaatggcaatctcgcaggcgcgcttcaggccggcggcatcatccaacttgtggagagccgtaatgaacgagcaaatggagtcaatacatgccatacgaacgtcgccttgcggatgatcaatcatcttgtagacgttctcgaatgcagattgcaaatagggcgcgaaggcggcgccggtatgggtagcaaactccttgagtgacagaatggcctcctccttttcgacgatataatcattctccaccgggtaagcgtcttggtcatcttcgtcgtctgtgtgctctaaatcaatctctatgtcgggggcatctactagggccaaatcatcgtccgcattgtccgacacatttggcaccatgtcctccgaaaaaatcacagactccattatgcgatcaatgaacttggggaacacactggccatgctctcgttgacaactgatgacagggaggacatcaggttgtatatactcctgcggtactcgggatcatccggaccgtcttccagcatcatcaggcagaagttcattgtatcgtcggcaagaggaataatattatccttgcccaattcgcgacacagcgcggccagagtgtcgatagcttggatgcgctgactgtacatttcttttgggcaatccttcaccagacagccctgtagtacggtcatgatcctggggaaatatggcatcaggttttccttagctgctgctgacaccgctgctatggccgacaaagccatttcacgcatttgatttgagttctgcggttccataaccccaaacagactgcacaataagtttatcagggagtggactcatatttccgtagtatagtctagtcttaccgatccataagtgtgggtaaataaggaacaatatcctcatccagattctcgcaaaaggtctccagggcataaaacatacgatccatatgtttcgaatccggctcaccaacctgaaagaaaatacatttagtatgtttctgccaaacaatttgttggctttgttggtgcaaaacggaatgcagtcctcaaaaaacgtgaaaagaaccccatttgaagacaccttctttatgtaaccgacgaacttattactcatttaaataacaattaagaaacgagtcaatgaacatttaacatacgccaaaaagttaaataaaccagtgcgaaatgatatatctacaacagagctcttaatgtaatcaatctggcaaactattcaacaaattttaggtgtttgatgtgcaatcaagtacatagtaaacagtaagacatcgaaaaagcaccctatatttggcgaggaccgatcttcgcttgatctgtatcttgtctaagtacattatggaatctttggcaggtacggaatcgagatttggcccattgctgttatggccagcctttagaagcagcacaaacaaataaacgagaatgtaaaatatacaaattccaagttggtcgaagatggccacaatgattacctaccttgagttccagtaccagctggtttagatagtcgaacaacacgggtagaatttggggagcaaacttgcagatcgtcggctgaagaaactcggaaaactgaccgagggcgaagaatgcggcggtccgcacgaacataacagagtccaacactccagctttgatgatatttagcatgacctcgagatactttttcccaatggcctcggaacagccctcggcaataacgcccatgcaaataaaagaggaacggcgaagcacaggttccgggctctgcaacgcaggctccagcaaatccagtagtggcggaataaacttgtccggcaccatgtgaagggccatcaggtcgagtgtctgcgcagctgcattggatggactatttaggctctccgaggaaaagtaatcatcgtctagaataggaatagggttagcaagcatggcaacagaaatataaaggagcagttaccaccttccttgaggtcgtcctggcaaatcacttcgaaaagaacagatagtgtgggctgtagtagtttctgcttcataataattttcttcttgaggcgaactaggctgcctacaaaggtaagcacctgaacccgaatcgaagcgtcgaactgcttgtttctcgcaatcatcagacaaaactccagaagcagcttcacattaccggtcagcaagtggggcacatactcggccatgctgtcgatgatatcaaaggcacccatgaactcaatactgtaccccttttcgacaaaggcggccagggccttgagtatgagcggcacagccttaaccataatctgctcagcatcactatgtccacttacgaaaggcaacaagacgcatgaaccggtcagcatgttatgcacggtgggtgtggccatgttcccattcgcctcggcggtaactagaatgccggcaagcaatgggaacatagtatccgtgtggtccgaaaactgatcgggagcagcgtccatgagcgaggaaaagattgagctgccccgctcgctttctattggatcggggctgctgcaacgttcgtaaataaacttcagtatttcctccctccaggagttttgctcgccctcctcgtggcgcaccagcgatccaattataaaggccaccgtgcccttcacggtcttttccttcaccgcgatgaggacctgtagcatgttcgatttgattctaaaaaacatgcatccgttactgtatcatagtcattaaaaggtaaccagttaactcacgctgcctggtgctcggcgggaaccaactgccagtggcgtaactttttgacccgcctcttgaggagcacggcggcgacctgccgctcttggaccggcctgtccgacatcacgatctgggtgagaaccagcagagaatcgggattctcgtaggcctttagcatcttggctgtggactaaggaagcgaaagaaatggaactttattagcgacttttatggccctatgctatcatgctatcaacataagtaatttttcaattaggaagcgacgaagtgtgcgtccattcgagcaatgtaatggtatatccacgagtttaatgcaaataaaaatataatattaattaattattattaattataattatttttataatttttataataattttttttaataattattataattattatttatatataaataattatttctaaaaaagtgcaatagttttcggaagtttgttctgatcaaatagaacattaaacattaaattaaaaaaaaaaaaaatattatacacctatttttacagctaagtgtggattcaacttaactgatcagacaaacgtgaagcagtcagaaaggaaagcatacatgaaagacatccattggcgcccaggataacctcctttcttattgccggatggcccgctttgctcacctcacggattcgttccgtgtctatggtcaggatcccgttgattatatccagaatagctgcctccatttttggggagttactgttcgcgcccaggcggataatccaatgcaatccggtacaaattgcagacgacgttacgcggtattgagaattgaaaagtggaataccggggagaaatccccgtcgcacgttttgcgcttgttgcagtttacagtttatcgtaagcttattttacattctactcttgaattggctagcggttatcattgcggtttaacgagtggggatgtaacgtaaatttatctcgcgcagttaattggtgacttgtgttaacatttttctttaatatatgtatttatgtttttttgtttattatatatgtgtatttatgtttttttgtttattgtggagttttgatatatgcgctagcagcagtgatgcagtagaatactaaaaatatttacatttttgacatttgatcgaccggacaagtaagcaaaggccgcttcgacactagtatgcagccctggatcttttatcatttatcgacgtccatttttgatcgaagcgacgcgccttttttttgttttcgcgttcgcactgcaaactgtaactgtttaaggacaaagcggaatggacagtagcagtggaagccaaggaaatggcagtttcatggaccagaactcgctgggcatcctgaacatggacaatctaaagggtaagcaggtggagcacgccggaaataagccgaagcagcaagtaatcctcattccctacagtcttcggcgacttgtccagcttcagcaaaagtggaaggaggagcggcactggtcgggactctcccgccgtccacgagcggctccgagaagaacgactgcgtgcgctggagacactggaaaagccccgaccgtcgcgttccagccaagcaaagagcactgccctccagatgcgcttgtccacaaacatctcggagctggtaacagacgacaccatcgatctgaacagcagcagctcctttgctttggtcacgcccgccaccaagggcacaaacatctcttttgagcctgcggagatcaccggcaggtccacactctgccaggcgggaaaacagcgccgcagggagaagccatccctgtcggtggccgaaattctaaagtcatccttcgttgagaaggctcgcc

SEQ ID NO: 27173 - DNA, 3313 bp, DROSOPHILA
gggatttctccccggtattccacttttcaattctcaataccgcgtaacgtcgtctgcaatttgtaccggattgcattggattatccgcctgggcgcgaacagtaactccccaaaaatggaggcagctattctggatataatcaacgggatcctgaccatagacacggaacgaatccgtgagaatcaaatcgaacatgctacaggtcctcatcgcggtgaaggaaaagaccgtgaagggcacggtggcctttataattggatcgctggtgcgccacgaggagggcgagcaaaactcctggagggaggaaatactgaagtttatttacgaacgttgcagcagccccgatccaatagaaagcgagcggggcagctcaatcttttcctcgctcatggacgctgctcccgatcagttttcggaccacacggatactatgttcccattgcttgccggcattctagttaccgccgaggcgaatgggaacatggccacacccaccgtgcataacatgctgaccggttcatgcgtcttgttgcctttcgtaagtggacatagtgatgctgagcagattatggttaaggctgtgccgctcatactcaaggccctggccgcctttgtcgaaaaggggtacagtattgagttcatgggtgcctttgatatcatcgacagcatggccgagtatgtgccccacttgctgaccggtaatgtgaagctgcttctggagttttgtctgatgattgcgagaaacaagcagttcgacgcttcgattcgggttcaggtgcttacctttgtaggcagcctagttcgcctcaagaagaaaattattatgaagcagaaactactacagcccacactatctgttcttttcgaagtgatttgccaggacgacctcaaggaaggtgacgatgattacttttcctcggagagcctaaatagtccatccaatgcagctgcgcagacactcgacctgatggcccttcacatggtgccggacaagtttattccgccactactggatttgctggagcctgcgttgcagagcccggaacctgtgcttcgccgttcctcttttatttgcatgggcgttattgccgagggctgttccgaggccattgggaaaaagtatctcgaggtcatgctaaatatcatcaaagctggagtgttggactctgttatgttcgtgcggaccgccgcattcttcgccctcggtcagttttccgagtttcttcagccgacgatctgcaagtttgctccccaaattctacccgtgttgttcgactatctaaaccagctggtactggaactcaaggttggtgagccggattcgaaacatatggatcgtatgttttatgccctggagaccttttgcgagaatctggatgaggatattgttccttatttacccacacttatggatcgtctgtttggggttatggaaccgcagaactcaaatcaaatgcgtgaaatggctttgtcggccatagcagcggtgtcagcagcagctaaggaaaacctgatgccatatttccccaggatcatgaccgtactacagggctgtctggtgaaggattgcccaaaagaaatgtacagtcagcgcatccaagctatcgacactctggccgcgctgtgtcgcgaattgggcaaggataatattattcctcttgccgacgatacaatgaacttctgcctgatgatgctggaagacggtccggatgatcccgagtaccgcaggagtatatacaacctgatgtcctccctgtcatcagttgtcaacgagagcatggccagtgtgttccccaagttcattgatcgcataatggagtctgtgattttttcggaggacatggtgccaaatgtgtcggacaatgcggacgatgatttggccctagtagatgcccccgacatagagattgatttagagcacacagacgacgaagatgaccaagacgcttacccggtggagaatgattatatcgtcgaaaaggaggaggccattctgtcactcaaggagtttgctacccataccggcgccgccttcgcgccctatttgcaatctgcattcgagaacgtctacaagatgattgatcatccgcaaggcgacgttcgtatggcatgtattgactccatttgctcgttcattacggctctccacaagttggatgatgccgccggcctgaagcgcgcctgcgagattgccattccaaagtttgcacatataatgcgcaccgacgaccaggttgcggtcgtactccgcatgcttgacgtcctctacgatgtcttcaagtacgtgccggcgataaacagccaggagcacgccgaacttatattcggttgcatcagggacatcttcacaaataaaatggcctgtcagtttaacgaggagagcggcggcggagatgatgagtgttcggaggaaagcgagaacgacgagatgctgttcgagaacgctgccaatctgttccccatgtttggcttaacccttcagccggagctgttctcgctttattttggacgcctttaccatttctatattcaaaggctggcgaaggtaaaggagcgcgatttaccagaacagcgggcatacatctatggcgcacttgctgactgctgcaaggcgttaaaagcaattgtcagggaatccgttcctgccgccatggacaacatttgcggagcagttgctcgtctcatagttaccaacccagattcagtgccgcttggccaggtgctgcccgtgtggctcaaccatttgccactgaaggatgacaccgtggagaacgatgtgattcagaaggcgttccgtgtgctatacttgaaggcccgccccagcattgaggcacatcttgagcaaatcctggccatcaccatagaggcgagttacaagaaacagatgcctgacgtcgagacaaccgagagcgcggtggccctcatcaaagagattcgcgccaactacccggaactgttcagcaaagtatcgaacatgaatccagaagtgttcaattatgtgcaagccctgtaagcccacatatccgtgtgaaaaccaccaaacagctcagaacacccaacgtcctccgcccgcagattcatttattggaagtgatgcaagctttttatacgaatactttcgaaatagtcttaaatttcagttgtgcttctgtggagttaaatcattcaagatgagcgatctttaaaagggcaagatgaaggtttctacgcgccaaaaaacggaggaaaatgttttctaacttataaccacatccagtgagacattaatatgcattgaaataatatagggattacttgtttcattgaaggcta

SEQ ID NO: 27174 - protein, 129 aa, DROSOPHILA
MEAAILDIINGILTIDTERIRENQIEHATGPHRGEGKDREGHGGLYNWIAGAPRGGRAKLLEGGNTEVYLRTLQQPRSNRKRAGQLNLFLAHGRCSRSVFGPHGYYVPIACRHSSYRRGEWEHGHTHRA

SEQ ID NO: 27175 - DNA, 4123 bp, DROSOPHILA
gaatttaatgcaaataaaaatataatattaattaattaatattaattataaatatataaataattatttctaaaaaatttcaacagttttcggaagtttgttctgatcatgtatacatttctatacatttcatgtatagaggaatgtgcccatgccgaactatatggcactgtgttcatgtggcgtacatatatagatagatatgtacgcatgtatatagggaatgcgatccagccacgcggtcagaccgacatggagcagtcagaaaggaaagcatacatgaaagacatccattggcgcccaggataacctcctttctcattgccggatggtcaatttgacccgctttgctcacctcacggattcgttccgtgtctatggccaggatcccggtgattatatccagaatagctgcctccatttttggggagttactgttcgcgcccaggcggataatccaatgcaatccggtacaaattacagccgacgttacgcggaattgagaattgaaaagtgggataccggggaggaattcgcgaaaaagagaccagggctggaggcgcgttggcgttgcacgttgtgcccatgttgaagtttacagtttatcggaagcttattttacattctactcttgaattggctggcggttatcatttcggtttaacgagtggggtatgtgatacgtgattttatctcccacagttaattggtgacttgtgttaacatttttctttaaaatatgtatttatgtttttttggttattggtgagttttgatatgtgcgctagcaacagtgttatgcaatagaataatttattattaaattatttacatttttgagatttgatcgaccggacaagtaagcaaaggccgcttcgacactagtgtcagccctggatcttttatcatttatcgacgtccattttcgatcgaagcgacgtgccttttttttgttttcgcgttcgcactgcaaactgtaactgttaaaggacagagcggaatggacagaagcagtggaagccagcgaaatggtagttacatggaccagaactcgctgggcattctgaacgtggacaatctaaaggtaagcaggcggagcacgccggaaataagccgaagcagcaagtaatccgcatttcctagagtcttcggcgacttgtccagcttcagtaaaagtggaaggaggagcggcactggtcgggactctcctgccgtccacgagcggctccgagaagaacgactgcgtgcgctggagacactggaaaatccccgaccgtcgcgttccagccaagcaaagagcactgccctccagatgcgctcgtccacaaacatctcggagctggtaacagacgacaccatcgatctgaacagcagcagctcctttgctttggtcatgcccgccaccaaggtcacaaacatctcttttgagcctgcggagatcaccggcaggtccacactctgccaggcgggaaaacagcgccgcagggagaagccatccctgtcgatggccgaaattctaaagtcatcctttgttgagaaggctcgcctgttggaaaggaagctgcaggatgccagtcaggcggaggccagctatcacttatcacgtggcagctccagcagcctctcagattcattcaactgctcgcgcagcttaccgcgcactgcggacatgagtgaactgagtcttaacggaggtgggggattttcctttggatctgcctcgttggcggcggaaggccaggatgagagctttgctcccgccgagctaatgcagtccaaattggtgctcggtgaaatctcctgggcgcaggagttcacggccatgccgacggccacgttgagcacacaggcgttgaagaagattgccgcaccaacatccgagatagaaacctcggtgtccaagtaagcaacataaaatagtcttccaaatataatttgatcaactttcaacttttatttacagttctgtcttggccggagatccagacttttcgctgggcaactacttccagacgcgttcggaaaatatatggaacattgtgagcaatagcagcccgaatcgttcgcgaaccaagcaatggcagcccgaatcagaaagtaacgtgacactggattcggttggcgagaagaccccacagccagacaataaaacatacactaaaacggatgccataactggctcgaatctcggacgcaatcttatgcgtaagatgcaacaggatcggattgaaactgcgctaaagagcaggaatggtctggcagccaaagagaccaagcgtccgccgtcgagctccgagatcctaagtctctccgcgatcgacatggcgctaagggacatagatctcaattcggatacatccactgtagaggttgtcaaccacctgtgggagcatggtcgtggaaacaattatgacgatggggaaaacaaggagaaccagagcagcaactcccatgcggagcgcactttgtgcggctccaacaagcttaccgacaccatgagtttcacggactctgtgctaaactcaacggattttcgtcatttgcagcagagcatttcgcgcaagccgctcagtccaaatcctgccgcagatccaatcgtcacgcgctggaagcgtgacgaccaaggagcaattgtggccaacccgacaaccggtaagttggcccaatagcccattaactgtgatgacatcacttcctctttcctgcaggaatatcatacagatggttgccatacagcggtccgacaacaagttgtgggccattcccggtggaatggtcgatcccggcgagaatgtcagtgtcacccttaagcgggagttcaccgaggaggcattgaatttcacggacaaagccaacatggttgagcgattttttcaagcgggaggcgttcaggtataccaaggctacgtagacgattttcgaaacacggacaacgcttggatggaaaccactgcgctgaacttccacgatgaagacgggagccaggtgggacaattggagctaatggccggtgacgatgcctccaatgtgcgctggacggacgtcgactcgaatctcaagctgcacgccaatcatgccgacatagtccgtgagggtgtcatccgacgaaatgcacactggtagaaactagactgaaactattagagttaagatcaactgcctaatggttgaagaaaaaccaattttaaataataacatagccttcaatgaaacaagtaatccctatattatttcaatgcatattaatgtctcactggatgtggttataagttagaaaacattttcctccgttttttggcgcgtagaaaccttcatcttgcccttttaaagatcgctcatcttgaatgatttaactccacagaagcacaactgaaatttaagactatttcgaaagtattcgtataaaaagcttgcatcacttccaataaatgaatctgcgggcggaggacgttgggtgttctgagctgtttggtggttttcacacggatatgtgggcttacagggcttgcacataattgaacacttctggattcatgttcgatactttgctgaacagttccgggtagttggcgcgaatctctttgatgagggccaccgcgctctcggttgtctcgacgtcaggcatctgtttcttgtaactcgcctctatggtgatggccaggatttgctcaagatgtgcctcaatgctggggcgggccttcaagtatagcacacggaacgccttctgaatcacatcgttctccacggtgtcatccttcagtggcaaatggttgagccacacgggcagcacctggccaagcggcactgaatctgggttggtaactatgagacgagcaactgctccgcaaatgttgtccatggcggcaggaacggattccctgacaattgcttcggaaagggcttgcaaaattgtcggataagacctatggatgcaaaaaaaaaacaaaaaacatatacatcaaaactagattctgcagaaaagttcatttccgggaaacccactcgaatgatttttcctcggaatggaagacaatttcgcctagtgcaaaataggagttctgtcgcgctttggcatcagatccctggaaccggcgataaaaatgggacgtagggcatcgaaata

SEQ ID NO: 27176 - DNA, 1951 bp, DROSOPHILA
atggacagaagcagtggaagccagcgaaatggtagttacatggaccagaactcgctgggcattctgaacgtggacaatctaaagagtcttcggcgacttgtccagcttcagtaaaagtggaaggaggagcggcactggtcgggactctcctgccgtccacgagcggctccgagaagaacgactgcgtgcgctggagacactggaaaatccccgaccgtcgcgttccagccaagcaaagagcactgccctccagatgcgctcgtccacaaacatctcggagctggtaacagacgacaccatcgatctgaacagcagcagctcctttgctttggtcatgcccgccaccaaggtcacaaacatctcttttgagcctgcggagatcaccggcaggtccacactctgccaggcgggaaaacagcgccgcagggagaagccatccctgtcgatggccgaaattctaaagtcatcctttgttgagaaggctcgcctgttggaaaggaagctgcaggatgccagtcaggcggaggccagctatcacttatcacgtggcagctccagcagcctctcagattcattcaactgctcgcgcagcttaccgcgcactgcggacatgagtgaactgagtcttaacggaggtgggggattttcctttggatctgcctcgttggcggcggaaggccaggatgagagctttgctcccgccgagctaatgcagtccaaattggtgctcggtgaaatctcctgggcgcaggagttcacggccatgccgacggccacgttgagcacacaggcgttgaagaagattgccgcaccaacatccgagatagaaacctcggtgtccaattctgtcttggccggagatccagacttttcgctgggcaactacttccagacgcgttcggaaaatatatggaacattgtgagcaatagcagcccgaatcgttcgcgaaccaagcaatggcagcccgaatcagaaagtaacgtgacactggattcggttggcgagaagaccccacagccagacaataaaacatacactaaaacggatgccataactggctcgaatctcggacgcaatcttatgcgtaagatgcaacaggatcggattgaaactgcgctaaagagcaggaatggtctggcagccaaagagaccaagcgtccgccgtcgagctccgagatcctaagtctctccgcgatcgacatggcgctaagggacatagatctcaattcggatacatccactgtagaggttgtcaaccacctgtgggagcatggtcgtggaaacaattatgacgatggggaaaacaaggagaaccagagcagcaactcccatgcggagcgcactttgtgcggctccaacaagcttaccgacaccatgagtttcacggactctgtgctaaactcaacggattttcgtcatttgcagcagagcatttcgcgcaagccgctcagtccaaatcctgccgcagatccaatcgtcacgcgctggaagcgtgacgaccaaggagcaattgtggccaacccgacaaccggtaagaatatcatacagatggttgccatacagcggtccgacaacaagttgtgggccattcccggtggaatggtcgatcccggcgagaatgtcagtgtcacccttaagcgggagttcaccgaggaggcattgaatttcacggacaaagccaacatggttgagcgattttttcaagcgggaggcgttcaggtataccaaggctacgtagacgattttcgaaacacggacaacgcttggatggaaaccactgcgctgaacttccacgatgaagacgggagccaggtgggacaattggagctaatggccggtgacgatgcctccaatgtgcgctggacggacgtcgactcgaatctcaagctgcacgccaatcatgccgacatagtccgtgagggtgtcatccgacgaaatgcacactggtag

SEQ ID NO: 27177 - protein, 565 aa, DROSOPHILA
MRSSTNISELVTDDTIDLNSSSSFALVMPATKVTNISFEPAEITGRSTLCQAGKQRRREKPSLSMAEILKSSFVEKARLLERKLQDASQAEASYHLSRGSSSSLSDSFNCSRSLPRTADMSELSLNGGGGFSFGSASLAAEGQDESFAPAELMQSKLVLGEISWAQEFTAMPTATLSTQALKKIAAPTSEIETSVSNSVLAGDPDFSLGNYFQTRSENIWNIVSNSSPNRSRTKQWQPESESNVTLDSVGEKTPQPDNKTYTKTDAITGSNLGRNLMRKMQQDRIETALKSRNGLAAKETKRPPSSSEILSLSAIDMALRDIDLNSDTSTVEVVNHLWEHGRGNNYDDGENKENQSSNSHAERTLCGSNKLTDTMSFTDSVLNSTDFRHLQQSISRKPLSPNPAADPIVTRWKRDDQGAIVANPTTGKNIIQMVAIQRSDNKLWAIPGGMVDPGENVSVTLKREFTEEALNFTDKANMVERFFQAGGVQVYQGYVDDFRNTDNAWMETTALNFHDEDGSQVGQLELMAGDDASNVRWTDVDSNLKLHANHADIVREGVIRRNAHW

SEQ ID NO: 27178 - DNA, 2016 bp, DROSOPHILA
ctccctccaggagttttgcttgtcctcctcgtggcgcaccagcgatccaattataaaggccaccgtgcccttcacggtcttttccttcaccgcgatgaggacctgtagcatgttcgatttgattctaaaaaacatgcatccgttactgtatcatagtcattaaaaggtaaccagttaactcacgctgcctggtgctcggcgggaaccaactgccagtggcgtaactttttgacccgcctcttgaggagcacggcggcgacctgccgctcttggaccggcctgtccgacatcacgatctgggtgagaaccagcagagaatcgggattctcgtaggcctttagcatcttggctgtggactaaggaagcgaaagaaatggaactttattatttatggccctatgctatcatgctatcaacataagtaatttttcaattaggaagcatttcaagaacatgagagaccaaagattcttggaaaagaatgatggtatatccacgaatttaatgcaaataaaaatataatattaattaattaatattaattataaatatataaataattatttctaaaaaatttcaacagttttcggaagtttgttctgatcatgtatacatttctatacatttcatgtatagaggaatgtgcccatgccgaactatatggcactgtgttcatgtggcgtacatatatagatagatatgtacgcatgtatatagggaatgcgatccagccacgcggtcagaccgacatggagcagtcagaaaggaaagcatacatgaaagacatccattggcgcccaggataacctcctttctcattgccggatggtcaatttgacccgctttgctcacctcacggattcgttccgtgtctatggccaggatcccggtgattatatccagaatagctgcctccatttttggggagttactgttcgcgcccaggcggataatccaatgcaatccggtacaaattacagccgacgttacgcggaattgagaattgaaaagtgggataccggggaggaattcgcgaaaaagagaccagggctggaggcgcgttggcgttgcacgttgtgcccatgttgaagtttacagtttatcggaagcttattttacattctactcttgaattggctggcggttatcatttcggtttaacgagtggggtatgtgatacgtgattttatctcccacagttaattggtgacttgtgttaacatttttctttaaaatatgtatttatgtttttttggttattggtgagttttgatatgtgcgctagcaacagtgttatgcaatagaataatttattattaaattatttacatttttgagatttgatcgaccggacaagtaagcaaaggccgcttcgacactagtgtcagccctggatcttttatcatttatcgacgtccattttcgatcgaagcgacgtgccttttttttgttttcgcgttcgcactgcaaactgtaactgttaaaggacagagcggaatggacagaagcagtggaagccagcgaaatggtagttacatggaccagaactcgctgggcattctgaacgtggacaatctaaaggtaagcaggcggagcacgccggaaataagccgaagcagcaagtaatccgcatttcctagagtcttcggcgacttgtccagcttcagtaaaagtggaaggaggagcggcactggtcgggactctcctgccgtccacgagcggctccgagaagaacgactgcgtgcgctggagacactggaaaatccccgaccgtcgcgttccagccaagcaaagagcactgccctccagatgcgctcgtccacaaacatctcggagctggtaacagacgacaccatcgatctgaacagcagcagctcctttgctttggtcatgcccgccaccaaggtcacaaacatctcttttgagcctgcggagatcaccggcaggtccacactctgccaggcgggaaaacagcgccgcagggagaagccatccctgtcgatggccgaaattcta

SEQ ID NO: 27179 - DNA, 164 bp, DROSOPHILA
tcccacttttcaattctcaattccgcgtaacgtcggctgtaatttgtaccggattgcattggattatccgcctgggcgcgaacagtaactccccaaaaatggaggcagctattctggatataatcaccgggatcctggccatagacacggaacgaatccgtgag

SEQ ID NO: 27180 - protein, 9 aa, DROSOPHILA
SHFSILNSA

SEQ ID NO: 27181 - DNA, 9667 bp, DROSOPHILA
aatcaacacagaaggagccaacgtgttgtatcaaaaggccattgatctagttgctcctactaaggacacaactatgttggatatttgctgtggtactggcaccattacccttgcgttcgccaagcactgcaagaaagtgatgggcgtggagatcgtccctgatgcgattaaggatgccgagtttaatgcggaagcgaatggcattaaaaatgcaaagttctttacaggaaatgcagatgatttcatcaagagtatggtgcgcgaagctctctacgatcaggagccgggtaaaccattggatcttattgccgtggtggatccccccagggctggactgcgtaagtttacgttgcttaaatattataaatttgctgaattattttaaggttcaaagcgctatacctttccaaatttcttatttgtttttttcagaccaccgctcgatagccgcaattcgatcagccgatgccatcaatcgtctggtctacgtctcctgcaatccgcacagtgctaagcggaatttcatcgagctggccagaccggagtctaagcaatacaagggggagccattctacccaaagtccgctgtggccgttgacatgtttccccacaccatgcacaccgagctggtcattctgttcgagcgtgaacctaaaacaaaggcggatgagaagtcatcgccagcggagggagctgcacagtcaaagtctgaggcaaccgaagaagctgttagcgaggagaacaccacatccgtaacgtgacgtgtttgttgccgggtacagttcacttcgctgcaatctcttgcacatttgcttaatctctttctataatcttttaggtcagttgcgattcgctgagacacccaatatgtctcagtacctcctatctgccgcgatgctgccctctatcattgtctctctttgtggcgactgctctacgacttttattgttttaaattgatttaattgtatttacgctgtgcgacggggaggaagtggaaaaagtgacagaagcgacttcctatttagcaaaagactaagtttaaagccctgttcaactcgacatagtccgacatccccatcagtgttattcaggcctctggaggcccctgtgtgcgtgataagaatcgctgctccggtggaagtgtggtgctcataaagttctcataaaggtgtagaaaccgcgtgaaaaaacagctgagaggtgctacaagtccaacgccccctcaagggcaaattgatgaacaacgaccctgacaacgatcattgatcatgtccgaccaggtaccagttaacgattatttcatagtctaaacatatgttctattgttaaaagtagaaagggtagtatttaaaagatgttgacgttgatattgatctatcaaccatattaaaagattcgaaaatgacttcatgcgtatgacgcgaattcagttgtttcgttgtttgtctaaagataagttttattaatttactaaggcaatttgagttatggctgtttttttttataaagttgaatatttaaaaagtcgtagaagtgcaattaactagttaaggccagagatgtgccgtaatgaaattggccaacttaatagttaatacgtatggggctgatcgcacggatattgctcaataaaatgtgtttatataaatcttatctaaggtaaacaatcgcattcgcttatttcgcctttccgattacatgttcttaacgagaagtggttggatgatgtaaacaacagatgtagccgtaagcaaagtcttatagaataaaacaaaaaaatattattgttttgaaaaagagaacaacaagcaaacgtgaccgatatcatgttgaatatactatgtagaaaaacaaatcgggacgcgacagccctgaatttttatgcgactcgacttcctagaagggggtgtgttaatagcacacgtacacacacataaacatacatataactatagtggaaagccaaaataagctttcgtaaacattaacgaaataaacaagaaaaacaaataaattggactttggagccagtggggcgattcggctactcggcaaattgattgtacaaaatatagcaacataaataaatatgaaaacattgtgcgccgcaactattataaatcaagagaaaaggagaaattggcaggaaagtgaataaaatgcggctgaatttgtttattcattcggctatatttatggcctcgtgtaagccaagatatagcaacaactagcaacacccaaaatatgcgattacgatcggaacagggagcccaagaccttgaccggagagctttgtttccgaagccgaaaagcttgaatagttcttgccttatcaaacaaacactcaactaactgtgcgatgtaaacaaacagcgaggaaaacagcaaattttcaaccgacgaaaaccggttcccctagagagagatatatggcggtcttccggagagagcttttcggctgatgccatgtctgtggatgtggatgtcgatgtgctggtggatgtggacgagaagctgcggcgagggcctggctacgactacgccccacacatcggactgaaaaccgcttcacgtgcgtaacaccatcgccgccgacagctgcacacgaccaacacgttttctcggcggagcaaatggcctcgtggcatagtgggggatggaccggggtttgggttctccaatgtgctcttgttgtcatccgcgctcaggctgcgagcttttggattgcgtgctacgccgagcagcgcaactacacagcacattttatggggagttttagtgggataccctgtgaatgtgggtatatttgaagactgacctcacgtaactcggccggggattgggtttcacttgtgaattttggtatgcaaaagggtttgagtatgtttaaacttataatggcaaaagataatcaatgagtaaacattattttatccgaccagctagtatattgcactgtattttctagttatatattctttttattgatttagcccaaagcaacattccttgctaatattctcctagttattctacagacaaagcactctgttttcccttatcggtactttaaatggatcaaccagtgccgtttaattatgcccactcataaacagttagcctaggaacattttgattaccacctagacggttgattaaatttcgcatattccgctttgttctcctgtcctgattctggacgatcgagggcattgctaattcgattaatcttcatgttttctgtattatctggtgtgtttcgctgttttctgtttttgtttcgtcgctgcccgtcggtagaggccaacaacatttcgaaaaagccccagccgcaactgtaccgccggactgaaaaccaaaacaaatcgccaagtcgtcggatacgactacgactctcgcacaaagaaaaaagctccgccactcagtttcgataaaaagaaatcgtttaaattgcgcgcacaacaaaagcgcccgaaacagttgcgattgcaacgtcgatttgtgacgacggaccgtctacagcgtcctagttcccactgtccacaaaggatacaaacccgaataacaaaaccagcagtacataaaagccaacaggcccaatacccaagtacaaaatgcttgcctagctaaagaaactgaaatattgcgcatacgccgcatagtgcaaacaattaactgtgatacaagtggaattttcttgatttcgttggtccccgcaccaaagcaacctatcctacctaacttacttgtgctatccccaaaaaccaagaagccgaaaagaagcagaatgtcggtgccaatgctgctgacccccatggaagcccagagtccggatgaccacatgaaaaatgtaattacccacatccagtggacagtaccggaaatctttgtaaatgcatactttaggctttacagatttttcgactgtcggcatagtgcaggtgtttgagcttttgactttttggggtgtctgaaggtcgctgctgttgtcatcggacatttgcatgtcttctgcgcgttttgtttatgcaattgtcgtgggtaaaggaaaatctatattcgacgggggcaggggggcttttaacgatgtatgtatatatatctatcagggctatcatatgggcggggaaataattgccaacttggttaataacaaagtgtttcaagcacacctaagttggggattggtgtaaataaaaaatgcctatgtatgttttcccgccttgcgagaatggtatcctattgatgtcatttccgtcgaagtaatccagtaattcacgtacagtaccacccctgggatcccggtataatatatcccactcttttgagtttctcttcaaactgaatgccacatgttgcaaaaggtcgctgcctcacgtgactcaaccactcaagcaccaagcatgctataaggttaagctttcgagagggtccccgctcaagtggcccatgtctgattagatgttggcttattaatttctgaagaggctgccataaactacacatagtatatggctgatatatgagctctgatacctagctgactgataacgagttcagctgaaatacaagccacgaaacacatgggccagcttttcgccttcactataaataaaacgcacgccaagaagtgagtggaagtagaaacggcccaaacatgaaaagctttttgagtctgaaatttcccaaaacaaaaaacatatggcagagtattcagagagatatagagcgagtagcagagcgcctgcgttaggaacacgtgaaaaggtgtttgagaaatcggagcaaagctcgaatatcataagaaaattaacatagagttgagaaattaaaagctgaaccacatattgctcgaaatcaaaattcttttgagaactattcgatgtttggggcgttactgtgggcgtttctccccccgtagaaactaacaaggctatgctaattgtgccaagaacgtgaaatcgccaggaaatcgctcgcaaaacgcaccttctgacgcaattagtcaaaaataaaaaatgcggaaaactatatgctgccttgctagcaataacaactataactagtgccaaatcgcgcagttttgaaaatttcaccagaacacgcgacttttgccatcgaaatgttgccaaggcggcggatgaatatacatgccaaaaatctacatatagccaaatctgaacagtcggtcggttaggtgggtgggtggttggtcgccttttgctccgccgataataggtctataaagtaggcggctcggtaaacaatttgtgtgcgggcacagcacgtgctaatttattcaatatttcggttaatttatgggtccgctccacttacgtaaactgcgcccgctgcgagtgaatttagcgcccagttgtcaggggatcgtcggcaggtgtagggcactcagcagtcgttgcatcaccgatcctctgccgtggcattcatggcagtcgccggcccagaagtcgcagcagcgacaaaaacagcaaccgctgcttaaaccgcctcaattgcaaccgcttccgtgcggcttgcgcgcgattcgctcaaaggtaaaccgctcgatatcgaacaatttgtagcgcgtgctgctacttacatttttcaagtggaatgggaggaaattaaattattgcctcctgtgcttgacgtataaaaatatatttctaattaaatatttctcaatttgttgaagggccttagcaatttttctgtagaactatgtttattaactttccaatacttttaacctgaattgatgaacgccatagacgaattagttgtttcaatgaatacaactaaatttatgacgaatagattgtaaatacacacgtacgagctgggctataattaaatgaagccataattcaattttatttcccgggcagatgggctagatctcaaactatgggtttccgtcaatatatttttatataaatattaggggttatctacgctttgacaaatagttacgcaaatagaaatttgacgaaggcaggcttagcaaaaaggcacgtataaatcaaatgactatacgtcagatcagtgtccaatcgagcgactcaagtggttcgaatatttattgttttttttttttaatagctaaatagctaagctaagctgttgataataggcggaatgatctttagtcgggccccagtacaacacgtgatcttgtttgcgcctctgaaagtcacgagcggttctggagcgactaaagacgcgtgcttatcgcgcgaacttgttttcgattctaaatcgagaaatcggcgattccgacgagccggcgggggcattgggagcacgggggctagggagctagggagcagagacagcagacagtcgacgccccgcttagagaaactttatcaggcagaaacggaatccgcaaggggtcatcgactaatctcgctggctcagcaggaaagttgccgagcatttaatagcggactccgccgctcgatcgactttcagtcggcgcgcgatctccactctaacccgatggccatgtctcggactgtactaatcctggccgttgccttgtccttgcagtgtgccgccttcgtggacggagcctccatcacctatggaaccggaaacgagctagagtcgggatctggatcctccgccgcctgtaagcccactctgcgggagttcaatgtgcggctggaggttcccctggccgccgaggagcgactggggcttaccggcgatgtgaaagccctcggcgagtggcagctgtccagaagtgtggctctagaatcgctggacgagctcaactggcaggccacggtggcccttcagtcctgccgccagctggagtaccgctactttgtctacgtggaggatctctctggctacaagcagatccgccgttgggaaacccatttcaagcccaggtccctgggaccctgtacggagctacagtgcagccagttggacgtcttcggtattacgtcggacaactccgatctaaagccgcaggtgcaccgcggctggctgaaccatgaggccattctgcagctcaagttcaatggcgagaagatgttccaagtccacgacatcgagacctttgacccccagcacgtccagctgaagattgtgcccgtggagaagaccgctggcctgcatgtggagtactccaaacaggagtacggcaagagccagctggagctgcagcctactttcggagtgccctacaccaagggggacattgtcatctttcacatcacgctgccgctggagaggatgatggagcagcacttccgcttggagtgctacagcatgtccaacgaactcctgggcagtgccactctggtcacctcggacctgactggcagcgagggagtgctccacctgccgattaagtcggccaagaatgcagatgagaccctggccaggctgaggcttccctatgtcgcggtgcagccttaccgctactcgccgctagacttcaagaacacctatgctcactactggcccaagagctggcccaacctggatgtgggtcatcgtggaaatggcaagagttacattgcagacgctcctgcggaaagggagaacactatcgcgtctttcctgagcgcccatgaacatcacgcagacatgatcgagttggatgtccatttgactgctgatggtgtgcctgtgatttatcacgatttcggactgcgaactgctccgcctggcaagcagatcagccgcccagaccagctggagtacgtgctgatcaaagacataaactatgagctgctcaaaaggctgcgcatcttctctgtgatcgcaggccaagtgagggagtatccctcgcacaacgccgagcccaggatggaacaccgcatattcccaacgctggtggaggtactggagaagctgcccaagtcactgggcattgatgtggagattaagtggccacagcgtcgccagggcggaggatcagaggctgagcaaacaatcgacaagaacttcttcgccgacaaggtgatccatcaggtgatccagaagggctgtggcagaccgataatcttctccagcttcgatgctgacatgtgcacgatgctgaggttcaagcagaacgtcttcccagtgatgttcctcacgcagggagagacgaagaagtggcagccgttcctggatctgcgaacacggacctttattgcagccgtaaacaatgctcaagctttcgagctggctggcacagctccacacgccgaggacttcctgggcgaaaatgcatcagaaatgctgcgaaaagccaaggatctgggccaaatagctgtgatctggggcgacgattgcaactccaaggagcgggtgcagtacttcacccggatcggggctaccgccacgtgctacgatcgcagtgatctcttcatgccggagggcaagcgcgaagccttcttcaaatcacccgcactgatggccgagttcgcggcccagtgccggatctaagaaatggggttactagaatgaaacgggcgggtacaattaagctatggctaatcattaggctttttaagttagcttgtatatttatttaaacactaaccgggaaaagagaaatgtgggaagctttaaagtggttgggtaatttgtagtttctcgttgcccaacggaaacaacgaaacggagacccataaataaatcatctctatgcacgttaagccgtcatttggcaaaattacacatgcaaaaaaggaattcccccaaagttaagtagcaccacaaaagacaatgggaagaaagcgaagcgacgaatcgataataacaaaaatatatacacctacattacgtgctttaaatcaatctatctatacctcaatgcaaaacttgcgaaagagatgttgctaataagcttttgctatttaaatcgaaacaacaaattactattaaaatgtggacggaacagatatccacaccgatgcttgtgtaacttgtgcagaaacactctattgtaaattagaagacatcctatttaactgttgtaaatctaatttgctgcgtctttgtacaatttgaaaatttacgtttgttttcaaaaattgtttataatgtatacattcgtgtaaaccatttttaagaatcaattgtatcgacttaagggtaaacacaaatatttaaagaagtcgcttacacctatccaactctaagaaaaagcaataatatattttgatctatattacaatcagttttatgacaaaaaccaaaagtgattgattcgtatgtaaataaaatcacactaaatattttcataaaaatttcaacgccaactcagtcgaatgacttgttttactctgatctcaggcaaatgaaaaaaaagaaaagaaatgcctgccccacgaccaaaagcgtatgtaaaaattcgatccgcttacatttgatggccccgtgacgaatgtaaaaacagccatgaaaatgctgggcccgaaacacggcccataaacggaaaatggagagtggaccgtaaaaaggtttggccctcgtgctggaagtcaggcctaaagtccgttcggtttatgaccaattagagagcgcctcatttgcatcggtcttggcatggccaaatgcgaatgtcttctcgctgcgggcctggttccattgatgctgaccagctccatcgtggccacttggacttggagatgtttgtacaaagaatttccag

SEQ ID NO: 27182 - DNA, 2392 bp, DROSOPHILA
aaagtgacagaagcgacttcctatttagcaaaagactaagtttaaagccctgttcaactcgacatagtccgacatccccatcagtgttattcaggcctctggaggcccctgtgtgcgtgataagaatcgctgctccggtggaagtgtggtgctcataaagttctcataaaggtgtagaaaccgcgtgaaaaaacagctgagaggtgctacaagtccaacgccccctcaagggcaaattgatgaacaacgaccctgacaacgatcattgatcatgtccgaccagtgtgccgccttcgtggacggagcctccatcacctatggaaccggaaacgagctagagtcgggatctggatcctccgccgcctgtaagcccactctgcgggagttcaatgtgcggctggaggttcccctggccgccgaggagcgactggggcttaccggcgatgtgaaagccctcggcgagtggcagctgtccagaagtgtggctctagaatcgctggacgagctcaactggcaggccacggtggcccttcagtcctgccgccagctggagtaccgctactttgtctacgtggaggatctctctggctacaagcagatccgccgttgggaaacccatttcaagcccaggtccctgggaccctgtacggagctacagtgcagccagttggacgtcttcggtattacgtcggacaactccgatctaaagccgcaggtgcaccgcggctggctgaaccatgaggccattctgcagctcaagttcaatggcgagaagatgttccaagtccacgacatcgagacctttgacccccagcacgtccagctgaagattgtgcccgtggagaagaccgctggcctgcatgtggagtactccaaacaggagtacggcaagagccagctggagctgcagcctactttcggagtgccctacaccaagggggacattgtcatctttcacatcacgctgccgctggagaggatgatggagcagcacttccgcttggagtgctacagcatgtccaacgaactcctgggcagtgccactctggtcacctcggacctgactggcagcgagggagtgctccacctgccgattaagtcggccaagaatgcagatgagaccctggccaggctgaggcttccctatgtcgcggtgcagccttaccgctactcgccgctagacttcaagaacacctatgctcactactggcccaagagctggcccaacctggatgtgggtcatcgtggaaatggcaagagttacattgcagacgctcctgcggaaagggagaacactatcgcgtctttcctgagcgcccatgaacatcacgcagacatgatcgagttggatgtccatttgactgctgatggtgtgcctgtgatttatcacgatttcggactgcgaactgctccgcctggcaagcagatcagccgcccagaccagctggagtacgtgctgatcaaagacataaactatgagctgctcaaaaggctgcgcatcttctctgtgatcgcaggccaagtgagggagtatccctcgcacaacgccgagcccaggatggaacaccgcatattcccaacgctggtggaggtactggagaagctgcccaagtcactgggcattgatgtggagattaagtggccacagcgtcgccagggcggaggatcagaggctgagcaaacaatcgacaagaacttcttcgccgacaaggtgatccatcaggtgatccagaagggctgtggcagaccgataatcttctccagcttcgatgctgacatgtgcacgatgctgaggttcaagcagaacgtcttcccagtgatgttcctcacgcagggagagacgaagaagtggcagccgttcctggatctgcgaacacggacctttattgcagccgtaaacaatgctcaagctttcgagctggctggcacagctccacacgccgaggacttcctgggcgaaaatgcatcagaaatgctgcgaaaagccaaggatctgggccaaatagctgtgatctggggcgacgattgcaactccaaggagcgggtgcagtacttcacccggatcggggctaccgccacgtgctacgatcgcagtgatctcttcatgccggagggcaagcgcgaagccttcttcaaatcacccgcactgatggccgagttcgcggcccagtgccggatctaagaaatggggttactagaatgaaacgggcgggtacaattaagctatggctaatcattaggctttttaagttagcttgtatatttatttaaacactaaccgggaaaagagaaatgtgggaagctttaaagtggttgggtaatttgtagtttctcgttgcccaacggaaacaacgaaacggagacccataaataaatcatctctatgcacgtt

SEQ ID NO: 27183 - protein, 636 aa, DROSOPHILA
MSDQCAAFVDGASITYGTGNELESGSGSSAACKPTLREFNVRLEVPLAAEERLGLTGDVKALGEWQLSRSVALESLDELNWQATVALQSCRQLEYRYFVYVEDLSGYKQIRRWETHFKPRSLGPCTELQCSQLDVFGITSDNSDLKPQVHRGWLNHEAILQLKFNGEKMFQVHDIETFDPQHVQLKIVPVEKTAGLHVEYSKQEYGKSQLELQPTFGVPYTKGDIVIFHITLPLERMMEQHFRLECYSMSNELLGSATLVTSDLTGSEGVLHLPIKSAKNADETLARLRLPYVAVQPYRYSPLDFKNTYAHYWPKSWPNLDVGHRGNGKSYIADAPAERENTIASFLSAHEHHADMIELDVHLTADGVPVIYHDFGLRTAPPGKQISRPDQLEYVLIKDINYELLKRLRIFSVIAGQVREYPSHNAEPRMEHRIFPTLVEVLEKLPKSLGIDVEIKWPQRRQGGGSEAEQTIDKNFFADKVIHQVIQKGCGRPIIFSSFDADMCTMLRFKQNVFPVMFLTQGETKKWQPFLDLRTRTFIAAVNNAQAFELAGTAPHAEDFLGENASEMLRKAKDLGQIAVIWGDDCNSKERVQYFTRIGATATCYDRSDLFMPEGKREAFFKSPALMAEFAAQCRI

SEQ ID NO: 27184 - DNA, 5117 bp, DROSOPHILA
ttcaaagtaggcgactacgccagggccacctacgtggatggtgtggactacgagggcgctgtggtgtctattaacgaggagaagggcacctgcgtactccgctatttgggctatgagaacgagcaggaggtgttgctcgtggacctcctgccgtcctggggcaagcgtgtgcgtcgcgagcagttccttatcgccaagaaggatgaggacgagcagttgagccgccctaaggcatccgctggtagtcattcaaagactcccaagtcatccagaaggagtaggatctctggcggactggttatgccgcccatgccaccagtaccgcccatgattgtcggacaaggggacggcgccgaacaggacttcgtggccatgctcaccgcctggtacatgtccggctattatacgggcctctaccagggaaagaaagaagccagcaccactagcggaaagaaaaagacacccaagaagtaattccatcttatctcatcatcacatcacatcttttcgaaagacttgtagatattaagaaaacagaacgattaaatttattatattaaagagtcagtatcgtcatggtgggatctcgtttcaattgctacataaatggaaaaaaaaaatgccgaggcaggcagaaatttaggttgacattcaatatggccacttgagaaaatcagtgcttcgatacatttcgtagcgagcggttgagtttgtagtataacggaattttcataaccttcgatagatcgtagaatggcgatattttagctggcagtatacaaatcagaaaagaaaaaaaacggatattttgattggtaagcagactttcttacactgcaatagatttctttaactttgggtatcgtgtagctgttttaaaatcagaagctgaaaaattttattgataaaaaataagatataatgataaagagagtacatggtagtattgcctaattaacaaactagctaaaaatgcgcttggaccttttaaccgtccatattcaacactgccaaatgcatcctttattttcacaggcttacgatttgaaatataagtggtaaatccttctcttttgcaatgccaaaccagatgagagtgctggactttggcgatggatcggtgcccatccagctggactatccagattcgaagatcttcagcaagtgcagtagctacggcgatcgtgttccgggtacccattggaacgaaatcacagtgcaccataagggccgcctggaatactcgccaaatccggagcagataatcctggatgccttataccaggcgatagacggtgcggacttctttccggtgttctaccaggtggcctccacatagctcaaacatccgacatctgagttttaaactacatacaatttttagcgtgggaagaacatggataccatgctggtcaggaactgcaaggcggccattgataagctcttcaaacagcggctgtccattaatctgaaaggaggcgcctccatacccatcagtattcaactgggcgtagcccagtaccaaaggcaccagataactccaacgttccacatcgcacgggtggtcaccagactgatgaaacaattgattcaaagggacggtgtggatgggctacttaatctggacaactttgggagtcatccggagtttaaaaaccttgtggtaagcctgggcaatccgagcatcctgatgaacgtgtgccaggtaatacacaatgatgacaatgaacgctttcggctgaacggatttatattgtctaacaaccgcattcgggatatacggcccttgacgctactcgccaatgtggactacgccctgctcgacttaaggggtaacaaggcgagttgactcctcctggttatatgagccctatataaaagttcctttccagattaagtcagccgaacgtttgtgccgcgctctagaacaattccgggccagagaactgcttttggagaacaaccccattgtaaagatatccaactttccggcgaacattaaatcgctggagagtaacttcgagttggtggtgagtgcacgccatgtcgactttctattaaaatatcgccatattactatcctactccgcaggatggaaagcctttcaacatgctgcacaagatcttttctcctctggatgtggagatcgatttggaagtggatggtgcgcggattgatacaaataacatgtggaagttgcccgagtttgagaacagccagcattggcatgcctttatggtgggtttaccctggaacccctaggattatcatgtttgatgcatatttatttttaatagatacccgatcccagtcatgaatttaaccaggaggtgttctttgacttcttctttattaggctcgatccgaccctgagcaacttttatccctgctactacaaggtaagtccgcccattattttcccatcccattcctgcaaacaataacattctatgtgatccagtacattaacacggagcacgttttcctcgtgcgcaattgctttgatcagattgcacacctggtaaacaattgcaacctcgagatgacaattccgaccggtgatcggatttttcgttactatctgcgtatgaatgtgagcactgtcaagcagcatcatgtcgatccggaggagtgcatacagaaagctgtctcgcaatgttatgtggcacagaaccgaatgcttaacctcgaacggtttcactccagagaatgtctaaaggatgtgatggtgtcactaagctcgccaaagattttaacctacgtactgtcggtagcgtcgcggaagttcatgaccacctgttcagagatccgtttgtgccacaacaaggtccttgttctggatggagcccatgtccttggtatgatggggtgcctgagagcggtggatctcagtcacaactgggtgcaggatctgtcaagcatccacagtctgggcaacctacctctgaagtccctggtacttcacggaaataaactctgccgcaactacagactgcccagcgaatatgtcagggcggtgaaggaggtgtttccacagttgaccaccttggatggtgtggacctgcagacgaatcctggccagtcgttgcagaagaactttctttgcgatacaggtgcctacgagttggtgggtgcctttcttgaaaactatctccgggagttcgaaaacgatgagtttcgccacaatctgtacaagtattactctgaaaactcgatttttactctaacgtgcaactacaacgtggttcaaaatcaccagactccaaagatattgcagcgtttatcaaagtacaacaggcatgcacgaaatctgcgcaacaaggactattccaaggcaagcgatggtgtgttctttggctgtacatatattgttgaaatacttttgcaactgccacgagtcacccacgacttccactccctgcagacggacgtaatgcactacaatggtaagggggcggttatctatgttgctggtttgctacgggatgagccacctagcacgaggaacggccacgggagcaaaacggacatcggtggcgttcttttgggctttagccgacagtttgtggtcacgttcgatgaggcgaacttggtgagttaagaaaatgtggatgcgattaacttaagcttttgcttacgatacaatttttttaacaatctagggattgggaaagagagctcgtcgcctaaagatcgccaacgaacgtctacacataacgaatccatcgaaaactgcaatacgaaatgctttcagtgtaaattttccggatccaagtgaacgtcaggcggaagaggattccctggatgtgaaggatcacaagctcctgctctttcaagaggtaaccggcctcatttccacttgggtcacatcgattgtggaggaagccgattgggactttgagcgagcccttaaattgtttattcagaagaatgctgatcacgaaatcccagatctagcattcgcctagaatatgtgatctctatatatgtgatcatatacttttgtaaaataagtggtgctttcaatacctctgtttcctctttcgttataaatactgaacctgtgttgcgaattcgacatcccaataaaactaccttgaattaccaataaaaagtaatttagatggccgaaaacatttatttgataattaagagttaatcacttgcaaagagaagtctcttttctacacatgtacgggagctatatatcctcgacttcgaatccgtagctgcggaggaatgggttttgggcagtgggaaacaaacattgagaaaatgccatcgcttaattatttaaatattttgtagactagaaaatgtttctaaatacatttagcatatgtttttgtataatatgtataatgcattagtaaacgcacagttcaagagccttacacgataaattacaagggagaaaagtccgactaagctctaaggatttttatatatcatttaatcatgtgtgtctgttgattagatttagctgaacgctaatggatcgtttatgtaaatattgtgtacggctgattgggtgtacaaaaagaaagaaattagagtgttttacatgctttttatgtcttgtttttaattccataacttagattaagtttcaaaacatactctaatgccaaaatgaacgaataacactactccaagctatgagcgcgttaatatcagattagtcttttgcgtttcacgtccgtctcgcttccgtttccgacttgtgtgcatctcgtgtgtgactgtatgtgttgtgggtaattacaatggttaatttatcggcaaaggtagtgacaagtggcaagcgctgtgaatgttgcaaaacccttggcttgtacaaaaataaaactgcaaaattggcgctcatagtggtgattagttagatcttcggttttgtatgcttctgtgtttgctgcgtcggcagctgctgctgtatgacccgatttgatttggttctccagcctcccgataatgctttatttgcgtctgccgcttacagtgctccagcctccagaatccgtgtgttgatggttctgttgccgggcgctgcgtcctgaggtgaccgtgtgtggagcaccactggcggcggacgcggcagcatcatttcactttttac

SEQ ID NO: 27185 - DNA, 2752 bp, DROSOPHILA
ttcaacactgccaaatgcatcctttattttcacaggcttacgatttgaaatataagtggtaaatccttctcttttgcaatgccaaaccagatgagagtgctggactttggcgatggatcggtgcccatccagctggactatccagattcgaagatcttcagcaagtgcagtagctacggcgatcgtgttccgggtacccattggaacgaaatcacagtgcaccataagggccgcctggaatactcgccaaatccggagcagataatcctggatgccttataccaggcgatagacggtgcggacttctttccggtgttctaccagcgtgggaagaacatggataccatgctggtcaggaactgcaaggcggccattgataagctcttcaaacagcggctgtccattaatctgaaaggaggcgcctccatacccatcagtattcaactgggcgtagcccagtaccaaaggcaccagataactccaacgttccacatcgcacgggtggtcaccagactgatgaaacaattgattcaaagggacggtgtggatgggctacttaatctggacaactttgggagtcatccggagtttaaaaaccttgtggtaagcctgggcaatccgagcatcctgatgaacgtgtgccaggtaatacacaatgatgacaatgaacgctttcggctgaacggatttatattgtctaacaaccgcattcgggatatacggcccttgacgctactcgccaatgtggactacgccctgctcgacttaaggggtaacaagattaagtcagccgaacgtttgtgccgcgctctagaacaattccgggccagagaactgcttttggagaacaaccccattgtaaagatatccaactttccggcgaacattaaatcgctggagagtaacttcgagttggtggatggaaagcctttcaacatgctgcacaagatcttttctcctctggatgtggagatcgatttggaagtggatggtgcgcggattgatacaaataacatgtggaagttgcccgagtttgagaacagccagcattggcatgcctttatgatacccgatcccagtcatgaatttaaccaggaggtgttctttgacttcttctttattaggctcgatccgaccctgagcaacttttatccctgctactacaagtacattaacacggagcacgttttcctcgtgcgcaattgctttgatcagattgcacacctggtaaacaattgcaacctcgagatgacaattccgaccggtgatcggatttttcgttactatctgcgtatgaatgtgagcactgtcaagcagcatcatgtcgatccggaggagtgcatacagaaagctgtctcgcaatgttatgtggcacagaaccgaatgcttaacctcgaacggtttcactccagagaatgtctaaaggatgtgatggtgtcactaagctcgccaaagattttaacctacgtactgtcggtagcgtcgcggaagttcatgaccacctgttcagagatccgtttgtgccacaacaaggtccttgttctggatggagcccatgtccttggtatgatggggtgcctgagagcggtggatctcagtcacaactgggtgcaggatctgtcaagcatccacagtctgggcaacctacctctgaagtccctggtacttcacggaaataaactctgccgcaactacagactgcccagcgaatatgtcagggcggtgaaggaggtgtttccacagttgaccaccttggatggtgtggacctgcagacgaatcctggccagtcgttgcagaagaactttctttgcgatacaggtgcctacgagttggtgggtgcctttcttgaaaactatctccgggagttcgaaaacgatgagtttcgccacaatctgtacaagtattactctgaaaactcgatttttactctaacgtgcaactacaacgtggttcaaaatcaccagactccaaagatattgcagcgtttatcaaagtacaacaggcatgcacgaaatctgcgcaacaaggactattccaaggcaagcgatggtgtgttctttggctgtacatatattgttgaaatacttttgcaactgccacgagtcacccacgacttccactccctgcagacggacgtaatgcactacaatggtaagggggcggttatctatgttgctggtttgctacgggatgagccacctagcacgaggaacggccacgggagcaaaacggacatcggtggcgttcttttgggctttagccgacagtttgtggtcacgttcgatgaggcgaacttgggattgggaaagagagctcgtcgcctaaagatcgccaacgaacgtctacacataacgaatccatcgaaaactgcaatacgaaatgctttcagtgtaaattttccggatccaagtgaacgtcaggcggaagaggattccctggatgtgaaggatcacaagctcctgctctttcaagaggtaaccggcctcatttccacttgggtcacatcgattgtggaggaagccgattgggactttgagcgagcccttaaattgtttattcagaagaatgctgatcacgaaatcccagatctagcattcgcctagaatatgtgatctctatatatgtgatcatatacttttgtaaaataagtggtgctttcaatacctctgtttcctctttcgttataaatactgaacctgtgttgcgaattcgacatcccaataaaactaccttgaattaccaataaaaagt

SEQ ID NO: 27186 - protein, 841 aa, DROSOPHILA; identical to SEQ ID NO: 8085

SEQ ID NO: 27187 - DNA, 2737 bp, DROSOPHILA
ggagttcgtgcctgggtggccaaggagaacaagcacgtggagtgctggacgggagtctggggtgttaccacgctgcccaacaagaatggggaacagaggcaactctatttgtcccacgataacaacggcaacggtctgattccagttcccaagctatacttccgagtggtaatcgaaccatccaccaagaagggcatcgttctgatcggcgtcaacaatccccatttgagtttggaggagatcaagcgggactacatcctgtgcacggacgtcagcgacaggatcaactggatcagctggaagaagacggacatcaccgccggttactcctacgcctgcgaggttccggagttccgcaagaaggtgacgcatctgcccgagttctccgtcagcggactgttggtctaaactggttatgtttgaaataataaataatacctttacatcgaaacactttgatttgtttttaaaacatctgcaacaaggaaacttttgagaaaatactggagaaataaataatttgagaaaaaaatggaaaaaatatgaatgaattcgtttatatttttaagattgcatacgataaatccattacaaccattttccattttgagtagattggcgaaatcaaataatgcatttgttacctgtcaaaaaatatttaaaattctccaatgttgctactgaaatatggagtatctaggaaaatcttcagtttcctactgttcctcttgttgcttctgccgatccttgacgccggtgatccgattggcagccacttcgtccgccggcgggctaaacgcctttccagtccctatttcgacaaggaaaaaacgttggttctggccaaatatgtagtctcgattcgatcccgaagaccccacaagttatttggcgacaatcacttctgcggtggcgtgatcatatcgagaacctacatcctcacctccgcccactgcgccatggagtaggtatagaaaagatcaatatataattgactgttatgtcctttaatcaatgcaaaagtaagcgcaagatcgtacatcgcagtcgggtgttggtggttgtggctggaaccacaaatcgtctgaaatcccgcaaaggactctctttaaacatggaggtgaagaagatctttgtcccagacaagttcacagtattcaatacgaacaacattgcgctgatgatgctggccaaaaaactacccttggacaatccgcttgtgggtgtgatcaatctgcctacggctgacccagaaccgggtttgaactacacggtgctgggctggggaaggatcttcaaggtaagttgtggtagttacgaactataagtaggtttattattaactatagggcggtcccctggcctcggacatcctgcacattgacgtggagctattgccccgggatatctgtgagaagaaagtccacatcttcaaggaggagatgatgtgcgccggaaatctgaacaacaccatggacgagaatccctgtgccggtgacaccggaagcccactgattttcaacgaaacagtctttggtgtggttagctaccgagtaggctgtggatctaaaactttgccctccatttataccaacgtctacatgcatatggactggattaatggcattatgaacaataatgaagcgaaccgattgtgttactctcccaactatctattcaccaccattggtataatcattggaaataaaattctgaaaagttggggattttatttgatcaccatttaaacgaggagacctcccttggcggtcaaagcgggcaggtgcttcacggtcttcaggaaatcggccacctcgcaagcataggaccaaccggccttgatgtctgtagtcttccagttgatgtaggtcacctgatcgctgacatcgtcacagatgacatagtcgcgcttgatctgctcctcggtgagatggggattgttgacgcccacaaagacaatgcccctgtgggaggagggatcgatgacaacgcggaagtagagcttcggcacggggatcaggccattgttgttgtcatccttggccagataaagcggcgtctccacaccgtccttgttgggcagagtggtcacgccgtagacaccggtatagcagttcacgttcagcttgttcttggagacccaggccctcagaccatcctccacacgagcccagtttccggcattgaaggtctgccactgaggagcggcgttaataaacaggaaggttgccctctgctcgggagcgtagtcgaaatcagccttggcacccaggtgaccacgtgccaggtagacattgctgctactatcgaagtacttttccgcatctccgcccagttcattgttgatggtctccagctgggtggcttgggtgtacagtttgtccacgttctttccatcaaagaagccagccgtttggaaggtaattctagccactccggtctcgtagtagttgcttccgggctccaacttgtggcgagtgtatcgggtcacttcctcctcttcgttgaagcaaatctgcatctgctcggcaaacctcgatgaggtgatctcgaaacctacgcggatcacaatgccaccgttgcaggtggctccggacttaacagccttgaatcccggccaggatttacagtacaggtccttgaactcgaagttagatccgcccacgctgaaggtggttccactcacacaactggcggtaagcagattctccgaatgagtgttgaatcctgagggaca

SEQ ID NO: 27188 - DNA, 528 bp, DROSOPHILA
atgtcctttaatcaatgcaaaagtaagcgcaagatcgtacatcgcagtcgggtgttggtggttgtggctggaaccacaaatcgtctgaaatcccgcaaaggactctctttaaacatggaggtgaagaagatctttgtcccagacaagttcacagtattcaatacgaacaacattgcgctgatgatgctggccaaaaaactacccttggacaatccgcttgtgggtgtgatcaatctgcctacggctgacccagaaccgggtttgaactacacggtgctgggctggggaaggatcttcaagggcggtcccctggcctcggacatcctgcacattgacgtggagctattgccccgggatatctgtgagaagaaagtccacatcttcaaggaggagatgatgtgcgccggaaatctgaacaacaccatggacgagaatccctgtgccggtgacaccggaagcccactgattttcaacgaaacagtctttggtgtggttagctaccgagtaggctttggggattttatttga

SEQ ID NO: 27189 - protein, 175 aa, DROSOPHILA
MSFNQCKSKRKIVHRSRVLVVVAGTTNRLKSRKGLSLNMEVKKIFVPDKFTVFNTNNIALMMLAKKLPLDNPLVGVINLPTADPEPGLNYTVLGWGRIFKGGPLASDILHIDVELLPRDICEKKVHIFKEEMMCAGNLNNTMDENPCAGDTGSPLIFNETVFGVVSYRVGFGDFI

SEQ ID NO: 27190 - DNA, 3726 bp, DROSOPHILA
gactcggctattgatcctgatcaagaacatatatactttattccgtcgacaacgcttccttctgcctgtttcatacttttcaaaaaaatttccatatccttttactctacgaataactggtatgaaaatagcaatggtgaggaactactcggaatggatgtgctacaagttagcgtcgatggtggactttttgaacatgggggaaaaaccttatttatttattttttcgttatttattggtgaattctaaaaaattaaaatgcaaatatgttaagaaaagaaagaactaactatttatgtacgaccaagattgtaggactcaagaaagtgcatgaaatatgcaattggaaaatggctctccactccttggggaatatctctactcgcagagcgtgttccaaaatgcaccctagagcatcttaaaagacatttcttaaagtacatttaggaaaaatgtctaaaaaaattacccacagtttttgagataattgcataatagttggtcaacatatgaacactctgtgtgcagttgcgaatttcggcccctatcataactcaaatcagcttattggaacatcgcttcccagttcaacacattattgtcgccaacgacggctacaccacgaaaattgcaattcgcaattacaacagcaattaaaattctataattttcatgccatcattaaacgaaaatgattgcctgatagttattttagcacggcattctgtcagctgcgacatattatgtatatacataaatgttcagcatataaactgtttttatgtttctggtacacttattattttgcatataaaggtgagtaatggtgataatggtgatacattgcaagctcactatatgcataattcacattccgctgttcctaaactgttgataattctttgaagctgttttgatgcaaatggaattttaatgatttacagattcgatatttactagaaattcaacattgatgtttctttaaatcttgtgtttcagcaaatattagggttttattgtagacgctaaaatacatctttaagatattggctattttgtgaatagtctcagtttcgtgcattgggaagcctttttaagaaatatcacgttttatttggatttaaaatgaaaacattgagtgattataatagcaaaaataaattgtgctgacgtgcaaacacaaagcatttcagctcaagcgttccgacagcctccattttgaccgaaataacataattcttaattgttttcttatattgagcaatatgatcaaaaatgaacaacgtccccttaattttgaaaaatgtatggaagaataaaaatggtcgtgaatgttagaatcttactaacattttatttgtaggtccggaatctgatgatgagctcaagaaacggttggagatagaaaaattaattaataaaaacatcgacaaaaatattagttttgatgtacttgtgaagttatccctggcgccttacggattggttaatgacgattttagaaggattttatggcctcagttggcaggagtcgacattaaccatttaggacaagctccaacgctcgataagttccagtgccatccagaatacaatcaagtggtgttagatgttaatcgttctttaaaacgatttccaccaggaattccgtacgagcaacgaattgcactgcaagaccaacttactgttctgattttgcgagtaattcaaaagtatcctaacttgaggtattatcaaggctaccatgacgtggctgtaacatttctgttagtggttggcgaagaaatcgcatttgcaataatggaacagctctctacaacacatttttctgaatgtatgcaggagactatggaggccacgcaaaggcgacttatgtttatttggcctatcattaagtttgaaaacccagaactttatcagttcttgcaaaactcgactgtgggaactttgttctctttgccgtggtatttgacttggttcggacatagtttaacatcttatagaaccgtagtccgcttgtatgactatttccttgcatcgcctatttatacatcaatctttgtaacagcagcgattttactttatcgatcagatgaaattctaaaggaggactgtgatatggcatcggtgcattgtctcttatcagtggtatcttatagcttaaaatattaatacatattttaaaaacatattttgtagataccagaagatttaccatttgaggaccttttgaaaacatccagttcgcttttaaataaatatagcctaacacttatagagaaagatgttgaagaacttatttgtcaagagtaagtaaaaaatttcgttagtactctcaaaaataatttgtttcttgtaatagaaggaggaaaaggaaaaccgatgaagctttaatcgtaaaaagacgtcaaccggccacatcgaatagaattcctatcataacgaaatggcttccaaatattttaacagcaaagccggtgatattgacaacagcaatttctattgtagtgggtgtatgtgcctattattacaataaccagtatttggcggcaggtataagctgattataaaagtaactgagtatatcgacatttaaatttgttccttataccgcggtataatcacattctcccgaaattctgtgttttggtgaagaccttattttaatacattgtacaattctactgtcaccaaatacttgaaatatatatatatatatatctttagatttacttagtattgtttcaaatctagcgagaaaaacaagagagaatgctattcagctagtgggaacacaaacgcgaaatatcatttttctgggatatcgctatatattagggaatatattaaaaaaaaaatatacaaattgcttaaaagtgcgggagtgaccgtttgtgggcgttttgtaggtgaaaggatggccacattgttttggcatacagataaaaataggcaagacaaacaataaaacgaacatttttcaaaagtgtgggcttggcagtttccctaagaagtttttgaaaacatattgcattgacttgtttagtcaatctgggtaagcttcaatcgtaactcttataacgcgatgtttggtaagagatcttccgacgttaagagctcaacagaaaaccaacgcaagtttgcatgcgttgtttcggctgctctcaaaaatttcagtctacgtatgtatatgtacatccaccgcgttgagggaatacaaattaaaatcttacgcaaatataggtatcataggtatatatcaacccaaatgttgataatataacgaaattgttacaaaattctcgaaaccggacgcagcaacaaacgttttgaaacttaaacctatccgtttgcaatagtttagtgagacctaagacaacgctcccaaactgttcatgattcaaaattaaagttctaccgaagtgcaaagtgtggataccgaagtgcttggcacatgtataatatgttctccttgtattttcgtaccaattaaggatcttgtcaacaatttaaatacaaaattggcaagtaaactctagttattgttttgtttgaagcattaaaccaagttctagttttaaagaagtttttgataaacttgttaacaaggattgacgttacggatcgtcacgaggctagctcaatagcaacttgatatcactttccgacctcggaaatggttgcttacctaggtactgccactgtcacgcgtaattggttacgag

SEQ ID NO: 27191 - DNA, 1564 bp, DROSOPHILA
caaatattagggttttattgtagacgctaaaatacatctttaagatattggctattttgtgaatagtctcagtttcgtgcattgggaagcctttttaagaaatatcacgttttatttggatttaaaatgaaaacattgagtgattataatagcaaaaataaattgtgctgacgtgcaaacacaaagcatttcagctcaagcgttccgacagcctccattttgaccgaaataacataattcttaattgttttcttatattgagcaatatgatcaaaaatgaacaacgtccccttaattttgaaaaatgtccggaatctgatgatgagctcaagaaacggttggagatagaaaaattaattaataaaaacatcgacaaaaatattagttttgatgtacttgtgaagttatccctggcgccttacggattggttaatgacgattttagaaggattttatggcctcagttggcaggagtcgacattaaccatttaggacaagctccaacgctcgataagttccagtgccatccagaatacaatcaagtggtgttagatgttaatcgttctttaaaacgatttccaccaggaattccgtacgagcaacgaattgcactgcaagaccaacttactgttctgattttgcgagtaattcaaaagtatcctaacttgaggtattatcaaggctaccatgacgtggctgtaacatttctgttagtggttggcgaagaaatcgcatttgcaataatggaacagctctctacaacacatttttctgaatgtatgcaggagactatggaggccacgcaaaggcgacttatgtttatttggcctatcattaagtttgaaaacccagaactttatcagttcttgcaaaactcgactgtgggaactttgttctctttgccgtggtatttgacttggttcggacatagtttaacatcttatagaaccgtagtccgcttgtatgactatttccttgcatcgcctatttatacatcaatctttgtaacagcagcgattttactttatcgatcagatgaaattctaaaggaggactgtgatatggcatcggtgcattgtctcttatcagtgataccagaagatttaccatttgaggaccttttgaaaacatccagttcgcttttaaataaatatagcctaacacttatagagaaagatgttgaagaacttatttgtcaagaaaggaggaaaaggaaaaccgatgaagctttaatcgtaaaaagacgtcaaccggccacatcgaatagaattcctatcataacgaaatggcttccaaatattttaacagcaaagccggtgatattgacaacagcaatttctattgtagtgggtgtatgtgcctattattacaataaccagtatttggcggcaggtataagctgattataaaagtaactgagtatatcgacatttaaatttgttccttataccgcggtataatcacattctcccgaaattctgtgttttggtgaagaccttattttaatacattgtacaattctactgtcaccaaatacttgaaatatatatatatatatatcttt

SEQ ID NO: 27192 - protein, 378 aa, DROSOPHILA
MIKNEQRPLNFEKCPESDDELKKRLEIEKLINKNIDKNISFDVLVKLSLAPYGLVNDDFRRILWPQLAGVDINHLGQAPTLDKFQCHPEYNQVVLDVNRSLKRFPPGIPYEQRIALQDQLTVLILRVIQKYPNLRYYQGYHDVAVTFLLVVGEEIAFAIMEQLSTTHFSECMQETMEATQRRLMFIWPIIKFENPELYQFLQNSTVGTLFSLPWYLTWFGHSLTSYRTVVRLYDYFLASPIYTSIFVTAAILLYRSDEILKEDCDMASVHCLLSVIPEDLPFEDLLKTSSSLLNKYSLTLIEKDVEELICQERRKRKTDEALIVKRRQPATSNRIPIITKWLPNILTAKPVILTTAISIVVGVCAYYYNNQYLAAGIS

SEQ ID NO: 27193 - DNA, 2306 bp, DROSOPHILA
accacagagttctagccgtggaaggatacgggtttcagcggagccactcgtgatttggctgtcagaagaggggtcaagatattttaccccattaagatgtagatacccgctccatatgctttcttaaacgcgtcacagaatttgtgatgttctatggtcacctctcggatcgctgatctggataaggtcggaacactcatctaagaatgattgccacctatgactcatttcggtgggaaccttatagctggtcttataagtcctgcaaccaaatctcctgcatgaacactttggagcggatgatgaacggaatgagccacccggcaggatcgaacaacacagcgattagggacaaaacttcttgctttgtataggagggctccaaagctttacgatgagggacgaaatattactcgtcggactttgcccaccagcgaataccgagcgtcttggccgtggaagaaaaaccggaaatggaagaaagaaatttttcttgcgggcatcgagacaaaggtaagcattcgtgccattctgcacagggataattcccactcttgttgttttctttgatcacgcttacatacgcaagcactaactttttttttgctggtgtagtgggtagtggaccatcttggttgcttacacggaagagaaaaaaatacagttgatgcaaaaacttggcttcccggacactatcccagggaaatcaaccatcaatcattggtatcattggtttcgtggccagatatctagggccaccgacgttgggcatgagtctagccagcgaagaggctgtgactgctgcctgcttgctggcgtaactcgcgtgatccttgaacgatagtatgtggtctatcattacacccaggtactttagggactcttcggaggtcacctgtgtgccattgacagagactagcatattctccaactttttccttctgcttagcaagactgcctcggtcttgtgggccgctattgctagcccggttctctcgagtcagtggatggtagcaccaatcgtaatgttacatttatcttgcaaccctgcgattgttttggcggctgctgtaattgccaccctactcccacgggcctgttgatgcccaagatcccatcgtacatgatgttctacaggattggtccacgtaccgattcttggggaacacctgccgaaactcggtatcattttgggccagcttccgtatcgcaccataggacccggtccgtaaagtagctgccaacgactatcctcagatactccgcaatccccattcagttcatggctccgaggattaagggccatcctggttttaaaggcgttcttttctttcccctatcaccacctctatcaccagcaagagcggtcctggcggtccagggttcttccttcgtttcgaaagccatattgctgactttctatgccgttgatgctctcggtgattgcatctattcgagtatacaggatacgagcgaacagtattccaactatattcagtaggcataaagggggggaggtttttgcagctggtctcttgcctttcggcaacaggactaattttgtggcttttccaccttgttgggaagattccgtccagaagacatttgctggaaggtggtcctgcacgcaccggccgactcaactccgtaaattacgaatatttcgcgccgcgttaacttaagacgtccgtctgcacgttctccaaatgctccggtgtggagagctggatacgcggctcgctatgctgccgccgcggaaccccttgatgacgactgccaccaatgatccccagatgcctcaggttgcactccgctgacccccggacctcgagaattcgcaagacatcgtcagccgtggtgaagttcgacgacccagagctatcggggaaggctatagccgaaaaggtccgagcgatggttgcaccctccctcggagacaagacggtggaccggcacagagggcacattgtatgctctcgaacgcacgcccgatatacggctctaagcgaactgtggccgaggccgagttgcggccatcgtgctcggagtccgtctcaagagatcggagtcaatgttcgcgttgttgcaggagccggggatggaatggaagtgctgcctgaaggaatgagaatgttcaccgaccggcgagggaaccaaaccataatagtggatcatcaggatgccatctgtatgccagtggagacccaaaccacagattgtggagtatgtccggtcgttaaagggagttttggctttatcttcctttgctcagcatactgccgattctatgcacctctggaaccctg

SEQ ID NO: 27194 - DNA, 306 bp, DROSOPHILA
atggcccttaatcctcggagccatgaactgaatggggattgcggagtatctgaggatagtcgttggcagctactttacggaccgggtcctatggtgcgatacggaagctggcccaaaatgataccgagtttcggcaggtgttccccaagaatcggtacgtggaccaatcctgtagaacatcatgtacgatgggatcttgggcatcaacaggcccgtgggagtagggtggcaattacagcagccgccaaaacaatcgcagggttgcaagataaatgtaacattacgattggtgctaccatccactga

SEQ ID NO: 27195 - protein, 101 aa, DROSOPHILA
MALNPRSHELNGDCGVSEDSRWQLLYGPGPMVRYGSWPKMIPSFGRCSPRIGTWTNPVEHHVRWDLGHQQARGSRVAITAAAKTIAGLQDKCNITIGATIH

SEQ ID NO: 27196 - DNA, 3476 bp, DROSOPHILA
actagtttctagttacaacataccttctccaatggcttctttaaagtattcgtgccattttggtaaatcctcgtgcgtgcgtcttagcagtgaaaatgcatttatgggatttgaaacgtattgcactttttcattgaggcttcgatgtaattcataacccactgacgacaagtacctaaaatttttcttttacttgtgataaaaacaaattttaggttgtgttacattcgaagtgcttcgaatttttctcctagctgatcaacttggtttaaaaggttatcggtgaatttttcttccactttgagcagtttcagaagtcccacagtagatgagctgtatcgttctttttcctcaatatcctcgacacatcctacaaaactgtttagaactgcaaaaccaagcagaactgggagtaaactatgatactttctcattataactaaaaagtattcacatttctttaaacaattgtaagttcttcttgacttaaatggattctctaaggttatagttggttgaattgattagttacgttttttgtttattagctaccgttatctatcgggttattttatttttttattgcaaagttattttattttacaaatattaagtgctatttaaagttttatctaaaattatttaaaacttttggttactctttgctttcttgtactgcataggtcgtccattgtatgcacctttttgtgtgataactaaaaagaaatctaaatcaatcaaatttatttcattagatttccattttttcatgtaccccttttatttccttgaagaactgggcattccaaaggctcactgcgaggatcaagtgtgttatgccaaaagagacagctgcccttttgaggaaagacggatattttcaactttggaaaaaccatagcaccaccgagttccacattgttaagctggttagaagtaaatattttttggataaatagttagtgcagattctatcaataggatagtttcaattataaaatcaaaagagaatcttatattgcaaaactaaatgtaaccaattaaaattgcacattgagtacactgtacttacaaaaaatagtaatgttccttttaaatattccttcttatgtttgtgcgttcgaggaccgtttttggatactatttgttgatctgaatgttcaaaactaagtcgtgtcaattcgtttatgcgttgaaagatgcgtttttcaataggattgacttccaccgcgtcagtatcattcaagtggtttttcaacttatcgatctcgtcgtcattaagaacatcgtgatatatgacaatgtaaggatcccaatttaaaacttcctgtttcaagggagctagtttcaagaattcggttatggtgaaattataggtgcaaacatgattccttcgcctaagaaactggccacgacatccaatttcgtagtctgagggttttgtcttgttaacattcatttcgtaaacaatttcatcgtcagtttgacttagcaactcatttaagagagattttatatctgctaggctggccttattcagagcttcgtaggatattttcttagcttctgcgattgtcatcgaaggatttgacttgatcatgcctatatggttgtaagggaaagattagataggccttcttgactcatcctccttaccgaatatgagcattgatttggcgtacaaagtatacaaattaaccttgggatctccaagaatgctgttgataatctcggcatttccttcgggctcatgtttgatggccacgcgaaaccacatagaagcccgttggtagtcctcccttttaaatttgtgctctcccaaagcaacacaatcccgaatagaaggccgaaagctaaaaagtaatcatattgaatggataataacaaaaaaaaaaatgtttcctatactcatattgcttgccctgaatacgacctcttgccaactcaatggcttccaaatcgtaaatctgttcaatccgatgcatttctcccagtgaatatgccatatcctttttatccggtaccttggctataatttcctccaaggcaaacagttcctctaaaaaaaattgaattattatttgagtacggtattttgagcaatataaagtgatcaagctaatgctgttgtcaataccactcattcatatgaaaatttaataaattctttaaaattgggataaatactcttacccattcccacgatctgctgtgaatagttgtgccatttcggtagatcttgatgtgtccgtctcactagactaaatgcattaatgggattaccgacatatttctctcgatcttcaaaactttgttggaattcgtagtcaaccgagtcgatataactgtggataacatgtggcatatacaattgtaaatcatttacaaaaacatccttacgcttgtagatttttgactttttcggccaacttattggtgtatgccttaatgttcgttatgaagatttcctccatttctaaaagttttaaaagcctcgtgattgaactatacacactattattttcgacgtattcggattcgccggagttatcgcccataattggactccaaaacataagaaatatgatcaaactccagaagcttttcatattgactgacttctttattcatcagttagctaagtaaattaaatacgacaagggtataccgtcactaatacatttattttttacttttatcgttagggaacacgtcactccaaatgaactcttgggctgcagggcttcacaaacaattggggggcgtagtgtaaccacttggttatcgctgaaagtatatactcgtagttatgtctggagctgtataacattttctcataatactcactccatcgtgaacccactaaaactggacacacagagtgcagggatcgtggatctggcgttgaatcatcgaaagcattgaaccaaaacaacgcattaccttttttcggctccaccgccacctttaagtcgggaaatacggtttgtccaccctgtgagacttctccagcctgccagaaaggaacaacaatcgaagttgtcaaattttggagaaaacattaatatacttacataaaatataatactgccaattcgatctcccagcgtgttgttcacatccacctcttttaaacgatctgtataaaagtcgtaatgtggcttgaagtacccacccactccaaaattggccaattgtatggctggaaattcttccagtttgaagcccgtcatgtcggaaatgcgttgattaattcgcttactaaacgaagattccttccttatccaatagacgcgggaaacaatctccttaggatctcccaagctagtccacccattctccatttctgtaatttcacctttcatttcttcaatgtctttatcgctaatcacttcgtgaaacatcacaatgtaaggatcccggcttatttcctccattttcaagggtgctagttttagaaaagcgtttgtactcga

SEQ ID NO: 27197 - DNA, 1178 bp, DROSOPHILA
aaatggaggaaatcttcataacgaacattaaggcatacaccaataagttggccgaaaaagtcaaaaatctacaagcttatatcgactcggttgactacgaattccaacaaagttttgaagatcgagagaaatatgtcggtaatcccattaatgcatttagtctagtgagacggacacatcaagatctaccgaaatggcacaactattcacagcagatcgtgggaatggaggaactgtttgccttggaggaaattatagccaaggtaccggataaaaaggatatggcatattcactgggagaaatgcatcggattgaacagatttacgatttggaagccattgagttggcaagaggtcgtattcagggcaagcaatatgactttcggccttctattcgggattgtgttgctttgggagagcacaaatttaaaagggaggactaccaacgggcttctatgtggtttcgcgtggccatcaaacatgagcccgaaggaaatgccgagattatcaacagcattcttggagatcccaaggttaatttgtatactttgtacgccaaatcaatgctcatattcggcatgatcaagtcaaatccttcgatgacaatcgcagaagctaagaaaatatcctacgaagctctgaataaggccagcctagcagatataaaatctctcttaaatgagttgctaagtcaaactgacgatgaaattgtttacgaaatgaatgttaacaagacaaaaccctcagactacgaaattggatgtcgtggccagtttcttaggcgaaggaatcatgtttgcacctataatttcaccataaccgaattcttgaaactagctcccttgaaacaggaagttttaaattgggatccttacattgtcatatatcacgatgttcttaatgacgacgagatcgataagttgaaaaaccacttgaatgatactgacgcggtggaagtcaatcctattgaaaaacgcatctttcaacgcataaacgaattgacacgacttagttttgaacattcagatcaacaaatagtatccaaaaacggtcctcgaacgcacaaacataagaaggaatatttaaaaggaacattactattttttgtaagtacagtgtactcaatgtgcaattttaattggttacatttagttttgcaatataagattctcttttga

SEQ ID NO: 27198 - protein, 391 aa, DROSOPHILA
MEEIFITNIKAYTNKLAEKVKNLQAYIDSVDYEFQQSFEDREKYVGNPINAFSLVRRTHQDLPKWHNYSQQIVGMEELFALEEIIAKVPDKKDMAYSLGEMHRIEQIYDLEAIELARGRIQGKQYDFRPSIRDCVALGEHKFKREDYQRASMWFRVAIKHEPEGNAEIINSILGDPKVNLYTLYAKSMLIFGMIKSNPSMTIAEAKKISYEALNKASLADIKSLLNELLSQTDDEIVYEMNVNKTKPSDYEIGCRGQFLRRRNHVCTYNFTITEFLKLAPLKQEVLNWDPYIVIYHDVLNDDEIDKLKNHLNDTDAVEVNPIEKRIFQRINELTRLSFEHSDQQIVSKNGPRTHKHKKEYLKGTLLFFVSTVYSMCNFNWLHLVLQYKILF

SEQ ID NO: 27199 - DNA, 2684 bp, DROSOPHILA
tgcaactggtggttctacgtcgactgcagctctagcacgagcgtctacgactccaacattcccatctcaaagagctatcagctgatgaagtcgctcacctatttctccaagtacgctggcggtcagaggcacgagcagggtggagacaaagacgagaatgcgctggacatcgattcgctgagagagtcgatggagggcgtggcccggcgccaggagcaagccaagaaggcggagctgagggtggaggagcagcgcagcatgcccaaggaggaccatgagcacgtggtgcccgcggaggcagagcagcagctatccaactaggcttaactaggcctatcccaacgctatctgagatctaggttaagagttcacgatcgagcgcctctggtcgactagccgtacgtagtcaagtcctttgctaaagtcagcggttttcacactcatcactgagaaaaactattcccggatcatatgtataccgattcaaggacgcctatttgtggcgcttcaacatattgtatcacagagtcaaaataattttctccatatctattaaagaaaatggataatatatatgattaagattattttgatcgcaaaatagaggacactagggaactgatattattatgattttttctctgttaagtatcatcacttcctgtgggcagctcctgtactgcagagcgccccttacacttagtctcttcctagccattaggtggataatatctagttaagtcccatcagtaagtacattttgagttgggcacttatttttagtacgttctactatttatttattgtacaagtatttcccgcaaattaaacgtcgtttgtttaaaaatgttcaaaaactttgttttatatggatacatttgatatatggataataaaagttatttgtttcttcttaacgtttaagaatattaaaattttaatatattgatattgcacacctatcaatttatcgtagatcccagtaatattgcagagttcattattggttattgtaccattccaacatgccagtggcgtcaggaatatctggattgatctgcatattcgtgtaccagctggcgttgagcttcatttcattattgtgaagctgggcacgcgcccctttgaccacgataacatcatcacgttgacccacaaagttcacggcttccttttgccacagatttaatatgacaggatggaaatcaggatctacaagtaagagttcccgaataaagcaacctcctctattttccagcattccaacctccgcgcagattccaattgcgtcgacgggttcttggtctctttttgaagaaacctttaataacggcaggaaactatacttttctcggggaatgcggtcacaagcactgagttctaggacagtatttgcacaaaaaaataattgattagggttgtctgaaactttataggaacttatcgccttctccacctcaaacccagagataaggtataccaggcctgtttgaatctggccgtaaagtccattgtcatagtcagcaaacacaagtcctgttatttcaccagactcatccaataaatgcataataaaaactattccacctttgttgccattactccattgcgttatctctgatttccatagcacacgggcttttatggatgaaagattaaatccggtgtttaagctgcaaatgggctgaataacggaaaaatatccctctcagaatagtgtatctgcaaagacactagaaccaaaaacactagaatattcaaattattctagtgtctttgctagaactttccgctctctctcgctctggaataaaaattcgagagaggctggagtcacctctagagatacggcgaaaaaatagtgtgccaaaaaatcgtatcgtgtctttggtatcttaattgatttaataaaaatccacgtaacgaatacttactataattgcgttagagttcattttaagacgtttataatttctagaatttgtaattttgttattttcaatcgtaatggccagtactctgtgctttgttgtgaatgacgaacaacggaaacaagccagaagagcaaattttattaacgctacatgagagcgtgagagaatagagaatagtagtcggctagcaatttcaattatttttaagctccaaacagcaaaaagctttataagtacatacatacttgtggaatataatgtatggaatacagaatgggatgatagcatatggataatacgaaataaaaaaaacaatattatcaagaccaggcggttattttatattatttatatgtactcagctaatattacatgtttcagaatcgaaaccaatttacttccactttctccaatgcttttaattttattttaattaagggaagcgtagctgaataacaacccattcacaatatttggaaataacgtatgtaatgtaatgaataaatgtatagcctattcctaatttatgggaaacgtgttttggcgcactgcgcatggaactcagtttgatgagccaatgccggttagctcctgcagctccttgagcaagtgcttattgtactccttgtgattgataggggctacagactgcacagtgagcttgttgcgagtcatgtccccgtaaacctcgttcttgcagcgcagcttaaagatgtgtgaagtgaagttgagtgctgagaaaatctgctc

SEQ ID NO: 27200 - DNA, 684 bp, DROSOPHILA
cccatttgcagcttaaacaccggatttaatctttcatccataaaagcccgtgtgctatggaaatcagagataacgcaatggagtaatggcaacaaaggtggaatagtttttattatgcatttattggatgagtctggtgaaataacaggacttgtgtttgctgactatgacaatggactttacggccagattcaaacaggcctggtataccttatctctgggtttgaggtggagaaggcgataagttcctataaagtttcagacaaccctaatcaattatttttttgtgcaaatactgtcctagaactcagtgcttgtgaccgcattccccgagaaaagtatagtttcctgccgttattaaaggtttcttcaaaaagagaccaagaacccgtcgacgcaattggaatctgcgcggaggttggaatgctggaaaatagaggaggttgctttattcgggaactcttacttgtagatcctgatttccatcctgtcatattaaatctgtggcaaaaggaagccgtgaactttgtgggtcaacgtgatgatgttatcgtggtcaaaggggcgcgtgcccagcttcacaataatgaaatgaagctcaacgccagctggtacacgaatatgcagatcaatccagatattcctgacgccactggcatgttggaatggtacaataaccaataa

SEQ ID NO: 27201 - protein, 189 aa, DROSOPHILA
MHLLDESGEITGLVFADYDNGLYGQIQTGLVYLISGFEVEKAISSYKVSDNPNQLFFCANTVLELSACDRIPREKYSFLPLLKVSSKRDQEPVDAIGICAEVGMLENRGGCFIRELLLVDPDFHPVILNLWQKEAVNFVGQRDDVIVVKGARAQLHNNEMKLNASWYTNMQINPDIPDATGMLEWYNNQ

SEQ ID NO: 27202 - DNA, 3749 bp, DROSOPHILA
gaatgctgttgataatctcggcatttccttcgggctcatgtttgatggccacgcgaaaccacatagaagcccgttggtagtcctcccttttaaatttgtgctctcccaaagcaacacaatcccgaatagaaggccgaaagctaaaaagtaatcatattgaatggataataacaaaaaaaaaaatgtttcctatactcatattgcttgccctgaatacgacctcttgccaactcaatggcttccaaatcgtaaatctgttcaatccgatgcatttctcccagtgaatatgccatatcctttttatccggtaccttggctataatttcctccaaggcaaacagttcctctaaaaaaaattgaattattatttgagtacggtattttgagcaatataaagtgatcaagctaatgctgttgtcaataccactcattcatatgaaaatttaataaattctttaaaattgggataaatactcttacccattcccacgatctgctgtgaatagttgtgccatttcggtagatcttgatgtgtccgtctcactagactaaatgcattaatgggattaccgacatatttctctcgatcttcaaaactttgttggaattcgtagtcaaccgagtcgatataactgtggataacatgtggcatatacaattgtaaatcatttacaaaaacatccttacgcttgtagatttttgactttttcggccaacttattggtgtatgccttaatgttcgttatgaagatttcctccatttctaaaagttttaaaagcctcgtgattgaactatacacactattattttcgacgtattcggattcgccggagttatcgcccataattggactccaaaacataagaaatatgatcaaactccagaagcttttcatattgactgacttctttattcatcagttagctaagtaaattaaatacgacaagggtataccgtcactaatacatttattttttacttttatcgttagggaacacgtcactccaaatgaactcttgggctgcagggcttcacaaacaattggggggcgtagtgtaaccacttggttatcgctgaaagtatatactcgtagttatgtctggagctgtataacattttctcataatactcactccatcgtgaacccactaaaactggacacacagagtgcagggatcgtggatctggcgttgaatcatcgaaagcattgaaccaaaacaacgcattaccttttttcggctccaccgccacctttaagtcgggaaatacggtttgtccaccctgtgagacttctccagcctgccagaaaggaacaacaatcgaagttgtcaaattttggagaaaacattaatatacttacataaaatataatactgccaattcgatctcccagcgtgttgttcacatccacctcttttaaacgatctgtataaaagtcgtaatgtggcttgaagtacccacccactccaaaattggccaattgtatggctggaaattcttccagtttgaagcccgtcatgtcggaaatgcgttgattaattcgcttactaaacgaagattccttccttatccaatagacgcgggaaacaatctccttaggatctcccaagctagtccacccattctccatttctgtaatttcacctttcatttcttcaatgtctttatcgctaatcacttcgtgaaacatcacaatgtaaggatcccggcttatttcctccattttcaagggtgctagttttagaaaagcgtttgtactcgagttgtaacggcagacgaggttggacttcttgggaaagagtccacgacatccaagattatggtcagtgggaggtgttgtggagtcatcattaatccattgctttaattctgaactgatcagttgttccaaatccattagtttggcatcttgtaattggctattggccatgtcatcaatggtctcattagtcagtccttgattggacaaataaatgcctgggacgaaaacgtgattaagaaatgacggcattaattttgccttaacttaatataatttacttacttcgtttggctacagctgttgcaaagcctttcaattcaatttcctttaatctattcataatctccaaactaccatctgtgcttaactttaatgcttcttgaaaccacaaaagtgatcgcttaaactcgccgatttcaaatttatggtaagccaaagccaaacagtcccgaaataaaagtctatagctagtttccaataaagagtacaaatatttttaatacgtctcaaatataatgatttcagttagtagtagtagtttttggacttacttaaattctgtcctttgaagaagtccttttgctatatcctttggttggagatcataggttgtctctatgcggtgcatcgctttaagtttttcattcatatcaaaggattcaggggctgcactcacgatatcctgcatcgcagtgagttgttcaaggcccaaaggcttttgggtgtagttttgcaattttggccaatcctgatttagtcttctgatgagtccaaacgcatttaacggattggaaacgaacttctccctttcattgtgggttttgtgattgggtcgcttcagggcatctaggaaactaggaaacatgttatgagtgctgcgaatgtgtaattactggtgaaagttcaactcacatatttagattgtccactttctcctgcaagatgttggcatagatcgaaaaattcaccataaactcttgctccatctttaagagcttaactagccccaaaactgaggagctgtagtattttctatttaagaaatcattagggtccgtagaatgaattgattgaactagaataagcacagcagcggctctcacaacattcaacattctctagcagcttttgaaaacactgtaaaagcaatcacatcaagacaacatggattaggttattgaaattatttatttaacgctctaaatttcatgctttggtcatgcgatttaaatttccggcctgttgtacaaggtctggagaacatttgaggtctttcgtgtaaccatttgacgagtgcttcaaagagtatttaattattacttcaaaaatgttcatttttgattgaaagctaacttactccattttgagcccactaccacaggacatgatacgtgcaaaagatcttggttaggctgcattctatggtccaggtttctccaaaccaaagcgctgcctttttgtggccaaattgtgagatttaagtttggaaaagccaaggcaccaccttgagccacatcgttcatctaaaatattgccaaaaatattagttcagaaaaaatcccattccatattatatatactacatagatatacttacaaaaaacattatgctcgttaagcgatcgccaagttccgcctgaaagataagaattattttatcatcgattcatttgtgtttttctttttatccagcataccgtttgatcctgcaattctatattgtcagtatggaaatttctaaacccacagataccgtagttatctatctgaaaatccgtgtcctcttgcacgtcctctcctgtcatgtccttaattcgcaggcttagagggctctggtgatcctcgcgaattttggcgaactttaggttatagtcaatagcatagagaattcgcaaaggactctttagtgaaggcagtgaaatatttttgacttttgagatctcgctgtcatagatcacatcatgatacaaaacaatatgcggcttc

SEQ ID NO: 27203 - DNA, 1479 bp, DROSOPHILA
atggagcaagagtttatggtgaatttttcgatctatgccaacatcttgcaggagaaagtggacaatctaaatattttcctagatgccctgaagcgacccaatcacaaaacccacaatgaaagggagaagttcgtttccaatccgttaaatgcgtttggactcatcagaagactaaatcaggattggccaaaattgcaaaactacacccaaaagcctttgggccttgaacaactcactgcgatgcaggatatcgtgagtgcagcccctgaatcctttgatatgaatgaaaaacttaaagcgatgcaccgcatagagacaacctatgatctccaaccaaaggatatagcaaaaggacttcttcaaaggacagaatttaactatagacttttatttcgggactgtttggctttggcttaccataaatttgaaatcggcgagtttaagcgatcacttttgtggtttcaagaagcattaaagttaagcacagatggtagtttggagattatgaatagattaaaggaaattgaattgaaaggctttgcaacagctgtagccaaacgaagcatttatttgtccaatcaaggactgactaatgagaccattgatgacatggccaatagccaattacaagatgccaaactaatggatttggaacaactgatcagttcagaattaaagcaatggattaatgatgactccacaacacctcccactgaccataatcttggatgtcgtggactctttcccaagaagtccaacctcgtctgccgttacaactcgagtacaaacgcttttctaaaactagcacccttgaaaatggaggaaataagccgggatccttacattgtgatgtttcacgaagtgattagcgataaagacattgaagaaatgaaaggtgaaattacagaaatggagaatgggtggactagcttgggagatcctaaggagattgtttcccgcgtctattggataaggaaggaatcttcgtttagtaagcgaattaatcaacgcatttccgacatgacgggcttcaaactggaagaatttccagccatacaattggccaattttggagtgggtgggtacttcaagccacattacgacttttatacagatcgtttaaaagaggtggatgtgaacaacacgctgggagatcgaattggcagtattatattttatgctggagaagtctcacagggtggacaaaccgtatttcccgacttaaaggtggcggtggagccgaaaaaaggtaatgcgttgttttggttcaatgctttcgatgattcaacgccagatccacgatccctgcactctgtgtgtccagttttagtgggttcacgatggagtgagtattatgagaaaatgttatacagctccagacataactacgagtatatactttcagcgataaccaagtggttacactacgccccccaattgtttgtgaagccctgcagcccaagagttcatttggagtga

SEQ ID NO: 27204 - protein, 492 aa, DROSOPHILA
MEQEFMVNFSIYANILQEKVDNLNIFLDALKRPNHKTHNEREKFVSNPLNAFGLIRRLNQDWPKLQNYTQKPLGLEQLTAMQDIVSAAPESFDMNEKLKAMHRIETTYDLQPKDIAKGLLQRTEFNYRLLFRDCLALAYHKFEIGEFKRSLLWFQEALKLSTDGSLEIMNRLKEIELKGFATAVAKRSIYLSNQGLTNETIDDMANSQLQDAKLMDLEQLISSELKQWINDDSTTPPTDHNLGCRGLFPKKSNLVCRYNSSTNAFLKLAPLKMEEISRDPYIVMFHEVISDKDIEEMKGEITEMENGWTSLGDPKEIVSRVYWIRKESSFSKRINQRISDMTGFKLEEFPAIQLANFGVGGYFKPHYDFYTDRLKEVDVNNTLGDRIGSIIFYAGEVSQGGQTVFPDLKVAVEPKKGNALFWFNAFDDSTPDPRSLHSVCPVLVGSRWSEYYEKMLYSSRHNYEYILSAITKWLHYAPQLFVKPCSPRVHLE

SEQ ID NO: 27205 - DNA, 3825 bp, DROSOPHILA
tctattcataatctccaaactaccatctgtgcttaactttaatgcttcttgaaaccacaaaagtgatcgcttaaactcgccgatttcaaatttatggtaagccaaagccaaacagtcccgaaataaaagtctatagctagtttccaataaagagtacaaatatttttaatacgtctcaaatataatgatttcagttagtagtagtagtttttggacttacttaaattctgtcctttgaagaagtccttttgctatatcctttggttggagatcataggttgtctctatgcggtgcatcgctttaagtttttcattcatatcaaaggattcaggggctgcactcacgatatcctgcatcgcagtgagttgttcaaggcccaaaggcttttgggtgtagttttgcaattttggccaatcctgatttagtcttctgatgagtccaaacgcatttaacggattggaaacgaacttctccctttcattgtgggttttgtgattgggtcgcttcagggcatctaggaaactaggaaacatgttatgagtgctgcgaatgtgtaattactggtgaaagttcaactcacatatttagattgtccactttctcctgcaagatgttggcatagatcgaaaaattcaccataaactcttgctccatctttaagagcttaactagccccaaaactgaggagctgtagtattttctatttaagaaatcattagggtccgtagaatgaattgattgaactagaataagcacagcagcggctctcacaacattcaacattctctagcagcttttgaaaacactgtaaaagcaatcacatcaagacaacatggattaggttattgaaattatttatttaacgctctaaatttcatgctttggtcatgcgatttaaatttccggcctgttgtacaaggtctggagaacatttgaggtctttcgtgtaaccatttgacgagtgcttcaaagagtatttaattattacttcaaaaatgttcatttttgattgaaagctaacttactccattttgagcccactaccacaggacatgatacgtgcaaaagatcttggttaggctgcattctatggtccaggtttctccaaaccaaagcgctgcctttttgtggccaaattgtgagatttaagtttggaaaagccaaggcaccaccttgagccacatcgttcatctaaaatattgccaaaaatattagttcagaaaaaatcccattccatattatatatactacatagatatacttacaaaaaacattatgctcgttaagcgatcgccaagttccgcctgaaagataagaattattttatcatcgattcatttgtgtttttctttttatccagcataccgtttgatcctgcaattctatattgtcagtatggaaatttctaaacccacagataccgtagttatctatctgaaaatccgtgtcctcttgcacgtcctctcctgtcatgtccttaattcgcaggcttagagggctctggtgatcctcgcgaattttggcgaactttaggttatagtcaatagcatagagaattcgcaaaggactctttagtgaaggcagtgaaatatttttgacttttgagatctcgctgtcatagatcacatcatgatacaaaacaatatgcggcttcaaactaagcgtttccaccttaagcggagcaatcctaaggaattcagacgtgttcttttcgtagtgacagctgagatgttggctggtctgcccaactcttagacaaccagtaacatcgaaccatggtgttatgataaactaattatggaaaaacattaagtttccttaatatttacacaaaaaattacaacttaccgtgggatcaggaacatcgatttttcctacctcataaatatctttgcgaagcaaccagagagtagcgtctaaatcagcgacgtcctgcaggactttccatgcggctttgcgaaaacctttttagggctaattatttatcttgtaaatggttagtgccacaaaactaacctacctttagttaccaaaactgaggtgtaatttatgtataaatcaggcagcctaaaatcaaatacctccctatagacctgtccatctcgatcgtcattgtagtgatctacagcagctttgaaccaatttaaggcatacttatcgtaattaaaattcatacacgcgttggccaaagcctgacagttaagtgtggtcaagctggcactgtaaacaagatttcgcaatcaacctgataagattctggtaaacttattacccacttgtattgctgtcccatcagtaatccattggctatgtcacttggctgtagattgtagaattgttgcagtgagattattccgccgatggcatcgttaagatcattatcgcttggctgggcttcctccaagccagtttcaatagcttgaaggtgttccaagccaacttgattcaacatcaatagctcggcttgggtccaatcctcgtgcagccgtcgaatgagggaaaatgcattgaggggatgagcaacgaactcttctgggttccttcgggaaatctctcgtttggattgtacttcttgtagcaaactgaaaattggatacactgaaatgaaatatttttacaacttatcccccaacctctccatcagatcgattttattcttcagggctgcagtgtagctctccatttcgctgatgaaaaaaccctccaagtccacaagctctttcattccagctatggacattgcagaatttgtaatttcacaaaggcctattggaggaccaagtgaaattaggcagattgataggatgataaacatgactatttcagttgggagtatacaaattactgacttacctattcccgttcataaatagcacgtcaattgtgtgttaaggtataacaaatgcatttgtcagggaagttttattacctacacttggtaagttgcaaacactattagttgtcgtgtttagttaacgagataaatgaccgataattttaggcagacaagaaactatgatatgtgattatcacaagtcaaactataggcacgtgctttttaacaactttttattttaaaatatatacttatttgaatggcttaattttctaaaggaaaggcaaggtgctggatatttcctttttacgacatttgcaccataaaatggatttttaaatttttttattttttaatggccttaatacaagagaaaagctatatgaactacatttactaatatctgttaaaatgtatttattgcatctggatgagacttcaattgacaaatactagaaggatattagttctgagttgtttgaggccgttataaattcgctttgagatatgccgagaaagcattgattggggctaatcccacattattggctagtacagattcccagatattaaaacttgagttcaatagccgagatactcaaaacagagaaagcaaacaaatatctattaaagtttgcatgtcgcatggcaatggaatttcatatttctacaactagtttcagtgaaagtggaggaggtattaaacttgaatctgcctattagaatatttcacaatctcatccaaattaatgaaatctaaaggcagcaagttttacgcatcattagaacagtaaattgaatatttctctcatctgtgcacttgcaagacaatttgattgggtcataatacggatgaaaggttattagggaaataattaacgggtaatgaatgtcacaggtctaagtgtctcggagtctgacgagctgcaaataagtaactatggcattggtgactgtgactatgagcaccaagactcttcagacaaac

SEQ ID NO: 27206 - DNA, 1209 bp, DROSOPHILA
gaaatagtcatgtttatcatcctatcaatctgcctaatttcacttggtcctccaataggcctttgtgaaattacaaattctgcaatgtccatagctggaatgaaagagcttgtggacttggagggttttttcatcagcgaaatggagagctacactgcagccctgaagaataaaatcgatctgatggagagtttgctacaagaagtacaatccaaacgagagatttcccgaaggaacccagaagagttcgttgctcatcccctcaatgcattttccctcattcgacggctgcacgaggattggacccaagccgagctattgatgttgaatcaagttggcttggaacaccttcaagctattgaaactggcttggaggaagcccagccaagcgataatgatcttaacgatgccatcggcggaataatctcactgcaacaattctacaatctacagccaagtgacatagccaatggattactgatgggacagcaatacaatgccagcttgaccacacttaactgtcaggctttggccaacgcgtgtatgaattttaattacgataagtatgccttaaattggttcaaagctgctgtagatcactacaatgacgatcgagatggacaggtctatagggaggtatttgattttaggctgcctgatttatacataaattacacctcagttttggtaactaaaggttttcgcaaagccgcatggaaagtcctgcaggacgtcgctgatttagacgctactctctggttgcttcgcaaagatatttatgaggtaggaaaaatcgatgttcctgatcccacgagtcctttgcgaattctctatgctattgactataacctaaagttcgccaaaattcgcgaggatcaccagagccctctaagcctgcgaattaaggacatgacaggagaggacgtgcaagaggacacggattttcagatagataactacggtatctgtgggtttagaaatttccatactgacaatatagaattgcaggatcaaacgatgaacgatgtggctcaaggtggtgccttggcttttccaaacttaaatctcacaatttggccacaaaaaggcagcgctttggtttggagaaacctggaccatagaatgcagcctaaccaagatcttttgcacgtatcatgtcctgtggtagtgggctcaaaatggagtaagttagctttcaatcaaaaatga

SEQ ID NO: 27207 - protein, 374 aa, DROSOPHILA
MSIAGMKELVDLEGFFISEMESYTAALKNKIDLMESLLQEVQSKREISRRNPEEFVAHPLNAFSLIRRLHEDWTQAELLMLNQVGLEHLQAIETGLEEAQPSDNDLNDAIGGIISLQQFYNLQPSDIANGLLMGQQYNASLTTLNCQALANACMNFNYDKYALNWFKAAVDHYNDDRDGQVYREVFDFRLPDLYINYTSVLVTKGFRKAAWKVLQDVADLDATLWLLRKDIYEVGKIDVPDPTSPLRILYAIDYNLKFAKIREDHQSPLSLRIKDMTGEDVQEDTDFQIDNYGICGFRNFHTDNIELQDQTMNDVAQGGALAFPNLNLTIWPQKGSALVWRNLDHRMQPNQDLLHVSCPVVVGSKWSKLAFNQK

SEQ ID NO: 27208 - DNA, 5858 bp, DROSOPHILA
ctcgaaaaaagctctgttggaaatgtaaacatgtagtgaatcttttctgccacaattcctccttattttgagataagtttataaataaacgtttttttttctctgtaaaattactcgttcagattagtaagtgtaaatgcacaagtcgagaacaacaaagtaaggtatgaggaagaaatctctattgtttttcctttgttgatgctgatactcttccacggaattatctacggagatggtgtgttagttttgctgaacgcttggtatactatttagttattggtttaccgaactacttatccagttaggagtacgtttggtaagagggtttaaggtgttctttcttatctcttttatcaaactcaggaactttgtattaccttacgtggctgggaacaattggaccatgttattgcgctgctaataattaataagagctccttgtaatataaatcacttttatttacttgtttgttcatttgtaagttgaccgcttgtgctgatttcgacatgcaggcggaaacagaagtaaaacgtgaaaatatgttgattatgtgactttaatctagtcttacagcacggcccaagttatgtttattttgctattaatcaaagtttactattaatgctcactacagaggcttgactgtagttacaccttacacactgatcgtaactgtctaggctgacatctttggctcttaccccaagcttcgattggaatcactcactcattcattaagttaatttacccacgagcactcgcagtcgaaagagaccaaacggcagcactagtaggcgttatagtcgaactcggaggggcgagcccccggcggactttcgctctctgaaataccgctcgtaaagctgcctggtactatgttactctggtctcgtaccgctggggctggaatggagcacggcgagtgggccagttgtcggcagtcagctccacgctctagaccccaatagttcggcgcggcctacacgcggcaaaagctcagcaagatcgatccgaatcgagtcgaatcgagttgaatcgacttttcgagtgtgtgcgagtgttattttcgtggcggtgcacgactacagctgttgtccaattctcgagcggcgcttggcctcgagttgcaaatcgcagcggtaataacaaaaccacgtctgggtttacataaatatgcaattgaacatgcgagcatagcaaatactaaatttagtttgttattgattactcggattgccagtggcaccacctcccccccccaacgaccatccatccaatcgattgtaacacagggaaaaatccaatagctgcagtactaatgtgccatgaagagaacaacaaattttatttatattatactattgtgtggagaatatgttaaaaattacatcattaaacaattgtatttcatttaaaaaaaaataattcatatgcatttgcctccaattcatgaacaattatagttcaattatcacacgtttcaaaaatcacttaacattgttaattttactatttcagtttgtatatttttaagctgtacagttgtttataatacttatattcgcacacaagttgtcaagtaactaattcttcgccatcaaatgagggcaaactgtttaaaacaggtttcggataaattactctaagccaaattcgttttcaatgtgattagttggtttagtgaagcataatttctttctgtgcgacagaccccacatatttattgattaactgacaacatacgatgagcaacagcaaaccatacatacgtacatacatgcatacatacaatcgtacatcaatatcagtaccaacgaaagaggtctttactcttatcgcaggcgcgtgtttacctccccgtgaatttgaatgccgatttgtgtcggattgcgcgattcgcacttgtggaaactaactaactattttactgtcttggcggctatactgtgaaacagtggagcgtggcttgtgcatgtggatgtgcataaaaatggcattggccaaatcaggtttttggctaacaatgcttaaataccaagaaggccagccgtgacactttttcatttggggtcgctactagcgagggaccactgtggccgaactcaagtggaaatgggcatctgtgagacgagtgtgagtgagctgtgtgagttcattgattaaaagtgctcagctgacgttgccgtttctttgtgaatcttatcggagcgcagcagcaacaaaaataggaaaaccaattaaaaacaccaatacaccggatcgtaggggactttatgccatgcaaaaacgatcgtgtgtaagcggtgtattattgcagatatgtgtactactacttgtacactcacaaagaatcacatcgaatcgctgaccaaagtccagtaaaaaagcccagtctgactggcaaatcgccatagaacgatcactttccgtgtcgaaagtgcggcaatcgctgaagtttatctttcggtggcgaaaggtgctaaaatcttaaaaaaaactgatcggtccgagtagagaccaatccagtatagtgcttcgaaagtgagtcggtaaatattaggcactttcgcaccaagtgctctccaaatgagcaaatatgttttgtttccacagtcaccaaatgctgtgctggatattgaaagtcgtctccagataatgaaatagatcgtttcgaaccgggagaatcggttttgtaagctgtcgtaatgccggatttcaagggcagtggtctacaatgcgtgaaatgctaatttggcgctgcgacctttctcgatgtcatttcggaatacgagcttcacgttaaatatgcaaaaaccgcattcaaaaacgaaccgagccatgtgtaccgactctggaatacctcttaacagcggggcgcactgacttatttatgttcttcaaacacaatcggatactcatattttcattttgccaattttgatttatttccctatttcaactgcaagagcaatctaaaaaaataattgttcagtaccagggtattcgaaattattacgcaaaaaattttaaattgtttgttgcctctttgttggcgtttatttatgttttgttcccccgttttgcgtcatccagtcgcatatgtttttatcccacagtgacttcctcgatatttgaatattagtcaaaacactagagccaaaagataaggatattggtaaattaatttaaagttcatcacttatcgttctgtttctcgccattgaaagcctatcgttcggatagccgcgtgaaggcaaggttatctttttattaaaaatatataatcatggttcaaggaacttacgcaattgtaaatttacaagttcacggaaataatttctcacaaagcaatgatgaaaatataatgctaaaatggacacaataaagtccaagagttagataagcaattctttgttaatttcgtggtcacccgcttgtttagtgcttatcaaatttgcaatatttacaagtattgattacttaaataccccatgtgataaaaactcactttccaccagtacaaagtgtccagcgtgattgatttttttgtttttccctcccttttcccactttttcttatgacaaaaaagacaacacaataaaatcaatgtgcgaacaggggataagtaaaaagtcaggtgtcgtcttccccacatgtcaatacatacatatgtacatgtatgaggttcttaactggccggaatttcaggccactaaagtctatgcgaactctagccgggttaatggaatatcaaataaaatgtattcattatatggaaaattatagcgaccaatttattcatttgagcgctggaaggacagggtcagcaacttagccgccgtgttccattttaatttcaaatgtcgggaagtgtgagcactaattgatcgtgtgcctggaatgctaattagttggtcgtacttcacctagaacgtttgattactcagaattgtcccgaaatgcaatagcaaacatttcatttaatcggtgtctatatgagcagtattattcacttaatttattcaatgatattttttgtgccatttcagggtttcgaattgaactaactcccaaaacggcagaatgactggatcaggtgagtatttaaattaaatcaattaacttttcatcagagtggatataatactttgtagacagatcgctttcatatggaagcaataattttaaaaatagctgttttaccactttcaatcgaaatgtcacgatcagattgacgcaatgctcaagaaaattatttatagcatacttatgggtatatcaatttagctatctaatgtagaatagttgtatacaaagttttgtcaaatactttttcgttgattaaaaaaaaaaaaaaataaaatatatatataacaaatagcattgcaagttttttcaaatcattctgtctgtaaggcagaaataatacagaagattaaatacagaagataatcatatatacgtattgatgaatagttaaaacccatttaattcactgaaaaaagaaagtttatgaccttctattatttttctaaatatctaatcatctttttccttttttcacctcttagtgcacgatccgaaatggagcctggagcgccgcgagtcctctggccatttggtgtggcgcaaggactctccggagtcgaaagtccgttttcgcttcgacgtcgaggtcctggagttcgagaggcatcctcatgaggagctggatgacaaagaggatcacttctcgatgaccaatctctcggcgacagtggccatgtgcgcaacttgtgttgccgtggtggccgtctccgtgttcctgccctggtatttgatggagaaagtgggatcgctttaaaaaaaaaaaaaaaaacgggcctcaagagcccggcttcttgtatataggtacccggacggtattaagtagactcttgtacataagcaagcgtagttttaactatttgtatatagtacgtacgttgtatataggacctgtggtttttataaggatagagttggaaaaactctaggtgcaatacgagtgcgacagtgactgctaaagccgaactatggaatgtggattgtattttaggacgtgtacattctcataattttagtcctatgaaagatcgcaaaaatagttaatggaataaacgaaatacttgcccttagaagttgtatcttttgtttttgggtccccaaagggtcgtatctggtgtatgcaataaaaggagattacaagatcacgagaattctcaacagaagccggtataataaatgtttatcacgaacaatgcagatactactcggaattgaaagcaaccaattagaccttcgaatggacattatgaactgctcaacccctggagctctgcaccaatttaaggtaacaatcatccaccgcagatgctgcatcccttaacgagcatcccctcgcaaggacatgcgatgagggttgatggcgtaatccctgtttcggtgccttgattaaaattcttccctctttatggccatgctaaaagcgcgcaggcattcaataaaattcactgctatcaaatcattgggcaacgatggctaaaaatggccgattggcacgttggaaagtaaactttacgacccaccccttgtaaacacccaaactacgttgaaaaactaattgaaaaaactaattagaagaaagaaggttctaatgtttgtttacattttttcatctaatatgtgtttagccaaaaaaaattaaactgagttttaaaacatacctcttaatttatattttctcatgacttgtcttgagatatgcaaacgcaaattattaaatattttttgtgtgtgttaaacatagttccgagaatgttttgtttgttgttt

SEQ ID NO: 27209 - DNA, 527 bp, DROSOPHILA
tcagctccacgctctagaccccaatagttcggcgcggcctacacgcggcaaaagctcagcaagatcgatccgaatcgagtcgaatcgagttgaatcgacttttcgagtgtgtgcgagtgttattttcgtggcggtgcacgactacagctgttgtccaattctcgagcggcgcttggcctcgagttgcaaatcgcagcgggtttcgaattgaactaactcccaaaacggcagaatgactggatcagtgcacgatccgaaatggagcctggagcgccgcgagtcctctggccatttggtgtggcgcaaggactctccggagtcgaaagtccgttttcgcttcgacgtcgaggtcctggagttcgagaggcatcctcatgaggagctggatgacaaagaggatcacttctcgatgaccaatctctcggcgacagtggccatgtgcgcaacttgtgttgccgtggtggccgtctccgtgttcctgccctggtatttgatggagaaagtgggatcgctttaaaaaaaaaaaa

SEQ ID NO: 27210 - protein, 94 aa, DROSOPHILA
MTGSVHDPKWSLERRESSGHLVWRKDSPESKVRFRFDVEVLEFERHPHEELDDKEDHFSMTNLSATVAMCATCVAVVAVSVFLPWYLMEKVGSL

SEQ ID NO: 27211 - DNA, 4901 bp, DROSOPHILA
gttggtcaattcaataatacaaaacagctggctcgaatcgatagcgaagtcgatagtggctagatagttagatagtggctaaaacgtatcgaattccaaatgtaaatttaaatgtgttaaataaatgatattaaaatatctaatttgacaaaatattgactttaatataaagctgaacaaataacattctatgtagatgatgtatgtttttggtatattcgcccagccgaataaagttttatagtatactttccagagcacaagggtaaaaatcataaaaaattgtgcggtcacacagttcgcgaacggccgctttaagaataagtgctcactttatgtgcggattagcgaataaaagtggcaaagtagtgcgcttttgacggcgcgacgtcaacatggctaagaaaataccttttaacgtggtgttcgcctcaggtaaacaaaacttcggatatattatgaactgaaagctgcagaaagatttttattatttatagttttcttatttgtttgctttattttgtgtgttttttatgttcttaattgcatttttagttgcgacaggatttggctgagagctaaacgtcttccacctccctttcttcctttaaaattcgctgcacttgagaaatcgataaatcacgcatacgcctagtgcgccaggacgttggaatttaaaatagactggcgctgcctttttaattgcagctaatcagctggcaatagtccgatttaaatatggccaggatgctaaatcaattttccaaagtctcggccaatttaccacgtcctaaaaccactgcaaccacgatgactgtaatatttcattataatattgtcagactgccgggttgtcgactctttttgtgtctgcatgtgcaatttgagttgcggccagagatttaaatttggccaaacgccaagctctttattttcatgctaggacctgacaaattttggttagcctcgatggcctcagcctcatcctccccagtatcacctactgggcctgctccgccttctttttggaccgatacttaagtttagttagaagcgatgacaccggcgcgataatggtgagtccataaacaatgccggtaatcagcatcatgccgggaataaagtcagtatccacatacttggtaaagaatttcgaatagtagcccaggtaaatggcgcccattcccagactaaaggtgaccaatccaaatagattatggcggaagcgaagctctgatggaggcattactttcagggcgaacttgggctggaaatagttgacaaaaccgcctacaatgctggccgcgcagaaaaaggaagcagctccccctgcaaaatgtcagctttaatcggttttcctgaattaacctaattatttactcacccactcggccgtgccaggtgttaaagtgcacctccttgctggaaaatttacccagggagcccaacagcaccatggagccacccacaatctgcaggatggcgtggaagcgcgacttgtttcggtgcgacagccaacgggtgagcgggttcactttcgaatgcgacatcatggcctgggcgataaggacgtggaactgtcgagagcaagaaaagccttttaattcagctccagttcgataagataacaagtgacgttgcatgtccgtgttatccaggtcgatctaacactattgattttgtggccaagtgcttatcgccgtgtactcactccagtcccggtcataaacatatgcatggcggtatccttgaactccagactgcgcgccagtatgaaaaagaagacggccaccagaaagatcagaatgtggttgatgctattcagcaggctgtggatttgcagccaggcagtggctttcgtgtaaccctccgccatttcaaaagattcaataatactatctgattcagtaacaaaacacgaacggctgagcgacgactaaactagcatgttaacatcgacatcgcttaaatatagaagagaagagcgtggaacctgaggatagagaacaacaagttagattcgtttgtactcgtacagctgcgttcgaataaatagtgatagttgagaattcttaaagtaactcaaatgtttttgtttatgctttccattttatacgtttcatcgcatatataactgataacctgtttctgaatatttaatagattttaaggcttattattttgggcacgcttgaatgctagctttcgttttgaccgctgctgttagcttagcaaccgaaagagaacgaaacatagtccgatatcgttatcatgtgcaactatttagctgagtgtgcgaaaaagagacttattaagagagtcataatggcctgcgccacctatacataggttataacgtcatgaaagtaatgatgattggatcgtttcgcttgcctttcagacgaggatgttaactttccggctagcgagttaaacaatcacggccccacagttcacggatggcgaagtgctccgaacggcagcctcacctcacatgacatcatcctccgattccagcagccggccaagatctatcgcatccagctcctggcacaccagtatcttatacgtaagttaatgtgctaagttaattggaattggctacaagcctaataagtacctagaaataatcaatgcctgatctttagtatgatcaaagatgaacatataaacaaacagcttgagtattccctataatgtgttgttttttcgtttagctgagaaagtagaactctggctgcactactcgcccaaatccctgcccagcactccatcctcgcagtactttgactttttgggttttgttgccctggcggataatgccaacacgaactacaagtctcgggagctgcagagcgtaaccgtgtgtccacgtaggggcacacatcttaagctgcgtctgattggcgtccaaggaaacgactacaatgacacaggccagatttccctactagcggtaaatgtcctgggcgaggatctggaagtggggccaaataatggcaacggagaggagcacttggccaacgaggccccaccgttggacacggccaccggagaactggccctggcctccgtctgtgatgacctgcttttctccatgtatgtggaggagtcaatagtgcagaccatccgagagttggaacagcgaaagattttggccgttaactcagaaagattcgagtacgcccgcaaactgaagctatgcatgacagctttaaggactgccggagaacgtttggggcgctatgctctggccaagaggcaggctgttcagcaggaggactttaccacggccaggctacgcaaggagcagatcgagatgtaccgggcggcagtacttcgacaattgcaggtgcatcagcttctggaaccgcagggtgtgaccttaagctccaatgaccaaagctgcgagatctatgcgggtgggaagcccagtctgccatcggctcctagcctgcaggatgtggcacaggcacttgcggaagccaccttcagtcccaagagcatgacgagtctcagcttagaggacaaatcctcgaccgatggctcccagcctggtaacgacaatacgttgacagctccggcacctgctccagcacccgctcctgcgcccacctctttgcaggccacgcccactcccacgctggggggctggcgcaagtcccacgacgagctgccgcagtcgccacgtctgccttcaaggcacagctcaccaatgtccagccgacagggatcgctgcgcaggcgcaacaagagcgttccacgaaactcctacgaagactacgaggagcgggccattcccacgctgcgacagtgagtagcgggcgtagagagtcgtaatcgttgtctgggtgtctagtgaatacgtaaacaattgtggaatagtaattacttcgtttgtttactggaaacagctgtctattacagtgttgcatgataaccggtactcttagtttgaatgtttgtcaacactagcgaccgttagaaacaacacccgttactttttttaatttaagatttaacgctcgcccagaatttcaaagaacgaaagagaatctattagcttaattttaagtaaagccgttttatctgctctaaacacatgaaaaggatttatctttttaaagcaaaagcaaaaattctttatatattgaaattaggtatttttgagatacttttaaatgttaggctttttgacagaaattttgcttttagatattttaaaaagtatttaaaatttgcttttagagaaaagtatttatgtttttattaacaacttagaaacttttataaaagattaaaaatagtttgaacggtttcatagttaatttcatataatgaaatttcgaaactatacacaaaactttaaattaggcgttatttgaacgcatttgaaagtaacatgttgttagatttacctttaatcgtacttacctttctactcctatatgtatattgtaaccgcatccgtaaacgttgccattccgatacaacaaacacaaaccgctcacagttcaaatactaatgaatttttaagggagtgccaaggcaacgcgctactggaagcggatccgaaccgtgggcgttcgcgcctgaacgaccgcgagcgtcgccaggcagcgcttcccatcctggtcttcggcaatgagctggtgagtcccccattaaatccaatagataacatattcaatacgtgccctacatatgtatattcccaggtggagcagttctattcgcgtcagtttcaggaccgcgaggatggcttgatgcgtctgcgtaacttcctaaaggagcacgacctgttagaggcgtcgagcaacgagcacgctgccagtcccaacaaagtggcccgcagcgccgcccttctgctgcatcgcgctgtaagagatgccgtttactcc

SEQ ID NO: 27212 - DNA, 992 bp, DROSOPHILA
acaaacgaagtaattactattccacaattgtttacgtattcactagacacccagacaacgattacgactctctacgcccgctactcactgtcgcagcgtgggaatggcccgctcctcgtagtcttcgtaggagtttcgtggaacgctcttgttgcgcctgcgcagcgatccctgtcggctggacattggttccacgctcttctcttctatatttaagcgatgtcgatgttaacatgctagtttagtcgtcgctcagccgttcgtgttttgttactgaatcagatagtattattgaatcttttgaaatggcggagggttacacgaaagccactgcctggctgcaaatccacagcctgctgaatagcatcaaccacattctgatctttctggtggccgtcttctttttcatactggcgcgcagtctggagttcaaggataccgccatgcatatgtttatgaccgggactggattccacgtccttatcgcccaggccatgatgtcgcattcgaaagtgaacccgctcacccgttggctgtcgcaccgaaacaagtcgcgcttccacgccatcctgcagattgtgggtggctccatggtgctgttgggctccctgggtaaattttccagcaaggaggtgcactttaacacctggcacggccgagtggggggagctgcttcctttttctgcgcggccagcattgtaggcggttttgtcaactatttccagcccaagttcgccctgaaagtaatgcctccatcagagcttcgcttccgccataatctatttggattggtcacctttagtctgggaatgggcgccatttacctgggctactattcgaaattctttaccaagtatgtggatactgactttattcccggcatgatgctgattaccggcattgtttatggactcaccattatcgcgccggtgtcatcgcttctaactaaacttaagtatcggtccaaaaagaaggcggagcaggcccagtag

SEQ ID NO: 27213 - protein, 228 aa, DROSOPHILA
MAEGYTKATAWLQIHSLLNSINHILIFLVAVFFFILARSLEFKDTAMHMFMTGTGFHVLIAQAMMSHSKVNPLTRWLSHRNKSRFHAILQIVGGSMVLLGSLGKFSSKEVHFNTWHGRVGGAASFFCAASIVGGFVNYFQPKFALKVMPPSELRFRHNLFGLVTFSLGMGAIYLGYYSKFFTKYVDTDFIPGMMLITGIVYGLTIIAPVSSLLTKLKYRSKKKAEQAQ

SEQ ID NO: 27214 - DNA, 6362 bp, DROSOPHILA
tgataagcccacgccccaaggttatcaatgcaaattgcttgtgtgcaccatggagtacaccccacgatcagtctataattgtactccgatcgtagcttatcaatggcgaaagcactcgtacgcacgcagatttgaataaagcccgaggtagtctttgatactcagtgggcttgggctcacacacagaactgtactttcgaccttttgctgttggccaaaagcgaacgaacatccaataggcaaactccaaaatcatctcttactttgccgtgagattcggcagagttcttcggcctgttaggaaatgttagccccaaactatgaggtttgaaacaatagttaattgtattaaaaaatgtgtttatctcctcacgcttcccgcatgatctaatttaatttgttgtaccgagttatctgaacacatccggttttcgtagtgacacgaaaaacgtaactaaataattatatcaaccattaagggtcaattacggttacatttttagaacgacttgcttttgttcttagtgtaaattttccatttgtgtaaatatttgcaaagattctctatgtttgttgagtgcttttgagataatggaagtggttccaaggattttatttactagaaaatactattaagcagcactttatggccagcttcttcaaaactatattatagatttaagaacatggcttcaactatgtattcatttattgtatatgattgaagtagtagcagctaatcacgtgatttaattacgatcttgctagtagtttcccacattccccgatcgcagggttagcctgacctctgtctgaagaaaatacgtacgatgtgtagtccgtagaagtgtattataatgaaataagtccgtgctgatagcgaacttggcccgccatacgttttgccaggctggcaaagatcaggcggtgtgattgtcagacatgcagggtgtttgtcgagtgctaaccataattaaaggcgaatttgtcttatcgctggaaacagtgaaacatggctcgtttccgccaaacgcatttatcgtgtttccagatacccgcgattcgcgattcgagtgcagcggaagcggccgtcaggcgcagaaatattgttcttctccgagataagttagcagcaggtagttcaggggatcttatctctcacctgcttttagtgcccggcaatttgggaatcgattttacgggttccacacttgtccacttcaaatggaaatctcccctggctttgtttacgtttggattcgcttcaatggaggtggcacttcgtcaccacagtttaaaagccaaagtaattacagtaggcactcgccagtgagattagatatgtttgacttgctttgctattacttaagatatttgtttccaaaaatcatcgtgatacgaattcatttattatcgcaaattgttaaatcacttatatttttaatctaaactagtggcacagtgatttgaaaaaaaaagaaactatagaaatcgtgagtcattactgctatgttttcagaaaacaaaggaaatcctagtaattattagattaagcaatcaaggaaacaacataacttttgtcattattcatattttcatacatttgaagaactgaaaggtttcttatagcgagcagtgactgtagatcgtacgactctgacttatgacgtacgacagctgaagattgccgaaggtgcccgaaattcgacttggcaacagaattagcatgtccacggggaaggtacaataaattcgttaaatttcaaacagcgcttacatcagatccgaaattattcagaaaatctctcggattttatttttatggcttgaacttgaactgtaagcggcttccaagtgactcacgtccaaggcaaatcttgaacacaaaatcaagcactctgctcccctttggagtcgccaggagggactcctccagataaggtgtagaaatctctgacgtattcccaatgccaagaaatatgcagacgctatccacacacgtagatacatatgtaaataggcatgtgtgccacgatgaataaacatgggaaatcgtctacctaaaattattgttagccacgcacgagacagctgaccgcacagtgggcctatttacaatattatcgaaagaagcatttaaaaaatgaggaatttctactttttctatgacgtattgtatatttattatgaacaattatgtagttccaagcaaatgccccaaaatacgcaatgctaattatgtacatatgtgcacatatgacgatcttgtttaattatttcgcacgcagcatcgttttttttttttggcacaaaaactgatttagaacgaccttcgggaaattcgtcattgaaaattcccggtagctgaaataatatgtacatatgacttaactaatcccaactgtaacttcctgcgtgctgcttttgctgggtgtgccatggagcacgagaggattggcgcccagctctcggggggaatgggtcatcgtgtccggctcacgtgttccgtctgcacttgtttacgtaaagtggcgctgcatactcggaactagttctgcgctgggttggccgcccaccctgctgccttccccgccagcgcttcacttgctcatcatcccgctcctatcgagagtactacgtgtctctgtatgtctattattaccgacaccgagccgtgttgttgtttacccgctgtttcagttgcgttttttttttctgcggaatttctctggtgcgatgcgcgtggcgaattgaatcggccatttggcaattaaaactgaaatcgatttggccgtggctcaacttcgaagaaaaggggcgtggctgggggcgcggggtcaggtgtcacgtgtcgtcagcgcaaaacagtcagaactactgccacccgagtcataaatatttgggttaatgaaaagggaatatctgattacataaaaatggtttcacaagaaagtatctttccattagctgcgcgaatgtgtaatatatttttgcttatgcaccaatgcattaaattgtagttcaaaaataactttgtttatttcgaattgtttactgctttattggattttatttataaattgcttggtaaacaagtgcatatgtgtcgattaaacaaaacaagaatacaacttgtgttggttcattgaagtaaaattgttattcctttttgagaaaacttattaaccctttggctaaaagttacaagttggagtggtggaaaaattggcaaagggaaatttgaataaaatccagcgaatgaagaaatttgataaatgatgcttgcaactacatataaacagaatgcaaagctaaccaaatgcggtttcaaagaaaaactttataatttcataagactaaatgtgatgtaaacgaaacgtaacacacaaaatatgggaaagtaatgtagagcattgatggtaaccaatctgtttctcgatctcttccagctgaaagtcaattgaatctctgttcctccgtcaccgcgtcgcgaagccgttaaaactgccgctcccaaacattcgctgcgatggccacctcatcgatactcgccaaaagcacaattaatagcacatcgccaccggccacgcccagcagcagcgcgtcccccggctccacactgaccacccggaagcggacctacgagatagccattgccatgccctcgtccaccgcctccagcagcgccacaaaggtatcggaagttcaggatcagcgcacaaacagccccggcaagtccaagagcaggcccggccagctggagagtgtcttggtggtcggcgagggagccagcgagcccaccacctcggccaccacactgcgggacagcacacgcaccatctcacaaagcgacgccgacgatggcggcgaagcggcagccgccgaggacctgctgcccccacagtcggattacctcaacggcgtcaagcggaagtacgtcccgcagcagcaggcgtcgccgaatcaccgggtggtgcccgcatccacctcgcagcaattcttcagcggggcctccgattttgcggtaagtagtcaagagttaggatgcaaagttagtctaaatcgtagtagctgaaatcgtttgaaattgatgttcgagtcgtgagtcgtatatttccgacgatgtgtgataagatcgagaaagaatgtgtagaccaaggacacaatcgtccagttgaatagcccaactaatcgggaacttttcttcctgcagacaatttgcaagccggcgccctactctcacgacgaggaggccatgctggagcgggatagatgtgactacactcaaaggatcacctaccagatggcccgctccggacagacgacccgcagggtgagggtctacgccgatggcatctacgatcttttccaccagggccacgcccgccaactaatgcaggccaagaacatctttcccaacgtgtacttaattgtgggcgtgtgcaacgacgagctcacccaccgcatgaagggacgcaccgtgatgaacggcttcgagcgatacgagggagtgcgtcactgccgctatgtggacgaggtatgttctgcccggcactgattagagatctttcagtctatagcatcttactctgtcttgcagatcgtccagaatgcgccatggactctgtccgatgaattcatcgccgacaacaaaatcgactttgtggcccacgacgacattccgtatgtaaccgatggcatggacgacatctatgctcctctcaaggcgcgcggcatgtttgtggccacggagcgcactgagggtgtgtccacctcggacatcgtagcccggatcgtcaaggattacgatctgtatgtgcgtcgtaatctggccagaggctattcggccaaggaactcaatgtgtcgttcctgtccgagaagaagttccggctgcagaacaagatggacgagctgaagtcgcgcggcaagcgcgagctgagcaaggtgaaggtggacatcatcaccaagtgggaggagaagtcgcgcgaattcatcgacaccttcctgctgctgttcggacgtgagaacctgaatcatttgtggaacgagtcgaagggcaagctgctgcaggcactcagtccgccgggcagcccgtcgggatcagtgaacggtgatgacacggagggcggcgaggactacagcgaaactattgacgagtacttggagatggccgagaagttgagcgggggcagcggcagcggcagcagtggatcgctgaacggcaaacagaggccgaagcagaagcgctcctcgctggcccgccgcagttaccagagtctgcagagccaatcacccgacttggaagcggatggggacgaggatgcggatgcggatgcggagtacgagcgtcgaagcaattgattctattgcggggcagcccgatcttttcttcttctcttaatgtctttaatgctattgtaaatggacttgcttgcaactagttcgacggcacactatagatgccccaggatcgccacgcaggctccacgaacacacacttatatttactctagccctaagtggtattgtaatcccaatgttttagttggcactcgttctcctcctgcctcaactccacctgcccatctccatctgtgagaatcgagggaatcctgtagctaatttagctgtgtgtgtgtgtgtgtgggacaagcaaccaccaacgcggaaaagactcatttttgtattaggcactcgacggactgtgcacgaaatcaatcggcagtggcggcagattcaggtgccgaaaatatctagaaatatttatattaaattatttcgcataacattaaactaagttaacaacaccgcaaccagaacaccaaccaatatagagaaatccaaacaaacaaattacgaaatacattcggaaaatgcaaaaaacaaaaacaagtaattagtaacagttggcaatagcggaactattgcaaatgctttgttaaatattttttgaaaaataaacattgaatcgaaaggaaatagaagtaaagcgagtggcttgtgaatcagtttgctatctcatacgtttatccagcaattgcgcatccgattcagcagccatccatggcactgctggaattcttgagcgcgcgccaccgatgatgatgaaaccgtttgccttgattggacacccattccctcgcaattagctgcccattcaccggcttgaagcggttcactgatttgtttaatggcgctgcggtttatatatagatgcgcacccatcgcctgatcgaatcggcggacccgtgccaagtcaggcgaccgacccgttgcttcctatttgcttgcgccgcaatttgcggcaattgaagatgagcgatgaatccgagccagagacttgggcctgagactgctagag

SEQ ID NO: 27215 - DNA, 1797 bp, DROSOPHILA
aaacagtgaaacatggctcgtttccgccaaacgcatttatcgtgtttccagatacccgcgattcgcgattcgagtgcagcggaagcggccgtcaggcgcagaaatattgttcttctccgagataagttagcagcagctgaaagtcaattgaatctctgttcctccgtcaccgcgtcgcgaagccgttaaaactgccgctcccaaacattcgctgcgatggccacctcatcgatactcgccaaaagcacaattaatagcacatcgccaccggccacgcccagcagcagcgcgtcccccggctccacactgaccacccggaagcggacctacgagatagccattgccatgccctcgtccaccgcctccagcagcgccacaaaggtatcggaagttcaggatcagcgcacaaacagccccggcaagtccaagagcaggcccggccagctggagagtgtcttggtggtcggcgagggagccagcgagcccaccacctcggccaccacactgcgggacagcacacgcaccatctcacaaagcgacgccgacgatggcggcgaagcggcagccgccgaggacctgctgcccccacagtcggattacctcaacggcgtcaagcggaagtacgtcccgcagcagcaggcgtcgccgaatcaccgggtggtgcccgcatccacctcgcagcaattcttcagcggggcctccgattttgcgacaatttgcaagccggcgccctactctcacgacgaggaggccatgctggagcgggatagatgtgactacactcaaaggatcacctaccagatggcccgctccggacagacgacccgcagggtgagggtctacgccgatggcatctacgatcttttccaccagggccacgcccgccaactaatgcaggccaagaacatctttcccaacgtgtacttaattgtgggcgtgtgcaacgacgagctcacccaccgcatgaagggacgcaccgtgatgaacggcttcgagcgatacgagggagtgcgtcactgccgctatgtggacgagatcgtccagaatgcgccatggactctgtccgatgaattcatcgccgacaacaaaatcgactttgtggcccacgacgacattccgtatgtaaccgatggcatggacgacatctatgctcctctcaaggcgcgcggcatgtttgtggccacggagcgcactgagggtgtgtccacctcggacatcgtagcccggatcgtcaaggattacgatctgtatgtgcgtcgtaatctggccagaggctattcggccaaggaactcaatgtgtcgttcctgtccgagaagaagttccggctgcagaacaagatggacgagctgaagtcgcgcggcaagcgcgagctgagcaaggtgaaggtggacatcatcaccaagtgggaggagaagtcgcgcgaattcatcgacaccttcctgctgctgttcggacgtgagaacctgaatcatttgtggaacgagtcgaagggcaagctgctgcaggcactcagtccgccgggcagcccgtcgggatcagtgaacggtgatgacacggagggcggcgaggactacagcgaaactattgacgagtacttggagatggccgagaagttgagcgggggcagcggcagcggcagcagtggatcgctgaacggcaaacagaggccgaagcagaagcgctcctcgctggcccgccgcagttaccagagtctgcagagccaatcacccgacttggaagcggatggggacgaggatgcggatgcggatgcggagtacgagcgtcgaagcaattga

SEQ ID NO: 27216 - protein, 526 aa, DROSOPHILA; identical to SEQ ID NO: 51

SEQ ID NO: 27217 - DNA, 3021 bp, DROSOPHILA
tctcaatttgtttttctagccagtcacgttcatttgtttattttttcagttgagtgaggtaggcaattcacggcgattataccgttcagctgataagaaaatgaaactcatgctttgtttgctggcttttgtttttgtttgagatttttgcattttgaagcatttcaagttattcgctctcctctcttttctacgttttagagataagcctttggtataagaacgttctcgaaagtggaactgtttttagttgcagttgatcaccaaaaggaatagaatgaatacattgagcagtgcgcgatctgtggcgatttacgtgggtcccgttcgatcttcaagatcagcctccgttttggcacatgaacaagctaaatctagtgttagtatgcacaaaatccagtcgaaatagatttatcatgttattagtttccaattatagataacggaggagcacaagacctacgatgagattccgcggcccaacaaattcaaatttatgagggctttcatgcccggtggtgaattccaaaatgcatcgattacggaatacaccagtgccatgcgaaagcgctatggagatatctatgtaatgcccggaatgtttggccgcaaggattgggtcaccactttcaacacaaaggacattgagatggtattccgcaacgagggtatctggccacgtcgtgatggcctggattccattgtatatttccgcgaacacgttcgaccagatgtttacggtgaggttcaaggattggtggcttcgtgagtataaaatctaataagtagcaaggaaacaattgaatttgaatatttcagacaaaatgaggcatggggaaaactacgatcagccattaatcccatctttatgcaacccaggggcttgagaatgtattatgaaccattgtctaatatcaataatgagtttatagagcggtaagaaatttttgttattgaattgttatttatatatagcaataaattccattttactgtgcagcattaaggaaatccgcgatccaaaaactctagaagtccccgaagattttacggatgaaataagccggcttgttttcgagtcactcggcctggtggctttcgatcggcaaatgggtctgattagaaaaaaccgcgataattccgatgcattgaccctcttccagacctcgagggatattttccgtctcacatttaagctagacattcagccctccatgtggaagatcatatcgacgcccacctacaggaaaatgaagcgaactctcaatgacagtttgaatgtgtcccagaaaatgctgaaggaaaatcaggatgcactggaaaagcgccgccaggctggcgaaaaaataaatagtaacagtatgctggagagattaatggagatcgatcccaaggtggcggtgattatgagtctggacatcctattcgctggtgtggatgccacagccacgcttctgtcggctgttttactctgcctctcaaagcatccggataagcaggccaaactgcgggaggagctcttgagcatcatgcccacaaaggattccctactcaacgaggagaacatgaaggatatgccatatttgagggctgtgatcaaggagacactgcgatactatcccaatggctttggaaccatgagaacctgccaaaatgatgtgatactttcgggttaccgggtgcccaagggaacgactgtcctgctcggctcaaatgtgctgatgaaggaagctacatattatccacgaccagatgaatttctgccggagcgctggttaagggatccggagaccggaaagaagatgcaggtcagccccttcacgttccttccctttggctttggaccccgcatgtgcattggcaaacgggtggtggatctggaaatggagaccacagtggccaagttgattcgcaatttccatgtggagttcaatcgggatgccagccgtccattcaagaccatgttcctcatggaaccggccattacgttccccttcaaattcacggatatcgaacaataatttgcttctcatttgtggcctttacttgtgttccttatagttgcgatttttgattacagtaaatgtttgactgatgaaatgcagataagaattttgcctcctcctatttcgcattgttgtgcaaacctcgctgtttaaagagatgttactaaaggatgttactaaaaggcattccgacagaaatcaaaataaaacatatcttctactgagcatataagcctatgtctgaacaataacatacttatattgaatatgagcggttgatatttttttagcagtatcaagctttcttgacttacggcaataatttcgctttctatcactgtgatggtgggaattcttaggagtcatgctggattgcagcttttcaatttgtagagaatcgttttgttattcctcttgggatgcgatgctatataagcattttggcaggcttcccagctcagttgtcattttaggcaagcagttaataaaattaactatgagtattgcgcagaatgcgcaatccattcagcttgtgagggcatcttctagtcaggcacagattttggccaatgtgagttgaaatactatcaccacaatcgggtattccactaacatacatatgtgatctggatattaaggtagccgatagtgtagtcactgaagcgagatcctataagaacattccacttcccagaaaacaggaatttgcaagggcatttatgccgggtggagaatttcacgatgcctcaattttggattatgcagcagcgatgagaagttgttatggtgatatcttcataatgcctggaatgtttggtcgcaaggattgagtcaccacatttagtacaaagaatatcgagactgttttccgcagtgagggaacttggccggaaaaggatttctttccctcgatcacatatttccatttatggagaaagtgtgggtctgatattcgcgtaagttaccaaataattacatatgtatatcaaaagcggaagttaatttggaaactata

SEQ ID NO: 27218 - DNA, 1021 bp, DROSOPHILA
cattaaggaaatccgcgatccaaaaactctagaagtccccgaagattttacggatgaaataagccggcttgttttcgagtcactcggcctggtggctttcgatcggcaaatgggtctgattagaaaaaaccgcgataattccgatgcattgaccctcttccagacctcgagggatattttccgtctcacatttaagctagacattcagccctccatgtggaagatcatatcgacgcccacctacaggaaaatgaagcgaactctcaatgacagtttgaatgtgtcccagaaaatgctgaaggaaaatcaggatgcactggaaaagcgccgccaggctggcgaaaaaataaatagtaacagtatgctggagagattaatggagatcgatcccaaggtggcggtgattatgagtctggacatcctattcgctggtgtggatgccacagccacgcttctgtcggctgttttactctgcctctcaaagcatccggataagcaggccaaactgcgggaggagctcttgagcatcatgcccacaaaggattccctactcaacgaggagaacatgaaggatatgccatatttgagggctgtgatcaaggagacactgcgatactatcccaatggctttggaaccatgagaacctgccaaaatgatgtgatactttcgggttaccgggtgcccaagggaacgactgtcctgctcggctcaaatgtgctgatgaaggaagctacatattatccacgaccagatgaatttctgccggagcgctggttaagggatccggagaccggaaagaagatgcaggtcagccccttcacgttccttccctttggctttggaccccgcatgtgcattggcaaacgggtggtggatctggaaatggagaccacagtggccaagttgattcgcaatttccatgtggagttcaatcgggatgccagccgtccattcaagaccatgttcctcatggaaccggccattacgttccccttcaaattcacggatatcgaacaataa

SEQ ID NO: 27219 - protein, 1 aa, DROSOPHILA
H

SEQ ID NO: 27220 - DNA, 3021 bp, DROSOPHILA
tctcaatttgtttttctagccagtcacgttcatttgtttattttttcagttgagtgaggtaggcaattcacggcgattataccgttcagctgataagaaaatgaaactcatgctttgtttgctggcttttgtttttgtttgagatttttgcattttgaagcatttcaagttattcgctctcctctcttttctacgttttagagataagcctttggtataagaacgttctcgaaagtggaactgtttttagttgcagttgatcaccaaaaggaatagaatgaatacattgagcagtgcgcgatctgtggcgatttacgtgggtcccgttcgatcttcaagatcagcctccgttttggcacatgaacaagctaaatctagtgttagtatgcacaaaatccagtcgaaatagatttatcatgttattagtttccaattatagataacggaggagcacaagacctacgatgagattccgcggcccaacaaattcaaatttatgagggctttcatgcccggtggtgaattccaaaatgcatcgattacggaatacaccagtgccatgcgaaagcgctatggagatatctatgtaatgcccggaatgtttggccgcaaggattgggtcaccactttcaacacaaaggacattgagatggtattccgcaacgagggtatctggccacgtcgtgatggcctggattccattgtatatttccgcgaacacgttcgaccagatgtttacggtgaggttcaaggattggtggcttcgtgagtataaaatctaataagtagcaaggaaacaattgaatttgaatatttcagacaaaatgaggcatggggaaaactacgatcagccattaatcccatctttatgcaacccaggggcttgagaatgtattatgaaccattgtctaatatcaataatgagtttatagagcggtaagaaatttttgttattgaattgttatttatatatagcaataaattccattttactgtgcagcattaaggaaatccgcgatccaaaaactctagaagtccccgaagattttacggatgaaataagccggcttgttttcgagtcactcggcctggtggctttcgatcggcaaatgggtctgattagaaaaaaccgcgataattccgatgcattgaccctcttccagacctcgagggatattttccgtctcacatttaagctagacattcagccctccatgtggaagatcatatcgacgcccacctacaggaaaatgaagcgaactctcaatgacagtttgaatgtgtcccagaaaatgctgaaggaaaatcaggatgcactggaaaagcgccgccaggctggcgaaaaaataaatagtaacagtatgctggagagattaatggagatcgatcccaaggtggcggtgattatgagtctggacatcctattcgctggtgtggatgccacagccacgcttctgtcggctgttttactctgcctctcaaagcatccggataagcaggccaaactgcgggaggagctcttgagcatcatgcccacaaaggattccctactcaacgaggagaacatgaaggatatgccatatttgagggctgtgatcaaggagacactgcgatactatcccaatggctttggaaccatgagaacctgccaaaatgatgtgatactttcgggttaccgggtgcccaagggaacgactgtcctgctcggctcaaatgtgctgatgaaggaagctacatattatccacgaccagatgaatttctgccggagcgctggttaagggatccggagaccggaaagaagatgcaggtcagccccttcacgttccttccctttggctttggaccccgcatgtgcattggcaaacgggtggtggatctggaaatggagaccacagtggccaagttgattcgcaatttccatgtggagttcaatcgggatgccagccgtccattcaagaccatgttcgtcatggaaccggccattacgttccccttcaaattcacggatatcgaacaataatttgcttctcatttgtggcctttacttgtgttccttatagttgcgatttttgattacagtaaatgtttgactgatgaaatgcagataagaattttgcctcctcctatttcgcattgttgtgcaaacctcgctgttttgataagcaaaatgtttaatacgtttgataagattgcgctttgttgtggcatccctatcgctttttttcgtatcaatttgtttttttcaacacaattgcgaggtgtgcttttcttatatttttaggtaacaaagaagagactattgtaggttgttatttttcttgtttttcccccacactttgtatatttaggtggtgggtagcgctcaccaaagacactttcagctggagcttgcagcttggcaggcaggtgagaacgggctgccgagaggatgtcctttgccgcgccacaaatacttctaacggcaacagcaaaatcaggagcagcacccaacatcaggagagtagcaaagcggcaaaagcagcaacaacagacatattcgcctgcggcctgcggagttatgctaactggcactcaaagcaaagcgcggccaaaagctcaggtggtttgccctgtgccacctgccacctgccacctgcccccctggtcttgttcttgtttttgctgttgctgtgcctgccacttggcactggcagcttgtaacaataatttaagcgattttgcgctttttgcgagtgggttaatggcatgctcaggatctaggaaacgggaagtgggaactgtgagctgggagcctgcaagcgggtatcctttggcgtggcgaaaattccacttttgtagcaaacgcacatagcttatgaattccgcaatccccgatgcggtgcagcagcaaaatggtagggatgatggaccgtgggtcctggtccagtacaaagtaaaaatgcagaacatgtgttttttcggggtggctggataacctggcttatagcagccatggccagggatcagctatatacatatac

SEQ ID NO: 27221 - DNA, 1021 bp, DROSOPHILA
cattaaggaaatccgcgatccaaaaactctagaagtccccgaagattttacggatgaaataagccggcttgttttcgagtcactcggcctggtggctttcgatcggcaaatgggtctgattagaaaaaaccgcgataattccgatgcattgaccctcttccagacctcgagggatattttccgtctcacatttaagctagacattcagccctccatgtggaagatcatatcgacgcccacctacaggaaaatgaagcgaactctcaatgacagtttgaatgtgtcccagaaaatgctgaaggaaaatcaggatgcactggaaaagcgccgccaggctggcgaaaaaataaatagtaacagtatgctggagagattaatggagatcgatcccaaggtggcggtgattatgagtctggacatcctattcgctggtgtggatgccacagccacgcttctgtcggctgttttactctgcctctcaaagcatccggataagcaggccaaactgcgggaggagctcttgagcatcatgcccacaaaggattccctactcaacgaggagaacatgaaggatatgccatatttgagggctgtgatcaaggagacactgcgatactatcccaatggctttggaaccatgagaacctgccaaaatgatgtgatactttcgggttaccgggtgcccaagggaacgactgtcctgctcggctcaaatgtgctgatgaaggaagctacatattatccacgaccagatgaatttctgccggagcgctggttaagggatccggagaccggaaagaagatgcaggtcagccccttcacgttccttccctttggctttggaccccgcatgtgcattggcaaacgggtggtggatctggaaatggagaccacagtggccaagttgattcgcaatttccatgtggagttcaatcgggatgccagccgtccattcaagaccatgttcgtcatggaaccggccattacgttccccttcaaattcacggatatcgaacaataa

SEQ ID NO: 27222 - protein, 1 aa, DROSOPHILA
H

SEQ ID NO: 27223 - DNA, 24971 bp, DROSOPHILA
ctaatgaattaattagtaagattcagatgaagtcaaaaagcgttcgccaaaccagaaaccactccaagtcgtaattcattgaaaattcgtcgattaatttatttagtttacttgattccgttcggtcgcaattgatttaatttgacttttagtctgaaaatcttaaattgtatggtcacttcgatcataactcttaaacaattttactggcgtgcatatgtagcgcgttttcaggcccacagggtttgtagctaagtaaaaatgccttgttatattttatacattttatttatttagctctggtaactttaaagacacacgagtatatactctctcatattcctatgccataaatttaaaccaaggcggatccaggacaaaggcaacggcagccagcgactcgcaacacactgcccaggaataactcatatcgaattgcaccatttgttgttttgtctccctagaggatattgagttacgctgccagagatggggatggcattggggcttggtgggctgtggctcgttggctcccgttgcccgatgccgatggattggcgcttggtggcatttttattcagtttagtgttttgttgcttcgtttgacgctttcgattttgatagatttatcacagcttacaaaaataaggcacaagtaaaacaatataaaaccaaaaatgaactctatgcaaatgaaaaatctaaaattatgtccgttaattggatggcgtaatggccatccaaatgcattgagccacgcccacgcacccgagcattaagtttattcttcgctcgcactctttgatcgggggtcgtgggcatcgctatcaatgggatgctacattacattacaccatcctcacattcgtcatctctactaaagtacaaaaagctagaaaatcaagggggttctccccgttgcgttgttgttatataaaatacaattgaaatacgcttaacctaagactaaagtgtttcttatttcgttgtcgtccaccgactatttggagctcttcttctttttgctcttgggcagttccgcccacaaccggaagaagtactcatcgcgttgaagcagcctgccgcgggcatacgaatggatatccgcatccatgtgatggtcacgcagccacgaggaggtattgcacgaactcatctctgtacgcggctcgtccggcaggctctcatgacctggttttgaaaagaatgaaatgaatgtaagttttgagtaattgtcaggatcacaggtggtcctgcaatggaggataggtggtgtaactcagtcgaagaattaatcgacactaaaaactgttaaataatacaacctctatccttagccaagttgttggttttggtaagtgtgaatctatgtttatatgaccgtcgccacttaccagcagtcattgccttgtagggctcctccgattccagaggttcactcagaccaatctcgttcttcgcgaatatgcgaatcatgtactcgtggttctcctgcagatctctgatctggaacttcagcacgccagctggcacacgacccacctcgatccacatggtcttcttcatgtcccgtatagcaatgtggtagccgagcagaggcgcacctccatctgactcgggcaaaccccattcgaatatgtgggcattggcggcgagaacgcgcgcctccagtgggccggtgggtggtgagggtacggctttaaggaaaccaaattcagtataggatccacaattacgaactaccaatatgaactcactagcatgtgtcttaagcgatatgctctcggtgacggctggtgcacctaatccaacctcattctccgctgacacacggaaccagtactcgcacttctctttcagattgtcaatcgtgtagtgcagctggtgagcatccagtgttataacctttgtccagtttgtagatgttgaggaacgtttctccacgcaatagcctgtcggaagagttatgagtatgagtgaggtgatggacaccttcttaaaactatgttacccgtgatctctgacccgccgttgcgagctggcacctcccaatccaatgtaacacttcggctagtgacatctggggccctcaagttttgaggtggcgatggcggcgctgaaattttatcaatcgaaaaccattagtatccaagcattttgaaactttttgagctccttacgtacctaaagcttcattatcgttagctgttgtcgttttgaggttagaattgcgcattttcaagcattagtggcgtttaaaagaaagcaatttgcaaaagccataagcaataagcaattgtgataatacaaaaaccagttgagacttactaattttgcggcccaggacaatcttctccgtggtctcaaacgcctcgctcgtgccaacctcgtttctcgcatatatgcggaagaagtagcccttgtttctgacaaccttctctacgtggatgttggtcacagtgcccagggttacgcccaccgatcggtaggtggtttcagtctcttcccttatctccacaatatactctatgatctttgaaccgccgtcggtctccgatggctcccaagccaaattgaaggacgtgtcgttcatgcccgacactgtggtaggaccacgaggaggcgatggtttttctgttcatttttagtagaaaatatatgtatttattttgaattttaattaatctgaccctgtttcttttagcttaccgaattttttcgttatagtaactggatcactttccgttggctcagactcgccaataggattggcggccaccacacggaacatgtattgcgcgttcatcgacagtttttgaacagcatacgatttaatgtctttgttaaagtcggacaccttcatccaaacattgttttgaacgtcacacttttccagcgtatacttttcaatatccagacctccatcatcgacaggtggggtccactctaggacaatggagtcctttttaatgtccttgatctccagagattggggtctgctgggtttatcgatcacctgaacagtgcactctacgtacgtagtgcccgactcattggtggcggtcaccttgtacttgccggattgttcgcgggtcaccttctttaccgtgtaggtggaagtggtctccgtggtctcaatggttaccgacttggtggtcttctgctcgatagtctctttgtgccaggtcacagtgggctgtggatagccgcggaccgtcgctggaatggtgagaatgctgcccgtgcgcagcttttgcgtcaagtacttgtcctccacctcgaggacaggtttctgctgcagtttcaggcgacacgaggtctccgcggagcccttctcattggtcgccacgcacgtgtaggtggcttcagtctcaatggttgtcttttcaatggtgtacttggcgacgcgattttcgtagcgtatgcttctcgattcgaacacctgaccgttcttcttccacgttacctttggctctggaatgccgccgaacacgcaggacagagtcacctccttgtccagttcgctaaccacatcctgtagtggttcttgtacgctgggcgccttggtctcaaccttgggcaccagtcggatgggtggcgatagcggcgagggcggcgatggccccacttcgtttacggcaatcgaacggaagacgtactccgtgtcgatcttcagcttgcttatcgtgtatgtggtgtccttgatctttctaatttcagtccatctttggataaaaggaataacaattaaatgaagttctcaacgtacagtttataggcaatataggaatgtcaattccctattatagacatggagtctaataatagatagattaaacttggttacttgattacttacttttcttccttaacatcctgatactctagaatgtactcaataatctccgacttgccatcatcctctggcgccttccagtagagcgtaatagagtcatgcattatctcaaggggttggggtgtgccaggtgccgttggcttgcctaagtatttgattgaggtattcagttccgtggcaattaaattcaaatataagcagggctacttacgcattatgaccaaatggaggctggcctccgcctcgccaaccgggttgacaagcttgacggtgtattcgccttcgtcatcgtcaacaacctttttgatggttagcttggctgactgctcatcgatggtcggtattgtccgctttgacttgggtatgacaaccttgcgcgtggtccaacaggcctcaggcgttggtacgcctgtgtacttgacagtgaaggtaacgtcatcgttctcctttaccttgatggtctgatccttgtcagaggtaatgacgggtggcagcttgagctcctcgacgcacagcttagtgctgcttgtgacgttctctgcaacgcagctgatctcaccggcatcttcgtcgctagcatcgtggatgaccagtcgtcggacagtgccctcaacgaatacctcgtgcttctggttgggcttgattggcttgcccttcttgcaccatgttacctcgacatcgggctgtgataactgcaccgtgaactcggcatccgttgtcttggtggcaagcgtgatatccggcaggcggatgacaaagtctacgagaggctcctctactgtcaactttgcctttgatgtctgctcccccacctgaacggagtattcacccacatcttcgggcttggctttcacaatgcgcaaagattgtttcttgccatcgatggccagttgaatacgctcattgaacacaatttccttgccgttcttgaaccatttgactagggcatcgcccttgctaagttcaacctcgaaaacagcattctcgcccttggtcactgcaacgtcattcagtggctccacgatttcaggtggtagctcgattacaactagctcacagctgcattcctgtccctcgatcttgcatgtgtactgaccctcgtcatggatggtgacatcacggataaccagccgacgagcctttccatccttgatgaactcgacgttcttgttttctggtgtgattttctcgccgtccttgtaccaagtgacttcagtcgcctcggttgtaagctccacatccaaaatggcggtatctttttcggttacctcgtaatcctccagaaccttgataaagtccggcttacgttgcaatacctcgacagtcgattgagtttcttgctttttaaccttgcacgtataggttccagaatcacgtagattcgtgtttctgatcaccaacttgtgagtcttgccatcctcaaccacgacgcgatgatccattccgctaagttccttgccattgaagaaccacttggtggtaactacgtgggaggtctcgcactccagggtaagagattgcacctcttcaatggtgatggtcttcttaagcttcttcgtaaacgtcacttcatcgacctcgacaatcacacgggcgccatgggatgttttgccaatgggattacttgcaatacatttgtagtctcccgaatcggtttctggattggcatccttgatgataagctcgatgttctcgccatcgtaaacctgctggatgcgctcgctggggaacaatggtgtgttgttgaagagccactgaacctcaggcaccgggttaccggaaaccttggctggcaagcgaatttcgcccttttgtggaacattctgctcttcaaaccgttccacgaaaagtggtggctcagcattaccgccagcgggttctgaatttggaaataagtcttgttagtacatagtgcgacaacatttatagtagacctaaacatgaaacacagaacttaccttcgattgttagattagcagtggtctccacgctacccaaggggtttacagcctttaccgtgtattcacccttctcagacttttgtggtgttataagtgttagggtatgcaaatccttgtcggacttggcgttcttaacgggcttgccatccttataccaggttacctttggcggtggattacctacaatttgcgtagatagtacaacactctcgccttcacgtataaccatgttgcgtaagggttccagaatttgcggcgcctccttgtcggtggtgcgcaccttgagggtgattggcagacgtgcctcgccctcgcgatttgttgcaataacctcgtaggtaccttcttgcgatttcttcaccttggagatatgcaccacactgcagtacatgtgcatgtcggattcggtaacgatgcgtacgtttttaatctcttcttcgtcaatgtcttcgccattaaaggtccagacaatatcgggttcaggcacggccaccagtcggcactcaagaatcacatttgtattctcgtcgacatattgagccttaggtttcttggagaaagttggtggaatgccctccaaaatgtcagccagcgaggattcacgagacatgctgcgtcgtgaaagagctgtggcgtcagagccgtgatcagatagtggactttctacaatcagttccgttgtgctggaagtgaatccagcagcattctttgctacaactgtgaattggccagcatcctcggggaaaacctcgcgaatgattaaagttgcaacattgtcatcatcatagaacatttgaaagtcttgggagggcttgataatggcagtttcgcggaaccacgcaatctgtggtcgtggattgccctcaaccttacactcgaattgcaccgtgtagccgtcaggagtatgaatcggctgtagtttctcaataaatcttggggcaatgggcttgtcttccggtccaggaccttaacaattgacaatcacaacaaaacacgaaataatttgttaatagaccatacgcggacagtgacaaataattttaatggttgacatataacccttttgtttgggcaataacttacgttcaaatacgggcagcttatcgattttctcgtgtagcttattttgcacatactgcgcgtattcctcgggctccatcagatattgagctggaacccatccttcctcttccgtagtgcttttcttgacgtaccaccactcagagctgtgacgaccaacgaccgtcaccttctcaccctcgactaggtttatagcctcattgttgtcggcaatatagttgcagatagagtacataatgttgagattctcagattctaagttgaaatgaaatcgtttatatttaattaaacagtttataatataggcttacataccttcaacattcatttctctggtaatattaagcgaagctccatctgtgcaaaaaaaatttggcattactattttatctgaatctaacattaatcatttttaaggtgtgagcaatgaattgttatagcgttagcaaccaacatttaaattgggtatttttaccttgccactctgatatcatataagctgatatttatttatgtaaaagtaaagcattttttgatgtatacaaaatttaccgttactggccacataagccgacttaccttcattgaaaagttgttgcacaaccttacgcttctttttaaaggtaagagagtcctcgtcgtatgtaaccgaatcgcgttttggatgacgaatgccaatcaggaattgttcttcctcttcatcttgaacagaatatgctggtttggggtgcttctttggcttaagcttgaagtccacttcgtctggtggcaattcctcaacaaagtactcttctggttcctcgacttcatcgatggtatcctcatcgtctcgaatttcttcgataatgggttcttcaccatcgtcaaagtcctgaatgatcttgatcttggcttcatcggctgcttcagagaaggtcttcttgataggcttctttaacttcacctttccagacatggaaatttcctcctcggcatacgagtccagggcaatgttgaattcttgatcgacatcttccttggtcttggtacttctcgcacggaatgtgacgttctcaacatcagcatattcgggaatgtctacttgctttcgacgctttagtttcttcactgtgtaggcctcctcatcctcttctgtgatttgcaaaggcttcggctttctttgctgactaacgacgaactcttcgatatcctcgccctcttcgtattcttcttcctgacgcttaatagaaagttcagctgcagcttcatccagagtagtgggcttgactggtcgttttttcagaactgtggcggcctcctccacaccctcattaatggtatggggctttttgaaggagagactgaactctgtttcttcgagatcttcaaccgtcggctcgaagggcttctttggctttttgcgaatgacgactgcttcttcaatgatctcttcttcttcaatttccacaggtctttcctcgacaacagtttgctgtagcttaagctcgtccgcagcctcttccaccggcttctgcggcttcttctttttcttgagctgtacagtttggtctgaagtttcttctgtaaccttcttttcctttggcagcttaacatcaacagaaaattcttcctctgtaacttccgttttagcctttggcttaagggtaacttcagccacaacttcatcagcatctactggctctggtttctttagtttcacaatcgcagcatcgacaatgtcctctggctccggttcttttggtttctttttaatttcgaactcttctatcacttcttcttcaacaatcggctctgggacaacctcttcttcaaccttgaccgtaagctcgtcggctactgcaacttcgtcgattttctttggctttttcttcactatctttgcttcttcctgaacttcttccgactttacctttggcttcaaagttatttcagcttctggctcttcaactattggagccttaggtttctttttcggtaagctaacttccttatcttctacagcttctggttggctttccttaacttcgatcacatactctgcgggtttttcttcctcgatctcttcgatctcctcgataatttcttgaacttctggttcagtgggaatttcttcagtgatcgttactttaagctctgccgcggcctcttcttcctttacaggtttcttagacttcgttatcttagcttcttcagtaacttcttggacaggcgtctttggcttaaccaaaaactcagcttcgggttcttcaactacctctggtactggtgccttctttttctttttttgaatcgtgacctgttcctcgggcagctcttccacagtcggcttcttttcggaatcctttgtggcgaaggtgaaatccgttggttgttcttcaggggcctttggttcctcaacgatttcaatttcttcaatttcctgaactagttcttgtggtggtgtttcttcttcaatgattgttatcttgagatcagcggcttcctcctcagtcggttgttctggaataacagcaatactggacgtagcttccacttcttcgacaggctttggagtagaaacagtaacttccgcctcgggttcctctttaatttctggcttaggcttctttctgcgaattaccttcacctcctcctcaatgacttcctcgaccaattcccgaggtgtttcctcaatgactctaaccttgtgttcctcaaagacttccggtttcggtgcttcctcaattggctctgttaccaccggctcctcctcctcgacaattgcttcggcaggcttttccggctccgtttccttgataccaattttgtatgtcttctcttcaacaacaggcgctgtcttcttggtttcagtgatcacctcttcctccgagacctcctccaatatgggaatttcctgtggaacttcctcagtgatcttaatctttagctcctcagcttccacatccgttaccttcttctttggcttcttggtcttgatatgagcgtcttcagtgacaacttcagcgggcttgctttccttgataacgatttcagtggcaggttcgtcggcgaaagtaacagaaggcttgcgttttttaactgtgaactgctcgacacttggctcctcgggcttgggttctgattcagaaacgcgaattgtgaactctttaggcttttcttctgcaataacttcctcctctacaatcttactctcaggagcttcactgaacacttcttcggcaaccggggcttcactttcgacaaccttgattgctaattgagcttcctcttcgtccttcttcggttttttcgtctttttctgtttgattgcagtttccacgctcgtttcttccacaatcttgggttcagtcattacaaactcggcctcaactgcttcaggttctttgggttttttcttgaatacaacctctacaggggcttcttcctcgggctggtcgtcaactgtgattaccttttcttcatcagtttcttttagagtgaattcgtaggaatcgaatttctcggcaacctttttctctacaacctttggtgtttcctcaggagcttcttcagccacttctattggcttttcttcaatagattgcgtctctgaaattttgaactcgtaagattttggtttctccgacttcttcttttcttcctgcttttcaacctccacgattgtttcctcaactggttgcttctcttcttctgcctcaaccacgacaattttatcctccttgactttcttaacaggtttggtcttgaccttttccttgactgcgatttgcacatcattgggctcttctggtgtagtttgggttattttaagttcgacctcgtactgttctggcttctgttcgggctcctcaattggcaacgagatttcagctgaaactacatccggttgtatttgttcttcttttggctcctttaaggtgacctcgaactcttcaggttgctgtggtttcggtttcttcttgcgcgtcacgaccttttcttcaattacctcctccgtagtttcttgacgctcgtcaaaatcgatgactttgacttgatgttcctttggtgcatcctctggttccaagactgtagttgttatcttgtactccacaggtatttcctcgggtacttcttctggtttcggctcttcttcaataactactacttcggacacaggagcttccttgggtttcttctctttcaccttaacatctttcggtttttcgatttcaatgggtttatccactagagcttcttcctctttcaccgatacctcaaattcttcgggctcttcctttgcaatctcttgctccttcggctgcacctttttgggcttagatttcttcggtttcttttcgtcatcaatggccttatcttcgatttcttgcggaatgggctcctctgccttaggcgtcactagcgcttgttcgtcaggattttcatccttagaagcctgaggtacaggacgtagcttaatttcagaatcagtctcttccggagcgtctctctcgggcttacggaacttaacatcctgttcgggaattgcctcttcctcctttggaactccggcaacaatctccgatacaatggtttccggctctgacttagatttatctttaggcttgtacttggtcttagacggcttcttaactttctcgggtatctctggatgttcgatctgctcaagttcatcgggtacatattcaggacgatcaaactcagatggttcaaatggctccaccacgaactctccgtccttgggtttctttgtttgttcctcaacaatttcaacctcctttggtttttgtttaagttcaacttcttcttcaacttcttgtggcttttgcggaatgtttttaagagtaacattttcgggcgcttcttcctcctttggctttttcttacccttgcccaacttaagtttcacatcctcttgtttttcctctggttttggtgccttttccggtttcttataaggagtcttttcctctggttcttcctcgctactaatgtatttttcgtacttttcgagctcgaccttttctaaatcatccttgatttttttaattttcttggtcttatgcggtttgaacttcagaatttcctcagcctcttctatgttacgagacaattcgccattgtctttaatggcgccaatatcagtggttttaggaataaggggagctggaggatattcaaccaagaccatacgggccttaagtctgaactttggaagttgaacggtcagttcttcggcaggtttctccttacgtttactcggttttagtttcacggttttaggaacatcagtggcatcgagaatagtcacctttgttggcttctgttctttgcgctctatttttattggttcgagagcagcgaattctggtttgagtttcttgggaacatcaaattcaattttctcgtatttttccagttccgtcttctctatttcctgctccaacatctttttgatgagttcgtcatggtcatcggtcttctttttaaccaccttcttctttttagacttaggcttagtgacgtcctcaacagtttcttctgtagctggctgtggttcctcatcttctacctcttccacaatgggctgtgattcttccacctcggcgacttcatcgataactctaacctccaaaatcttttcgggctgctcttcctcgacaagctcttcgtggatgatgctaatttgatagtctttatgaacctctggtagttcacctgttataaaaaatgcattaaggtttcaatgaataatgcttaatacggtagagaaacccgtggaaccacgcattgctttcgcaaagcaagcttttcggtgaactggacaaaatacataattcgaggctttatttacacggacagcagttgaaggaaaacatttaaaaactgaaccaaaataaacaattagatttttgaaggaaactgttaaagacgaacattattaatatgtgggcatgtgggtttagtgtgtgtttagtgtggaatcataaatatcaaaattttatgatgttaatttcgttctactgcttataatttgtttcaactattaatgcgtgaaaatcgtgatggtagggagaatgtgttaggactatagaacaacacttttatggtttaaaacatttaacatgcatacgatattgttatgtaaagtgactgtttttgggactggttaactggaaaagattaggactcaaattaagagatccgagaccaacagcgaaaaagagaagagaaacataggtgggaaaaggcgtaacaattggaaatcaacggtgtgtttcaagggggacaaacaaatgcgaaagacacagacaaaggagcagaaggtactgcagcaggatttggtggctccaataactctcttctagtaacttacttgtttcaacgcttttttgtgtgtctggttttgttttcttatgtttaactgttttctgaattgtatctttagtgtcatcttgagtagatttctcttcttgtgcgcttggtgtaatttgtgcagtggctgtgtcctcgggctgtgcagtttgggttggtgtaagctctggtatgtcagtagtgtctacagtggtctctgtcggttcgtccggaacttgctggtctgtgtcttctgtctttggagtcttgggagtcttcgttttcttgggtttcgttgtgtcgggtagtactgatattggttgggatttgtcaggttttggttcttccggaatggaatcagaaacagttagtttaactggtttttctggcatttctaccttttcatatttctcaaggtcaaccttaggaatttcttcttcaattagtttctttacgtaatcgcttaagtcgtcctttttaacttttctgacagttttcttgggctttggagctagcttttccttagactgttctggatgttcttcgatagactgtggagaagctatttccggttcttcgtcaacaataactgtaaccgaatcgttgtcctcgctttcaatcattgtaatcttaaaagtggtttgttcctcgggcccaatcttctttaaaactcgcttagtagtcttttcttgaaccggcttgccatcttcagttataacctctttaacatctacctctacgggcttaacttctagaatttgcactggtatttcgggttgctcaggagcttcttcttcgacaacattgacctttgcatattgttcttgaacaggagtttcctcattcggaacttttgtagaccttgactttttatcttttttctgcacttcttttggcgattcgtccaaaacgtcaatcgggctatccaatggcttgtccttgactattggttcgaattcaattttctcatacttttcaagctccgtctttggtgtttccaactcaattaacttttgtatgtagtcatgtatatcatcctttttaaccttcctggttttcttcttaggttctttgggtttttcgtcttggttcacaggttctggctcatactccacaatagttatttctgcctcaggctgatcatccctaacaacttcaataatctctatttcaccttcgccagcaggtcgtcgcaacattcgttttgtagtaacttgcttatgtacttttccggtgtcatctttggtttcttcgacgtttgtttcgctttgtattacctgaactgtaaacggcttttcttcttcaggcttcaggtcatgttccgttactgatatttcgtattgctcagtagaaggctgttttggttgttcggaacttatcttagaagatttcttcttttcaggatgagtatgcttttgctcttcttccttgatagaaatactaaattcctgaacatctggtttttccagatcagaatccgtatgtaaagcctccaaaggcttttcaacagtatcttctggcacattttcctctagaattttagctgaaggctttggtttctttttcttctcgggttttttagtatcttcaatctgattaactttgttttcgggttcttcttcgattggtacggaatccaccacagttataagatcatcacttaagggagagtcctccggaacggactcaattaagagaacttcatcctcgtgtggtgtttcttcctcaacggaagtgtgcttatcttttattggcttctttttcctcttctcagaacttggtttgggaacgaaatcctcgataaccactaggtccacggatccttccggctgtggtgcctcctcctcaataactcgtttgacaaagtcttcaacttcgtctttcttaattttctttgtacgtttttgttttactgacggttggtcctgatcaggtgtctccgtgggaacggtggtcgtgactgttattacagattcgtttgtatccgtatcgatttcctcgactatgtcatgaactacttctaccgagcctctattctgctttatctttttagtcttaaccaccttttctcttacttttccttcttcatctggctcccgtttgctttctaccgtttcctcaagtactactatttcaaatggcttttcttctggcttttctgggataaattccttaacagcaactgttagctttggttcgtcactgtcaacttcagagtattccgaaatcttctcaacgggcttatcttcaattggctcttcagtttcttcttttggctgttcctcagattgcttgacctttttgataggctttcttttcatttttacgggctcgtccaagtctattttttcatatttttccagctcagtttttggaatatcttgctcaataagcttctgaatataatcctgaagatcatcttttggaatctttttagctttgcggactgttttcgcttttttctcctctggagcttctttgctcttctcttgaacctcttcagtagtcacaatgacttcatactccggagtgtcacctgtcttagtttccacaatttcaataatttcttccttggggccaaccagctttttgatttttcttttggttacactttgctttgtcgtttctcctttatcgtcatcggtaacttctttttccactgcttcagtttcgagttcttctaccttgaaagttggttcttcagagggtttttcttctgcagcttcggttacgacataatcttcagggattggttcatctattatgctttcttcagaaatcacatttacaagatagtctgggcttttatctacagaaggctgcttgatggacttgggcttgcttatctttttgggctttggttgtttttgttcttcaccgacgctatcttcttcaacactgatggtatattcgagcgggcttgaaggcttctctaaagcgcgctcaatcggttggtctaagtcttccttaaccaacgcatcgtaattgttatcgttgtcttcttgttctgtggcaatgtacgtgattggagatttcttcggctttttagtttcttccttctgcaccttttctacttcatcttcaactaggccaactggaatcggctgtatgaattcttcgataatattaattatatattcttcaacgtcatccttctttaactgttttggctttttaacaatcttcctttcatgcttcggcttttcttcagaatctaggacctcgtcgcttgacaactcaacaactgtaacctcagccgtgggccgatcttcacttgttgtttccgtaatttcaaagatgtgatctttagacccctttctccgcgatacttttcgtttcttgacagttacttctttaacagttccctccagcgtaggttcagaaacgactttaacagtgtgatcaaatgcttccaatgaaacaggatactcaacgtcctttttcttttttaatggcttttctttttttatgggttgatcctgagtaggctgttttattggcttatcagcttcaccaaattcatcagaaatgttaacaaggtacttggaagaatcgtctggcagttgtggtatttccttaatttcgtccaacaaagtctttggtgtttccatatcctcaggttctgaaactatgtcttcaacattgaactcgtgaatggtaactggcagcccatcaataacttcaatggtttttttgttgtgagatttgaccttcttcttgggcttcttctttgaatccatttcagttggttcatattcttctagaggagtttttgtgatttcctgttcgattaactgctgtatgtatttgtctagatcgtctttaacaggcttcttctttttaattttttggacaactatgactggttgatcatcagaggcatcaggagagccctcaggtaccaactccgtagtagttatttcaatgtcgccttctggcttgttttcttcataggtttcttttatttcaatgagatactctttagggccttcctttttcttaagttttttcgttgtcttaacttgtttcacttcctctcctatttcgtttacaatattttctatgaccgtttcaggagccatttcttcaataaggataacattttctggtgctttcacaatcggcttcttgggcttcttcgtttttgttttagtttcatgtgcctctccctcagtaggctcagggctctcaaagctttgtggctcacaaaactcttctaaaacattaacgacatagctttcgacgtcttcaggcttcaatttaattgttttcttgattggtttcttctccttaggtagaatagtgacttcttgagacttgtcaccactaagttcgaggattgtaacttcagccaaaggttcatcactagtttttgtctcgatgatttcgaatacttgatttttcgtaccttgtttgcgagaaacctttttcttcttaacctcaacttccttggttatgccatcttcttcagtaactggtacgatttcaatggattctgcaatgtcctcaataattggtttttcggtactcgcaggccattgaggctcattaaactcttccagaactcgaatgacatagctttggatatcttcaggcttcaatttttttggtttcttcactgttttcttctcttgaggtataacaatgtctttattcaagccttcttctgttagttctacaattgttacttcagctaaaggttcatcactaggtcttgtttcggtgatttcaaagacttgttcctttggaccatgcttgggggaaaccttctttttcttaatttccacctgttttggtgtgccgtcttcttcaattatttgcacaacttgcacattttccgatatatcttcaattactggttgtggcttgtcatctgcgtcttccggaattgtttcgaattgagtgggttcagttaactcttcaaggactttgacaacataagtattgacatcttcgggctttagtttcttttgttttttaataggtttcttttcttgagctggtaagacttcttcttgaggctgttcgtctgtaatctccacaacagtaacttcagacaaaggttcatcgatagcttttgtttcggtgatttcaaagacttgttcctttggaccatgtttgcgggataccttctttttcttaatttccacctgttttggtgtgccgtcttcttcaattatttgtacaacttgcacatcctctgatatatcttcaagtactggtttaggtttgtcttcttcagcgattttaaactctaacgatttttctttctttgatttaggcttttcttctgagacctttgatttcagaactttgggagcctcctctgcattttcatgatcaatttcctttagagtgacttcatctggcttaaagtcttcatcatcagtctcagtctcttgtatcgttacctcaattacagtaatcggaatgccgtcgataacctcggtagtttttttgtgatgtttcttgattttctttgcctttttagactctggagaggtctctagtacagtagccttaaattctttatgatctacctgaggaatttcttgatctatcagtttttgaatataattgtccaagctttcggtctttggcttcttttcctgtacgacttgaatcttgtggtcctcctgaggcttcgagtcaattgatggagttgtctcaatggttcgaataacaacatctgcttctggattgttatcttcatatgtttcaataacttcgattaaatattccttcggccccgccttctttttgattcttctcttgttaatgacgcgtactacttccttcccgtcttcatatattttttcggtgataggttctggggttgtctcctcaatacgaattgtataaagcgatatagggccaggaagagattccttcttttgcttctttgtagatttctttttcgattttggcaaactatctttcacgtctaccgaatattcatcggtttggagatcttcatcatgttctgagagctttggagtatattcctcgatggttgaatcttctgaggttggagtaggttcaaattcagatatttttatctttttctgattatcaattttctttttcttatcttttggaacgcgaacatcgtccacggtttttattttttcgggcagaacaggatttactatttcgtcctcaaccaccgtagttgtgaatgaagggatatcctctttctccgagctttctctgaaaggagttcttagaacatcttcatatatttcagagacgtgatctaatggagcttcctcgactatattgacaatgaattcctttagtttctctttcttcacctttctgacagattttttcggtgcctcagtagtagaaggagcaggtccgtcgattgtatcaccagaaacctctgtggttataactataactcttgcttcatcagggatgtcaccaggtttttcggtttcaattatttcgatttcgtactgtttcgagtccttcttagctctgacctttcgtttccttattattttctcatcttctaaggcgattacatcagtggccaatggcatatccttcaagtcttcttcaactaccacaaaaggtaggcaatcatttaaatctgccaagactttatctacgatcggcacgatatctttttccgtttcttcaactcttttttcttgaggacgttccgactcggttttgttgataaggaactcatcgtattctggaactgcttcgtgttcagccaattctttttctattacatttttcttttcctccggtttttttgtttttaattttttggttggctcatgctctgtgactccaacttgaagagtttcgccttcatcaattattggtttcttggtcttcgcctttagctttttcggtttttttgctttaccatctacatcgattttttcatatttttctagttctgttactggtatttcggcattgatcagttgctgtatatatgcatcgaggtcatcctttttaatttttctggatttcttttttatcttatcagttgttatttcttcactgtctccttcggtatttgcactagatattacatttatttcatagaacggttcttcaccgggggccaccacgctttcgacaatttccagaacttggacttcgtcgcccttttcatgtcttaaaatacgtttcgtaggcttatcactgtccatctctgacggcaattcggttaattttacctcatagaaatctgacattctagtctcatagacctcctgatttggttcctcctgtaactctgtgacaaaatcatccaattcctgtttgttcattcgctttacctttttcttaccaattgttttcgcttttgcgtcaccttgcggaatttctgagcttgtgactgtaatttcaaagatttgttcatcgttatcctcaggagaaagtggtacgatttcaatggtgttatcttcttgttccgtcttaaccttaatctttcgttttttcttgggttcctttgctattgtttcacttaaaggtactgtttcagcttgcacgccttcgggttccagatcaagcacttcgaacttataaaatggttttagtttggtatctgccttatcgtcatcaggcctttcaccttggcgtttgcgcagattaaggtcatcttcaggagtttcttcaaattcccttggttgccctggtaatattttgtactggtttttctgtggactaggtgtcaccttctttttctttttatatataggtttctcctgcgtggaagtatctacagacacagatgtgtcggattcttctcggatatcagaggttctctccatctcttcaaattcaatgggctcgaattgaagtccttcctcaggcttggagctctttttgggcttcttcttcttgacaacttcctcttcctgtgtccttactggcatttcagcgtcttcaatctctgcgatatcaagctttactggcttcaaattaacttcctcagaagcttcctcattttgtggaactttgccctttccaaacttaagtttccttgattcatccggagtttcgatcttttcctttttgccgcgtttgtatttcgggtgtaatagctccttgtttgatttgtcggaatgatcagattcatatgcacctaaatcggcttcttcaagctcagccttttcgggcttcgaatgcttaaatttctttggacgcaatttcaatacctcttccgcttcgtcaacatttcgtgaaagttcccctacttcgcgattagtttctaattcggtaactacatacgggaaacagtatggtgcatatggtacaaatcttatccagctctttaactttttgtttttaaatgaagcttcattcttcttctttttctcttcctgaggacgttgtttaggggctttaagtttgagcatttgtgggaactctaccaccgaacttatttcaaccattttgggctttttgaactcaactttctcaattttcattggagtaagcttgactggttgcttaaaagaagagtcacgacgtgccctttgtggaagttccatttcggtgcgttggtacggttgtagaacagtctttgggatttcttggtgtatgagaaattgtatgtagtcatccatttcatctcgtttagtcttaaccactttcttcttctttgccttttccttcttttcaattggtttttcatcgacagcctctacctgaacgttaccctgtacctttcttggctttcgttttatagctatctggtcagtttgttcccctgtaccctcatcaatgataacagtctcgtcaacttcctcaattggagtttctagtgtctttttctgttttggtgtcttgtctttagttggtttttgtaaggcgtctgcacttgcctcttcaggttcagtgatagtgtactctttgtagtattggtctgtttaagaaaaaattatgtgttttgtgttagcactaaactagtttttaaatttatatttgcattttatataatgctttacaacgcacaaactttgtatgaagaacaaagttttgcgcttagagatgagttggttagaaaactgattttatttaatggcgggttactcttttataaacctaaaccacattataaaaaatatttacaaaatactttgatagtttatattgtcgcaaatctctgtttaacctgaaatctgtttagtttataaaagcttaacccatgtcacacttaacggtatatagttttaaattaatgtcccacgtacattagataagttagtagatataaatttgacaaaatatcgatcatgtatgcagttttgttatgaaattatccctataaatcctagcctgataaattttttaaacctcacatttttcaaaactttgaaagttacctacaattttttgtgcaaatttcttgtaaaaacgtgtatataaagaaaaaatcacctgttggttcgctgacttcggttatttcaaggtgtaattgtgttttgtcttctggaatgagttctgtatcgctgaggacttcctcaacaacgatgccttcctcctgagaaattcgcttgttttcagtttgtatggttgtttctccatcttcgttttgtacagacttaaatgtcgtaatgtaaaccgggtgttccgtttctgtgttatcggcctttggtttatccactgtattaaggtatttttatgtttgtttgtgttttgtaaaatgatcaaaaaaatatgttattaaggcctattttaagtattaaaaaataacagatatataacaaaacaattatgaaatgaaatgtaaatttgagtggtttttgctaattgagtgtttgaattgtgtttctttgtgttcttacccttatgcttgtgtggcttttgtttgtgttttaaaaccttttcatcatcaagtttactaatatcgataatatcagcaatattttcatcgctaacaactcgaataagcgagatgggctccttgccctcttcgtcaattgtttgaatttggaaatattcatcgtcatctggacctcgcttcttaaatgttcgtgttttggtagttttctttttcggctttttattttcgtctaattcttcggtaaatacggtttcctcgggcagttcttctattggtatgggcgtgattgatatctcatcagaaggcacaacttctatgttaactttagttagtggttccttatcttcctcctctattatatggatagttgtaacttcgtcaagatcatcgtctaggctctttttgaaagctctggacttaacggtccttctcttttttttaccatcgggcaaaataacatttagttctgtcacatgttcgggaagctcgattaatttactatcctctggcttcgattcagttaagggtctttcttgtattttaacagaatatattggctccacattgtcttgttcaataattcctatttcagttacttcttcagtgttatcaagtgccggttttctaatgatacgcttcttggttttgatcatttttaaacggccttcttcatcaacagcctcagactcaaaaacttcatcgggtaacataactacttcagaaagcctttcttcaggaagctctgggaatggggtattaaacttctctactgatactatagtttgtggtgctttctcatactcttcaacggtttgaacttttgtcacctccatgttcggcccttggatttttttaatgattcttgttttaataacagttttggttggagttccatcttctttttctgaaagtataactgatttccgctcaggcaattcaaacaccgttacagcgtcttcgggtttttgaacgattaccctttttttaagttgaaccttgcctacactgggagcacttaattcagtttcttcgactgttaccgttgtttccgctttcttgtcgtcctcctcgacggtttcaattgtcgtgacctcttgcttgtcacccttgaccttcttgataacacgagtacggatcttcttcttcttaggcttgccatcttccgtaacggtttcaacgacgcgaacctcctctggaagctcttgaatttcctcaagtttctcttcttcatacggaacttcctcaacggtgaccgttgtttcgggttgtttgtcgtcctcctcgacggtttcaattttggtgacttcttgcttgtcacccttgaccttcttgataacacgagtacggatcttcttctttttaggcttgccatcttccgtaacggtttcaacgacgcgaacctcctctggaagctcttgaatttcctcaggtttctcttcttcatacggaacttcctcaacggtgaccgttgtttcgggttgtttgtcgtcctcctcgacggtttcaattttggtgacttcttgcttgtcacccttgaccttcttgataacacgagtacggatctttttcttcttaggcttgccatcttccgtaacggtttcaacgacgcgaacctcctctggaagctcttgaatttcctcaggtttctcttcttcatacggaacttcctcaacggtgaccgttgtttcgggttgtttgtcgtcctcctcgacggtttcaattttggtgacttcttgcttgtcacccttgaccttcttgataacacgagtacggatctttttcttcttaggcttgccatcttccgtaacggtttcaacgacgcgaacctcctctggaagctcttgaatttcctcaggtttctcttcttcatacggaacttcctcaacggtgaccgttgttc

SEQ ID NO: 27224 - DNA, 20448 bp, DROSOPHILA
atgaagaagagaaacctgaggaaattcaagagcttccagaggaggttcgcgtcgttgaaaccgttacggaagatggcaagcctaagaagaaaaagatccgacgacaaacaacccgaaacaacggtcaccgttgaggaagttccgtatgaagaagagaaacctgaggaaattcaagagcttccagaggaggttcgcgtcgttgaaaccgttacggaagatggcaagcctaagaagaaaaagatccgtactcgtgttatcaagaaggtcaagggtgacaagcaagaagtcaccaaaattgaaaccgtcgaggaggacgacaaacaacccgaaacaacggtcaccgttgaggaagttccgtatgaagaagagaaacctgaggaaattcaagagcttccagaggaggttcgcgtcgttgaaaccgttacggaagatggcaagcctaaaaagaagaagatccgtactcgtgttatcaagaaggtcaagggtgacaagcaagaagtcaccaaaattgaaaccgtcgaggaggacgacaaacaacccgaaacaacggtcaccgttgaggaagttccgtatgaagaagagaaacttgaggaaattcaagagcttccagaggaggttcgcgtcgttgaaaccgttacggaagatggcaagcctaagaagaagaagatccgtactcgtgttatcaagaaggtcaagggtgacaagcaagaggtcacgacaattgaaaccgtcgaggaggacgacaagaaagcggaaacaacggtaacagtcgaagaaactgaattaagtgctcccagtgtaggcaaggttcaacttaaaaaaagggtaatcgttcaaaaacccgaagacgctgtaacggtgtttgaattgcctgagcggaaatcagttatactttcagaaaaagaagatggaactccaaccaaaactgttattaaaacaagaatcattaaaaaaatccaagggccgaacatggaggtgacaaaagttcaaaccgttgaagagtatgagaaagcaccacaaactatagtatcagtagagaagtttaataccccattcccagagcttcctgaagaaaggctttctgaagtagttatgttacccgatgaagtttttgagtctgaggctgttgatgaagaaggccgtttaaaaatgatcaaaaccaagaagcgtatcattagaaaaccggcacttgataacactgaagaagtaactgaaataggaattattgaacaagacaatgtggagccaatatattctgttaaaatacaagaaagacccttaactgaatcgaagccagaggatagtaaattaatcgagcttcccgaacatgtgacagaactaaatgttattttgcccgatggtaaaaaaaagagaaggaccgttaagtccagagctttcaaaaagagcctagacgatgatcttgacgaagttacaactatccatataatagaggaggaagataaggaaccactaactaaagttaacatagaagttgtgccttctgatgagatatcaatcacgcccataccaatagaagaactgcccgaggaaaccgtatttaccgaagaattagacgaaaataaaaagccgaaaaagaaaactaccaaaacacgaacatttaagaagcgaggtccagatgacgatgaatatttccaaattcaaacaattgacgaagagggcaaggagcccatctcgcttattcgagttgttagcgatgaaaatattgctgatattatcgatattagtaaacttgatgatgaaaaggttttaaaacacaaacaaaagccacacaagcataaggaaacggaacacccggtttacattacgacatttaagtctgtacaaaacgaagatggagaaacaaccatacaaactgaaaacaagcgaatttctcaggaggaaggcatcgttgttgaggaagtcctcagcgatacagaactcattccagaagacaaaacacaattacaccttgaaataaccgaagtcagcgaaccaacagaccaatactacaaagagtacactatcactgaacctgaagaggcaagtgcagacgccttacaaaaaccaactaaagacaagacaccaaaacagaaaaagacactagaaactccaattgaggaagttgacgagactgttatcattgatgagggtacaggggaacaaactgaccagatagctataaaacgaaagccaagaaaggtacagggtaacgttcaggtagaggctgtcgatgaaaaaccaattgaaaagaaggaaaaggcaaagaagaagaaagtggttaagactaaacgagatgaaatggatgactacatacaatttctcatacaccaagaaatcccaaagactgttctacaaccgtaccaacgcaccgaaatggaacttccacaaagggcacgtcgtgactcttcttttaagcaaccagtcaagcttactccaatgaaaattgagaaagttgagttcaaaaagcccaaaatggttgaaataagttcggtggtagagttcccacaaatgctcaaacttaaagcccctaaacaacgtcctcaggaagagaaaaagaagaagaatgaagcttcatttaaaaacaaaaagttaaagagctggataagatttgtaccatatgcaccatactgtttcccgtatgtagttaccgaattagaaactaatcgcgaagtaggggaactttcacgaaatgttgacgaagcggaagaggtattgaaattgcgtccaaagaaatttaagcattcgaagcccgaaaaggctgagcttgaagaagccgatttaggtgcatatgaatctgatcattccgacaaatcaaacaaggagctattacacccgaaatacaaacgcggcaaaaaggaaaagatcgaaactccggatgaatcaaggaaacttaagtttggaaagggcaaagttccacaaaatgaggaagcttctgaggaagttaatttgaagccagtaaagcttgatatcgcagagattgaagacgctgaaatgccagtaaggacacaggaagaggaagttgtcaagaagaagaagcccaaaaagagctccaagcctgaggaaggacttcaattcgagcccattgaatttgaagagatggagagaacctctgatatccgagaagaatccgacacatctgtgtctgtagatacttccacgcaggagaaacctatatataaaaagaaaaagaaggtgacacctagtccacagaaaaaccagtacaaaatattaccagggcaaccaagggaatttgaagaaactcctgaagatgaccttaatctgcgcaaacgccaaggtgaaaggcctgatgacgataaggcagataccaaactaaaaccattttataagttcgaagtgcttgatctggaacccgaaggcgtgcaagctgaaacagtacctttaagtgaaacaatagcaaaggaacccaagaaaaaacgaaagattaaggttaagacggaacaagaagataacaccattgaaatcgtaccactttctcctgaggataacgatgaacaaatctttgaaattacagtcacaagctcagaaattccgcaaggtgacgcaaaagcgaaaacaattggtaagaaaaaggtaaagcgaatgaacaaacaggaattggatgattttgtcacagagttacaggaggaaccaaatcaggaggtctatgagactagaatgtcagatttctatgaggtaaaattaaccgaattgccgtcagagatggacagtgataagcctacgaaacgtattttaagacatgaaaagggcgacgaagtccaagttctggaaattgtcgaaagcgtggtggcccccgttgaagaagacttgaaggatatgccattggccactgatgtaatcgccttagaagatgagaaaataataaggaaacgaaaggtcagagctaagaaggactcgaaacagtacgaaatcgaaataattgaaaccgaaaaacctggtgacatccctgatgaagcaagagttatagttataaccacagaggtttctggtgatacaatcgacggacctgctccttctactactgaggcaccgaaaaaatctgtcagaaaggtgaagaaagagaaactaaaggaattcattgtcaatatagtcgaggaagctccattagatcacgtctctgaaatatatgaagatgttctaagaactcctttcagagaaagctcggagaaagaggatatcccttcattcacaactacggtggttgaggacgaaatagtaaatcctgttctgcccgaaaaaataaaaaccgtggacgatgttcgcgttccaaaagataagaaaaagaaaattgataatcagaaaaagataaaaatatctgaatttgaacctactccaacctcagaagattcaaccatcgaggaatatactccaaagctctcagaacatgatgaagatctccaaaccgatgaatattcggtagacgtgaaagatagtttgccaaaatcgaaaaagaaatctacaaagaagcaaaagaaggaatctcttcctggccctatatcgctttatacaattcgtattgaggagacaaccccagaacctatcaccgaaaaaatatatgaagacgggaaggaagtagtacgcgtcattaacaagagaagaatcaaaaagaaggcggggccgaaggaatatttaatcgaagttattgaaacatatgaagataacaatccagaagcagatgttgttattcgaaccattgagacaactccatcaattgactcgaagcctcaggaggaccacaagattcaagtcgtacaggaaaagaagccaaagaccgaaagcttggacaattatattcaaaaactgatagatcaagaaattcctcaggtagatcataaagaatttaaggctactgtactagagacctctccagagtctaaaaaggcaaagaaaatcaagaaacatcacaaaaaaactaccgaggttatcgacggcattccgattactgtaattgaggtaacgatacaagagactgagactgatgatgaagactttaagccagatgaagtcactctaaaggaaattgatcatgaaaatgcagaggaggctcccaaagaacaagtctttgaaatcaccgaaacaaaagctatcgatgaacctttgtctgaagttactgttgtggagattacagacgaacagcctcaagaagaagtcttaccagctcaagaaaagaaacctattaaaaaacaaaagaaactaaagcccgaagatgtcaatacttatgttgtcaaagtccttgaagagttaactgaacccactcaattcgaaacaattccggaagacgcagatgacaagccacaaccagtaattgaagatatatcggaaaatgtgcaagttgtgcaaataattgaagaagacggcacaccaaaacaggtggaaattaagaaaaagaaggtttcccccaagcatggtccaaaggaacaagtctttgaaatcaccgaaacaagacctagtgatgaacctttagctgaagtaacaattgtagaactaacagaagaaggcttgaataaagacattgttatacctcaagagaagaaaacagtgaagaaaccaaaaaaattgaagcctgaagatatccaaagctatgtcattcgagttctggaagagtttaatgagcctcaatggcctgcgagtaccgaaaaaccaattattgaggacattgcagaatccattgaaatcgtaccagttactgaagaagatggcataaccaaggaagttgaggttaagaagaaaaaggtttctcgcaaacaaggtacgaaaaatcaagtattcgaaatcatcgagacaaaaactagtgatgaacctttggctgaagttacaatcctcgaacttagtggtgacaagtctcaagaagtcactattctacctaaggagaagaaaccaatcaagaaaacaattaaattgaagcctgaagacgtcgaaagctatgtcgttaatgttttagaagagttttgtgagccacaaagctttgagagccctgagcctactgagggagaggcacatgaaactaaaacaaaaacgaagaagcccaagaagccgattgtgaaagcaccagaaaatgttatccttattgaagaaatggctcctgaaacggtcatagaaaatattgtaaacgaaataggagaggaagtgaaacaagttaagacaacgaaaaaacttaagaaaaaggaaggccctaaagagtatctcattgaaataaaagaaacctatgaagaaaacaagccagaaggcgacattgaaataactactacggagttggtacctgagggctctcctgatgcctctgatgatcaaccagtcatagttgtccaaaaaattaaaaagaagaagcctgttaaagacgatctagacaaatacatacagcagttaatcgaacaggaaatcacaaaaactcctctagaagaatatgaaccaactgaaatggattcaaagaagaagcccaagaagaaggtcaaatctcacaacaaaaaaaccattgaagttattgatgggctgccagttaccattcacgagttcaatgttgaagacatagtttcagaacctgaggatatggaaacaccaaagactttgttggacgaaattaaggaaataccacaactgccagacgattcttccaagtaccttgttaacatttctgatgaatttggtgaagctgataagccaataaaacagcctactcaggatcaacccataaaaaaagaaaagccattaaaaaagaaaaaggacgttgagtatcctgtttcattggaagcatttgatcacactgttaaagtcgtttctgaacctacgctggagggaactgttaaagaagtaactgtcaagaaacgaaaagtatcgcggagaaaggggtctaaagatcacatctttgaaattacggaaacaacaagtgaagatcggcccacggctgaggttacagttgttgagttgtcaagcgacgaggtcctagattctgaagaaaagccgaagcatgaaaggaagattgttaaaaagccaaaacagttaaagaaggatgacgttgaagaatatataattaatattatcgaagaattcatacagccgattccagttggcctagttgaagatgaagtagaaaaggtgcagaaggaagaaactaaaaagccgaagaaatctccaatcacgtacattgccacagaacaagaagacaacgataacaattacgatgcgttggttaaggaagacttagaccaaccgattgagcgcgctttagagaagccttcaagcccgctcgaatataccatcagtgttgaagaagatagcgtcggtgaagaacaaaaacaaccaaagcccaaaaagataagcaagcccaagtccatcaagcagccttctgtagataaaagcccagactatcttgtaaatgtgatttctgaagaaagcataatagatgaaccaatccctgaagattatgtcgtaaccgaagctgcagaagaaaaaccctctgaagaaccaactttcaaggtagaagaactcgaaactgaagcagtggaaaaagaagttaccgatgacgataaaggagaaacgacaaagcaaagtgtaaccaaaagaaaaatcaaaaagctggttggccccaaggaagaaattattgaaattgtggaaactaagacaggtgacactccggagtatgaagtcattgtgactactgaagaggttcaagagaagagcaaagaagctccagaggagaaaaaagcgaaaacagtccgcaaagctaaaaagattccaaaagatgatcttcaggattatattcagaagcttattgagcaagatattccaaaaactgagctggaaaaatatgaaaaaatagacttggacgagcccgtaaaaatgaaaagaaagcctatcaaaaaggtcaagcaatctgaggaacagccaaaagaagaaactgaagagccaattgaagataagcccgttgagaagatttcggaatactctgaagttgacagtgacgaaccaaagctaacagttgctgttaaggaatttatcccagaaaagccagaagaaaagccatttgaaatagtagtacttgaggaaacggtagaaagcaaacgggagccagatgaagaaggaaaagtaagagaaaaggtggttaagactaaaaagataaagcagaatagaggctcggtagaagtagttcatgacatagtcgaggaaatcgatacggatacaaacgaatctgtaataacagtcacgaccaccgttcccacggagacacctgatcaggaccaaccgtcagtaaaacaaaaacgtacaaagaaaattaagaaagacgaagttgaagactttgtcaaacgagttattgaggaggaggcaccacagccggaaggatccgtggacctagtggttatcgaggatttcgttcccaaaccaagttctgagaagaggaaaaagaagccaataaaagataagcacacttccgttgaggaagaaacaccacacgaggatgaagttctcttaattgagtccgttccggaggactctcccttaagtgatgatcttataactgtggtggattccgtaccaatcgaagaagaacccgaaaacaaagttaatcagattgaagatactaaaaaacccgagaagaaaaagaaaccaaagccttcagctaaaattctagaggaaaatgtgccagaagatactgttgaaaagcctttggaggctttacatacggattctgatctggaaaaaccagatgttcaggaatttagtatttctatcaaggaagaagagcaaaagcatactcatcctgaaaagaagaaatcttctaagataagttccgaacaaccaaaacagccttctactgagcaatacgaaatatcagtaacggaacatgacctgaagcctgaagaagaaaagccgtttacagttcaggtaatacaaagcgaaacaaacgtcgaagaaaccaaagatgacaccggaaaagtacataagcaagttactacaaaacgaatgttgcgacgacctgctggcgaaggtgaaatagagattattgaagttgttagggatgatcagcctgaggcagaaataactattgtggagtatgagccagaacctgtgaaccaagacgaaaaacccaaagaacctaagaagaaaaccaggaaggttaaaaaggatgatatacatgactacatacaaaagttaattgagttggaaacaccaaagacggagcttgaaaagtatgagaaaattgaattcgaaccaatagtcaaggacaagccattggatagcccgattgacgttttggacgaatcgccaaaagaagtgcagaaaaaagataaaaagtcaaggtctacaaaagttccgaatgaggaaactcctgttcaagaacaatatgcaaaggtcaatgttgtcgaagaagaagctcctgagcaacccgaaataccagtgcaaattctagaagttaagcccgtagaggtagatgttaaagaggttataactgaagatggcaagccggttcaagaaaagactactaagcgagttttaaagaagattgggcccgaggaacaaaccacttttaagattacaatgattgaaagcgaggacaacgattcggttacagttattgttgacgaagaaccggaaatagcttctccacagtctatcgaagaacatccagaacagtctaaggaaaagctagctccaaagcccaagaaaactgtcagaaaagttaaaaaggacgacttaagcgattacgtaaagaaactaattgaagaagaaattcctaaggttgaccttgagaaatatgaaaaggtagaaatgccagaaaaaccagttaaactaactgtttctgattccattccggaagaaccaaaacctgacaaatcccaaccaatatcagtactacccgacacaacgaaacccaagaaaacgaagactcccaagactccaaagacagaagacacagaccagcaagttccggacgaaccgacagagaccactgtagacactactgacataccagagcttacaccaacccaaactgcacagcccgaggacacagccactgcacaaattacaccaagcgcacaagaagagaaatctactcaagatgacactaaagatacaattcagaaaacagttaaacataagaaaacaaaaccagacacacaaaaaagcgttgaaacaagtgaactaccagaggttcataaagactatcaaattagcatcatccacgaagagcttgtcgaggaagagcagcccgaaaagattttggaggttagagttatcgatgaagtcgccgaggtggaagaatcacagcccattgtggaagaggtagaagatgaggaaccacagccagctacagaagaaactgttgaggacgtcactaagcctaagtctaaaaagaagaaggtggttaaaaagaagaccgatgaccatgacgaactcatcaaaaagatgttggagcaggaaatagagaagacggaactggaaaaatacgagaaaattgaatttgatgttcccaagaaactcaaaccagaattcgctgctctcgaaccaataaaaatagagcgcaaagaacagaagccaacaaaggtgactattctcgatgccactgatgttcctaaaaccgtgaaactaaaaccgagtaaacgtaaggagaaacctgccgaagaactgaccgttcaacttccaaagttcagacttaaggcccgtatggtcttggttgaatatcctccagctccccttattcctaaaaccactgatattggcgccattaaagacaatggcgaattgtctcgtaacatagaagaggctgaggaaattctgaagttcaaaccgcataagaccaagaaaattaaaaaaatcaaggatgatttagaaaaggtcgagctcgaaaagtacgaaaaatacattagtagcgaggaagaaccagaggaaaagactccttataagaaaccggaaaaggcaccaaaaccagaggaaaaacaagaggatgtgaaacttaagttgggcaagggtaagaaaaagccaaaggaggaagaagcgcccgaaaatgttactcttaaaaacattccgcaaaagccacaagaagttgaagaagaagttgaacttaaacaaaaaccaaaggaggttgaaattgttgaggaacaaacaaagaaacccaaggacggagagttcgtggtggagccatttgaaccatctgagtttgatcgtcctgaatatgtacccgatgaacttgagcagatcgaacatccagagatacccgagaaagttaagaagccgtctaagaccaagtacaagcctaaagataaatctaagtcagagccggaaaccattgtatcggagattgttgccggagttccaaaggaggaagaggcaattcccgaacaggatgttaagttccgtaagcccgagagagacgctccggaagagactgattctgaaattaagctacgtcctgtacctcaggcttctaaggatgaaaatcctgacgaacaagcgctagtgacgcctaaggcagaggagcccattccgcaagaaatcgaagataaggccattgatgacgaaaagaaaccgaagaaatctaagcccaaaaaggtgcagccgaaggagcaagagattgcaaaggaagagcccgaagaatttgaggtatcggtgaaagaggaagaagctctagtggataaacccattgaaatcgaaaaaccgaaagatgttaaggtgaaagagaagaaacccaaggaagctcctgtgtccgaagtagtagttattgaagaagagccgaaaccagaagaagtacccgaggaaatacctgtggagtacaagataacaactacagtcttggaaccagaggatgcaccaaaggaacatcaagtcaaagtcatcgattttgacgagcgtcaagaaactacggaggaggtaattgaagaaaaggtcgtgacgcgcaagaagaaaccgaaaccacagcaacctgaagagttcgaggtcaccttaaaggagccaaaagaagaacaaatacaaccggatgtagtttcagctgaaatctcgttgccaattgaggagcccgaacagaagccagaacagtacgaggtcgaacttaaaataacccaaactacaccagaagagcccaatgatgtgcaaatcgcagtcaaggaaaaggtcaagaccaaacctgttaagaaagtcaaggaggataaaattgtcgtggttgaggcagaagaagagaagcaaccagttgaggaaacaatcgtggaggttgaaaagcaggaagaaaagaagaagtcggagaaaccaaaatcttacgagttcaaaatttcagagacgcaatctattgaagaaaagccaatagaagtggctgaagaagctcctgaggaaacaccaaaggttgtagagaaaaaggttgccgagaaattcgattcctacgaattcactctaaaagaaactgatgaagaaaaggtaatcacagttgacgaccagcccgaggaagaagcccctgtagaggttgtattcaagaaaaaacccaaagaacctgaagcagttgaggccgagtttgtaatgactgaacccaagattgtggaagaaacgagcgtggaaactgcaatcaaacagaaaaagacgaaaaaaccgaagaaggacgaagaggaagctcaattagcaatcaaggttgtcgaaagtgaagccccggttgccgaagaagtgttcagtgaagctcctgagagtaagattgtagaggaggaagttattgcagaagaaaagcctaaagagttcacaattcgcgtttctgaatcagaacccaagcccgaggagccaagtgtcgagcagttcacagttaaaaaacgcaagccttctgttactttcgccgacgaacctgccactgaaatcgttatcaaggaaagcaagcccgctgaagttgtcactgaagacgctcatatcaagaccaagaagccaaagaagaaggtaacggatgtggaagctgaggagctaaagattaagatcactgaggaagttccacaggaaattcccatattggaggaggtctcggaggaagaggtgatcactgaaaccaagaagacagcgcctgttgttgaagagaagacatacaaaattggtatcaaggaaacggagccggaaaagcctgccgaagcaattgtcgaggaggaggagccggtggtaacagagccaattgaggaagcaccgaaaccggaagtctttgaggaacacaaggttagagtcattgaggaaacacctcgggaattggtcgaggaagtcattgaggaggaggtgaaggtaattcgcagaaagaagcctaagccagaaattaaagaggaacccgaggcggaagttactgtttctactccaaagcctgtcgaagaagtggaagctacgtccagtattgctgttattccagaacaaccgactgaggaggaagccgctgatctcaagataacaatcattgaagaagaaacaccaccacaagaactagttcaggaaattgaagaaattgaaatcgttgaggaaccaaaggcccctgaagaacaaccaacggatttcaccttcgccacaaaggattccgaaaagaagccgactgtggaagagctgcccgaggaacaggtcacgattcaaaaaaagaaaaagaaggcaccagtaccagaggtagttgaagaacccgaagctgagtttttggttaagccaaagacgcctgtccaagaagttactgaagaagctaagataacgaagtctaagaaacctgtaaaggaagaagaggccgcggcagagcttaaagtaacgatcactgaagaaattcccactgaaccagaagttcaagaaattatcgaggagatcgaagagatcgaggaagaaaaacccgcagagtatgtgatcgaagttaaggaaagccaaccagaagctgtagaagataaggaagttagcttaccgaaaaagaaacctaaggctccaatagttgaagagccagaagctgaaataactttgaagccaaaggtaaagtcggaagaagttcaggaagaagcaaagatagtgaagaaaaagccaaagaaaatcgacgaagttgcagtagccgacgagcttacggtcaaggttgaagaagaggttgtcccagagccgattgttgaagaagaagtgatagaagagttcgaaattaaaaagaaaccaaaagaaccggagccagaggacattgtcgatgctgcgattgtgaaactaaagaaaccagagccagtagatgctgatgaagttgtggctgaagttacccttaagccaaaggctaaaacggaagttacagaggaagaattttctgttgatgttaagctgccaaaggaaaagaaggttacagaagaaacttcagaccaaactgtacagctcaagaaaaagaagaagccgcagaagccggtggaagaggctgcggacgagcttaagctacagcaaactgttgtcgaggaaagacctgtggaaattgaagaagaagagatcattgaagaagcagtcgtcattcgcaaaaagccaaagaagcccttcgagccgacggttgaagatctcgaagaaacagagttcagtctctccttcaaaaagccccataccattaatgagggtgtggaggaggccgccacagttctgaaaaaacgaccagtcaagcccactactctggatgaagctgcagctgaactttctattaagcgtcaggaagaagaatacgaagagggcgaggatatcgaagagttcgtcgttagtcagcaaagaaagccgaagcctttgcaaatcacagaagaggatgaggaggcctacacagtgaagaaactaaagcgtcgaaagcaagtagacattcccgaatatgctgatgttgagaacgtcacattccgtgcgagaagtaccaagaccaaggaagatgtcgatcaagaattcaacattgccctggactcgtatgccgaggaggaaatttccatgtctggaaaggtgaagttaaagaagcctatcaagaagaccttctctgaagcagccgatgaagccaagatcaagatcattcaggactttgacgatggtgaagaacccattatcgaagaaattcgagacgatgaggataccatcgatgaagtcgaggaaccagaagagtactttgttgaggaattgccaccagacgaagtggacttcaagcttaagccaaagaagcaccccaaaccagcatattctgttcaagatgaagaggaagaacaattcctgattggcattcgtcatccaaaacgcgattcggttacatacgacgaggactctcttacctttaaaaagaagcgtaaggttgtgcaacaacttttcaatgaagatggagcttcgcttaatattaccagagaaatgaatgttgaagaatctgagaatctcaacattatgtactctatctgcaactatattgccgacaacaatgaggctataaacctagtcgagggtgagaaggtgacggtcgttggtcgtcacagctctgagtggtggtacgtcaagaaaagcactacggaagaggaaggatgggttccagctcaatatctgatggagcccgaggaatacgcgcagtatgtgcaaaataagctacacgagaaaatcgataagctgcccgtatttgaacgtcctggaccggaagacaagcccattgccccaagatttattgagaaactacagccgattcatactcctgacggctacacggtgcaattcgagtgtaaggttgagggcaatccacgaccacagattgcgtggttccgcgaaactgccattatcaagccctcccaagactttcaaatgttctatgatgatgacaatgttgcaactttaatcattcgcgaggttttccccgaggatgctggccaattcacagttgtagcaaagaatgctgctggattcacttccagcacaacggaactgattgtagaaagtccactatctgatcacggctctgacgccacagctctttcacgacgcagcatgtctcgtgaatcctcgctggctgacattttggagggcattccaccaactttctccaagaaacctaaggctcaatatgtcgacgagaatacaaatgtgattcttgagtgccgactggtggccgtgcctgaacccgatattgtctggacctttaatggcgaagacattgacgaagaagagattaaaaacgtacgcatcgttaccgaatccgacatgcacatgtactgcagtgtggtgcatatctccaaggtgaagaaatcgcaagaaggtacctacgaggttattgcaacaaatcgcgagggcgaggcacgtctgccaatcaccctcaaggtgcgcaccaccgacaaggaggcgccgcaaattctggaacccttacgcaacatggttatacgtgaaggcgagagtgttgtactatctacgcaaattgtaggtaatccaccgccaaaggtaacctggtataaggatggcaagcccgttaagaacgccaagtccgacaaggatttgcataccctaacacttataacaccacaaaagtctgagaagggtgaatacacggtaaaggctgtaaaccccttgggtagcgtggagaccactgctaatctaacaatcgaagaacccgctggcggtaatgctgagccaccacttttcgtggaacggtttgaagagcagaatgttccacaaaagggcgaaattcgcttgccagccaaggtttccggtaacccggtgcctgaggttcagtggctcttcaacaacacaccattgttccccagcgagcgcatccagcaggtttacgatggcgagaacatcgagcttatcatcaaggatgccaatccagaaaccgattcgggagactacaaatgtattgcaagtaatcccattggcaaaacatcccatggcgcccgtgtgattgtcgaggtcgatgaagtgacgtttacgaagaagcttaagaagaccatcaccattgaagaggtgcaatctcttaccctggagtgcgagacctcccacgtagttaccaccaagtggttcttcaatggcaaggaacttagcggaatggatcatcgcgtcgtggttgaggatggcaagactcacaagttggtgatcagaaacacgaatctacgtgattctggaacctatacgtgcaaggttaaaaagcaagaaactcaatcgactgtcgaggtattgcaacgtaagccggactttatcaaggttctggaggattacgaggtaaccgaaaaagataccgccattttggatgtggagcttacaaccgaggcgactgaagtcacttggtacaaggacggcgagaaaatcacaccagaaaacaagaacgtcgagttcatcaaggatggaaaggctcgtcggctggttatccgtgatgtcaccatccatgacgagggtcagtacacatgcaagatcgagggacaggaatgcagctgtgagctagttgtaatcgagctaccacctgaaatcgtggagccactgaatgacgttgcagtgaccaagggcgagaatgctgttttcgaggttgaacttagcaagggcgatgccctagtcaaatggttcaagaacggcaaggaaattgtgttcaatgagcgtattcaactggccatcgatggcaagaaacaatctttgcgcattgtgaaagccaagcccgaagatgtgggtgaatactccgttcaggtgggggagcagacatcaaaggcaaagttgacagtagaggagcctctcgtagactttgtcatccgcctgccggatatcacgcttgccaccaagacaacggatgccgagttcacggtgcagttatcacagcccgatgtcgaggtaacatggtgcaagaagggcaagccaatcaagcccaaccagaagcacgaggtattcgttgagggcactgtccgacgactggtcatccacgatgctagcgacgaagatgccggtgagatcagctgcgttgcagagaacgtcacaagcagcactaagctgtgcgtcgaggagctcaagctgccacccgtcattacctctgacaaggatcagaccatcaaggtaaaggagaacgatgacgttaccttcactgtcaagtacacaggcgtaccaacgcctgaggcctgttggaccacgcgcaaggttgtcatacccaagtcaaagcggacaataccgaccatcgatgagcagtcagccaagctaaccatcaaaaaggttgttgacgatgacgaaggcgaatacaccgtcaagcttgtcaacccggttggcgaggcggaggccagcctccatttggtcataatgcgcaagccaacggcacctggcacaccccaaccccttgagataatgcatgactctattacgctctactggaaggcgccagaggatgatggcaagtcggagattattgagtacattctagagtatcaggatgttaaggaagaaaaatggactgaaattagaaagatcaaggacaccacatacacgataagcaagctgaagatcgacacggagtacgtcttccgttcgattgccgtaaacgaagtggggccatcgccgccctcgccgctatcgccacccatccgactggtgcccaaggttgagaccaaggcgcccagcgtacaagaaccactacaggatgtggttagcgaactggacaaggaggtgactctgtcctgcgtgttcggcggcattccagagccaaaggtaacgtggaagaagaacggtcaggtgttcgaatcgagaagcatacgctacgaaaatcgcgtcgccaagtacaccattgaaaagacaaccattgagactgaagccacctacacgtgcgtggcgaccaatgagaagggctccgcggagacctcgtgtcgcctgaaactgcagcagaaacctgtcctcgaggtggaggacaagtacttgacgcaaaagctgcgcacgggcagcattctcaccattccagcgacggtccgcggctatccacagcccactgtgacctggcacaaagagactatcgagcagaagaccaccaagtcggtaaccattgagaccacggagaccacttccacctacacggtaaagaaggtgacccgcgaacaatccggcaagtacaaggtgaccgccaccaatgagtcgggcactacgtacgtagagtgcactgttcaggtgatcgataaacccagcagaccccaatctctggagatcaaggacattaaaaaggactccattgtcctagagtggaccccacctgtcgatgatggaggtctggatattgaaaagtatacgctggaaaagtgtgacgttcaaaacaatgtttggatgaaggtgtccgactttaacaaagacattaaatcgtatgctgttcaaaaactgtcgatgaacgcgcaatacatgttccgtgtggtggccgccaatcctattggcgagtctgagccaacggaaagtgatccagttactataacgaaaaaattcgtgtcgggcatgaacgacacgtccttcaatttggcttgggagccatcggagaccgacggcggttcaaagatcatagagtatattgtggagataagggaagagactgaaaccacctaccgatcggtgggcgtaaccctgggcactgtgaccaacatccacgtagagaaggttgtcagaaacaagggctacttcttccgcatatatgcgagaaacgaggttggcacgagcgaggcgtttgagaccacggagaagattgtcctgggccgcaaaattacgccgccatcgccacctcaaaacttgagggccccagatgtcactagccgaagtgttacattggattgggaggtgccagctcgcaacggcgggtcagagatcacgggctattgcgtggagaaacgttcctcaacatctacaaactggacaaaggttataacactggatgctcaccagctgcactacacgattgacaatctgaaagagaagtgcgagtactggttccgtgtgtcagcggagaatgaggttggattaggtgcaccagccgtcaccgagagcatatcgcttaagacacatgctaccgtaccctcaccacccaccggcccactggaggcgcgcgttctcgccgccaatgcccacatattcgaatggggtttgcccgagtcagatggaggtgcgcctctgctcggctaccacattgctatacgggacatgaagaagaccatgtggatcgaggtgggtcgtgtgccagctggcgtgctgaagttccagatcagagatctgcaggagaaccacgagtacatgattcgcatattcgcgaagaacgagattggtctgagtgaacctctggaatcggaggagccctacaaggcaatgactgctggtcatgagagcctgccggacgagccgcgtacagagatgagttcgtgcaatacctcctcgtggctgcgtgaccatcacatggatgcggatatccattcgtatgcccgcggcaggctgcttcaacgcgatgagtacttcttccggttgtgggcggaactgcccaagagcaaaaagaagaagagctccaaatag

SEQ ID NO: 27225 - protein, 6815 aa, DROSOPHILA
MKKRNLRKFKSFQRRFASLKPLRKMASLRRKRSDDKQPETTVTVEEVPYEEEKPEEIQELPEEVRVVETVTEDGKPKKKKIRTRVIKKVKGDKQEVTKIETVEEDDKQPETTVTVEEVPYEEEKPEEIQELPEEVRVVETVTEDGKPKKKKIRTRVIKKVKGDKQEVTKIETVEEDDKQPETTVTVEEVPYEEEKLEEIQELPEEVRVVETVTEDGKPKKKKIRTRVIKKVKGDKQEVTTIETVEEDDKKAETTVTVEETELSAPSVGKVQLKKRVIVQKPEDAVTVFELPERKSVILSEKEDGTPTKTVIKTRIIKKIQGPNMEVTKVQTVEEYEKAPQTIVSVEKFNTPFPELPEERLSEVVMLPDEVFESEAVDEEGRLKMIKTKKRIIRKPALDNTEEVTEIGIIEQDNVEPIYSVKIQERPLTESKPEDSKLIELPEHVTELNVILPDGKKKRRTVKSRAFKKSLDDDLDEVTTIHIIEEEDKEPLTKVNIEVVPSDEISITPIPIEELPEETVFTEELDENKKPKKKTTKTRTFKKRGPDDDEYFQIQTIDEEGKEPISLIRVVSDENIADIIDISKLDDEKVLKHKQKPHKHKETEHPVYITTFKSVQNEDGETTIQTENKRISQEEGIVVEEVLSDTELIPEDKTQLHLEITEVSEPTDQYYKEYTITEPEEASADALQKPTKDKTPKQKKTLETPIEEVDETVIIDEGTGEQTDQIAIKRKPRKVQGNVQVEAVDEKPIEKKEKAKKKKVVKTKRDEMDDYIQFLIHQEIPKTVLQPYQRTEMELPQRARRDSSFKQPVKLTPMKIEKVEFKKPKMVEISSVVEFPQMLKLKAPKQRPQEEKKKKNEASFKNKKLKSWIRFVPYAPYCFPYVVTELETNREVGELSRNVDEAEEVLKLRPKKFKHSKPEKAELEEADLGAYESDHSDKSNKELLHPKYKRGKKEKIETPDESRKLKFGKGKVPQNEEASEEVNLKPVKLDIAEIEDAEMPVRTQEEEVVKKKKPKKSSKPEEGLQFEPIEFEEMERTSDIREESDTSVSVDTSTQEKPIYKKKKKVTPSPQKNQYKILPGQPREFEETPEDDLNLRKRQGERPDDDKADTKLKPFYKFEVLDLEPEGVQAETVPLSETIAKEPKKKRKIKVKTEQEDNTIEIVPLSPEDNDEQIFEITVTSSEIPQGDAKAKTIGKKKVKRMNKQELDDFVTELQEEPNQEVYETRMSDFYEVKLTELPSEMDSDKPTKRILRHEKGDEVQVLEIVESVVAPVEEDLKDMPLATDVIALEDEKIIRKRKVRAKKDSKQYEIEIIETEKPGDIPDEARVIVITTEVSGDTIDGPAPSTTEAPKKSVRKVKKEKLKEFIVNIVEEAPLDHVSEIYEDVLRTPFRESSEKEDIPSFTTTVVEDEIVNPVLPEKIKTVDDVRVPKDKKKKIDNQKKIKISEFEPTPTSEDSTIEEYTPKLSEHDEDLQTDEYSVDVKDSLPKSKKKSTKKQKKESLPGPISLYTIRIEETTPEPITEKIYEDGKEVVRVINKRRIKKKAGPKEYLIEVIETYEDNNPEADVVIRTIETTPSIDSKPQEDHKIQVVQEKKPKTESLDNYIQKLIDQEIPQVDHKEFKATVLETSPESKKAKKIKKHHKKTTEVIDGIPITVIEVTIQETETDDEDFKPDEVTLKEIDHENAEEAPKEQVFEITETKAIDEPLSEVTVVEITDEQPQEEVLPAQEKKPIKKQKKLKPEDVNTYVVKVLEELTEPTQFETIPEDADDKPQPVIEDISENVQVVQIIEEDGTPKQVEIKKKKVSPKHGPKEQVFEITETRPSDEPLAEVTIVELTEEGLNKDIVIPQEKKTVKKPKKLKPEDIQSYVIRVLEEFNEPQWPASTEKPIIEDIAESIEIVPVTEEDGITKEVEVKKKKVSRKQGTKNQVFEIIETKTSDEPLAEVTILELSGDKSQEVTILPKEKKPIKKTIKLKPEDVESYVVNVLEEFCEPQSFESPEPTEGEAHETKTKTKKPKKPIVKAPENVILIEEMAPETVIENIVNEIGEEVKQVKTTKKLKKKEGPKEYLIEIKETYEENKPEGDIEITTTELVPEGSPDASDDQPVIVVQKIKKKKPVKDDLDKYIQQLIEQEITKTPLEEYEPTEMDSKKKPKKKVKSHNKKTIEVIDGLPVTIHEFNVEDIVSEPEDMETPKTLLDEIKEIPQLPDDSSKYLVNISDEFGEADKPIKQPTQDQPIKKEKPLKKKKDVEYPVSLEAFDHTVKVVSEPTLEGTVKEVTVKKRKVSRRKGSKDHIFEITETTSEDRPTAEVTVVELSSDEVLDSEEKPKHERKIVKKPKQLKKDDVEEYIINIIEEFIQPIPVGLVEDEVEKVQKEETKKPKKSPITYIATEQEDNDNNYDALVKEDLDQPIERALEKPSSPLEYTISVEEDSVGEEQKQPKPKKISKPKSIKQPSVDKSPDYLVNVISEESIIDEPIPEDYVVTEAAEEKPSEEPTFKVEELETEAVEKEVTDDDKGETTKQSVTKRKIKKLVGPKEEIIEIVETKTGDTPEYEVIVTTEEVQEKSKEAPEEKKAKTVRKAKKIPKDDLQDYIQKLIEQDIPKTELEKYEKIDLDEPVKMKRKPIKKVKQSEEQPKEETEEPIEDKPVEKISEYSEVDSDEPKLTVAVKEFIPEKPEEKPFEIVVLEETVESKREPDEEGKVREKVVKTKKIKQNRGSVEVVHDIVEEIDTDTNESVITVTTTVPTETPDQDQPSVKQKRTKKIKKDEVEDFVKRVIEEEAPQPEGSVDLVVIEDFVPKPSSEKRKKKPIKDKHTSVEEETPHEDEVLLIESVPEDSPLSDDLITVVDSVPIEEEPENKVNQIEDTKKPEKKKKPKPSAKILEENVPEDTVEKPLEALHTDSDLEKPDVQEFSISIKEEEQKHTHPEKKKSSKISSEQPKQPSTEQYEISVTEHDLKPEEEKPFTVQVIQSETNVEETKDDTGKVHKQVTTKRMLRRPAGEGEIEIIEVVRDDQPEAEITIVEYEPEPVNQDEKPKEPKKKTRKVKKDDIHDYIQKLIELETPKTELEKYEKIEFEPIVKDKPLDSPIDVLDESPKEVQKKDKKSRSTKVPNEETPVQEQYAKVNVVEEEAPEQPEIPVQILEVKPVEVDVKEVITEDGKPVQEKTTKRVLKKIGPEEQTTFKITMIESEDNDSVTVIVDEEPEIASPQSIEEHPEQSKEKLAPKPKKTVRKVKKDDLSDYVKKLIEEEIPKVDLEKYEKVEMPEKPVKLTVSDSIPEEPKPDKSQPISVLPDTTKPKKTKTPKTPKTEDTDQQVPDEPTETTVDTTDIPELTPTQTAQPEDTATAQITPSAQEEKSTQDDTKDTIQKTVKHKKTKPDTQKSVETSELPEVHKDYQISIIHEELVEEEQPEKILEVRVIDEVAEVEESQPIVEEVEDEEPQPATEETVEDVTKPKSKKKKVVKKKTDDHDELIKKMLEQEIEKTELEKYEKIEFDVPKKLKPEFAALEPIKIERKEQKPTKVTILDATDVPKTVKLKPSKRKEKPAEELTVQLPKFRLKARMVLVEYPPAPLIPKTTDIGAIKDNGELSRNIEEAEEILKFKPHKTKKIKKIKDDLEKVELEKYEKYISSEEEPEEKTPYKKPEKAPKPEEKQEDVKLKLGKGKKKPKEEEAPENVTLKNIPQKPQEVEEEVELKQKPKEVEIVEEQTKKPKDGEFVVEPFEPSEFDRPEYVPDELEQIEHPEIPEKVKKPSKTKYKPKDKSKSEPETIVSEIVAGVPKEEEAIPEQDVKFRKPERDAPEETDSEIKLRPVPQASKDENPDEQALVTPKAEEPIPQEIEDKAIDDEKKPKKSKPKKVQPKEQEIAKEEPEEFEVSVKEEEALVDKPIEIEKPKDVKVKEKKPKEAPVSEVVVIEEEPKPEEVPEEIPVEYKITTTVLEPEDAPKEHQVKVIDFDERQETTEEVIEEKVVTRKKKPKPQQPEEFEVTLKEPKEEQIQPDVVSAEISLPIEEPEQKPEQYEVELKITQTTPEEPNDVQIAVKEKVKTKPVKKVKEDKIVVVEAEEEKQPVEETIVEVEKQEEKKKSEKPKSYEFKISETQSIEEKPIEVAEEAPEETPKVVEKKVAEKFDSYEFTLKETDEEKVITVDDQPEEEAPVEVVFKKKPKEPEAVEAEFVMTEPKIVEETSVETAIKQKKTKKPKKDEEEAQLAIKVVESEAPVAEEVFSEAPESKIVEEEVIAEEKPKEFTIRVSESEPKPEEPSVEQFTVKKRKPSVTFADEPATEIVIKESKPAEVVTEDAHIKTKKPKKKVTDVEAEELKIKITEEVPQEIPILEEVSEEEVITETKKTAPVVEEKTYKIGIKETEPEKPAEAIVEEEEPVVTEPIEEAPKPEVFEEHKVRVIEETPRELVEEVIEEEVKVIRRKKPKPEIKEEPEAEVTVSTPKPVEEVEATSSIAVIPEQPTEEEAADLKITIIEEETPPQELVQEIEEIEIVEEPKAPEEQPTDFTFATKDSEKKPTVEELPEEQVTIQKKKKKAPVPEVVEEPEAEFLVKPKTPVQEVTEEAKITKSKKPVKEEEAAAELKVTITEEIPTEPEVQEIIEEIEEIEEEKPAEYVIEVKESQPEAVEDKEVSLPKKKPKAPIVEEPEAEITLKPKVKSEEVQEEAKIVKKKPKKIDEVAVADELTVKVEEEVVPEPIVEEEVIEEFEIKKKPKEPEPEDIVDAAIVKLKKPEPVDADEVVAEVTLKPKAKTEVTEEEFSVDVKLPKEKKVTEETSDQTVQLKKKKKPQKPVEEAADELKLQQTVVEERPVEIEEEEIIEEAVVIRKKPKKPFEPTVEDLEETEFSLSFKKPHTINEGVEEAATVLKKRPVKPTTLDEAAAELSIKRQEEEYEEGEDIEEFVVSQQRKPKPLQITEEDEEAYTVKKLKRRKQVDIPEYADVENVTFRARSTKTKEDVDQEFNIALDSYAEEEISMSGKVKLKKPIKKTFSEAADEAKIKIIQDFDDGEEPIIEEIRDDEDTIDEVEEPEEYFVEELPPDEVDFKLKPKKHPKPAYSVQDEEEEQFLIGIRHPKRDSVTYDEDSLTFKKKRKVVQQLFNEDGASLNITREMNVEESENLNIMYSICNYIADNNEAINLVEGEKVTVVGRHSSEWWYVKKSTTEEEGWVPAQYLMEPEEYAQYVQNKLHEKIDKLPVFERPGPEDKPIAPRFIEKLQPIHTPDGYTVQFECKVEGNPRPQIAWFRETAIIKPSQDFQMFYDDDNVATLIIREVFPEDAGQFTVVAKNAAGFTSSTTELIVESPLSDHGSDATALSRRSMSRESSLADILEGIPPTFSKKPKAQYVDENTNVILECRLVAVPEPDIVWTFNGEDIDEEEIKNVRIVTESDMHMYCSVVHISKVKKSQEGTYEVIATNREGEARLPITLKVRTTDKEAPQILEPLRNMVIREGESVVLSTQIVGNPPPKVTWYKDGKPVKNAKSDKDLHTLTLITPQKSEKGEYTVKAVNPLGSVETTANLTIEEPAGGNAEPPLFVERFEEQNVPQKGEIRLPAKVSGNPVPEVQWLFNNTPLFPSERIQQVYDGENIELIIKDANPETDSGDYKCIASNPIGKTSHGARVIVEVDEVTFTKKLKKTITIEEVQSLTLECETSHVVTTKWFFNGKELSGMDHRVVVEDGKTHKLVIRNTNLRDSGTYTCKVKKQETQSTVEVLQRKPDFIKVLEDYEVTEKDTAILDVELTTEATEVTWYKDGEKITPENKNVEFIKDGKARRLVIRDVTIHDEGQYTCKIEGQECSCELVVIELPPEIVEPLNDVAVTKGENAVFEVELSKGDALVKWFKNGKEIVFNERIQLAIDGKKQSLRIVKAKPEDVGEYSVQVGEQTSKAKLTVEEPLVDFVIRLPDITLATKTTDAEFTVQLSQPDVEVTWCKKGKPIKPNQKHEVFVEGTVRRLVIHDASDEDAGEISCVAENVTSSTKLCVEELKLPPVITSDKDQTIKVKENDDVTFTVKYTGVPTPEACWTTRKVVIPKSKRTIPTIDEQSAKLTIKKVVDDDEGEYTVKLVNPVGEAEASLHLVIMRKPTAPGTPQPLEIMHDSITLYWKAPEDDGKSEIIEYILEYQDVKEEKWTEIRKIKDTTYTISKLKIDTEYVFRSIAVNEVGPSPPSPLSPPIRLVPKVETKAPSVQEPLQDVVSELDKEVTLSCVFGGIPEPKVTWKKNGQVFESRSIRYENRVAKYTIEKTTIETEATYTCVATNEKGSAETSCRLKLQQKPVLEVEDKYLTQKLRTGSILTIPATVRGYPQPTVTWHKETIEQKTTKSVTIETTETTSTYTVKKVTREQSGKYKVTATNESGTTYVECTVQVIDKPSRPQSLEIKDIKKDSIVLEWTPPVDDGGLDIEKYTLEKCDVQNNVWMKVSDFNKDIKSYAVQKLSMNAQYMFRVVAANPIGESEPTESDPVTITKKFVSGMNDTSFNLAWEPSETDGGSKIIEYIVEIREETETTYRSVGVTLGTVTNIHVEKVVRNKGYFFRIYARNEVGTSEAFETTEKIVLGRKITPPSPPQNLRAPDVTSRSVTLDWEVPARNGGSEITGYCVEKRSSTSTNWTKVITLDAHQLHYTIDNLKEKCEYWFRVSAENEVGLGAPAVTESISLKTHATVPSPPTGPLEARVLAANAHIFEWGLPESDGGAPLLGYHIAIRDMKKTMWIEVGRVPAGVLKFQIRDLQENHEYMIRIFAKNEIGLSEPLESEEPYKAMTAGHESLPDEPRTEMSSCNTSSWLRDHHMDADIHSYARGRLLQRDEYFFRLWAELPKSKKKKSSK

SEQ ID NO: 27226 - DNA, 7164 bp, DROSOPHILA
ttataatcggatcttaacctatataagtgggtgtatatatctatatatatatatatatattgatatatatatatatacatattttatattatatttcgcttcttttgtttatatccaactttgttctaactaaaaactatacacctttgtccgctaccgtttgaacacccatatctcatctcatatgccatatgccatatgcctaatgccaaatgctttgctctgatgttcgctcatttccgtcaccgtctagctggtggatgtacgttcacctaaactactaatcgtacatcaatgagtgcatccaaaaaaaaattgctttggacaatttgctacattaagttggctgctgcggctgcgtcgtaataaatttgttctgtctgcggtcaaattggttagttcaggtctgtggttacgtttccgtatccgttttcatttccgtttcctgtcgttgtcagtgttgttgtttttgttgttgtcgctgtggctgctgctgtggttgctgttgttgttgttgttcttgttgttgttgtagttgtattagtatctgttgttactgtgatgcatcatcagtgcggcgtcttctgctgcggctgctgatttgttgctgctgctgttgctcctattgttgttctcgagactggtcgacatcgaactcgaggcggcagtgtccaagttgtggtggctgttggtcatagagattccttggaaggtacccaaatggttggtcccgactgggaccaaatcatcgatttcactttgctgtaaatctcctcgatggtatcgccttggacaacgcctgttcggtggcaaataaaagaataatcataagatgtcatctctataagatgtttttcatattatcttgaccatacccgtaaagtattcgccgaattcttgctccattttaatcgcccgctcgtaagtcttcttggcctgctcctccgtcatgcgacgattcatttccctgtaaaaacaaaaccattaacatgggaaatccttagtcgctggacatgcggaaaacctacatcactgaatccaccgacttgggcttgatgaacacggcgacgggatacagctgggcaacttggagtcgcttgatggcgttcccggacacgtccaggatgcagtgtttacccttctcggccacttcgcgcacgctggccaccgatgtgccgtacagattgtcgttatactgtcccgcctcgatgaacagatgattctgaatatcccgttccatttgctcgcgagaggatacaaagtggtagtccctaccatccacctcgtactctcgcttgggtcgggtggtgtctaaatggaaagaagcatatgtcgcactttgtttaaatatcgaagtatttgtaggaatcaaaaaaaaaaatcgtccgtccaaccgggggcgccacaaaaaaaaagtctgtacgacgaaacataatgcactacttacgtggcacacaagagccgaacttgtcgggatactctgatataaggtcatcgttgatgcgatccttcaggggtcccagaataatcaccgggcgcgtgtagttgatggacaaacgctgtacggcctcgtaggacaacacgttctcctcggaagctggaaagtagggtaggcatttttggattaggaccttgacgtgcaggtgctctacatcatcgcaaagtgttctaaatgagcggggatcggagggggaatggaaggtgggaaattcattgggacaaatatatcttgggtttcagggagtctacaaacaaacttctaattcggtctatattgcaattggaagttaatatttaaagagatccataaagatcaaggcaagtcagttaggattagaaaatgtgtatactatggttaatttcagctagttggcagttgctttctacgaaatttaagggtttattggaaaaatttgtatctcaaagttaggttcgtttaaataaagctctcgcacacaaaaaagtacaacaaaatttcaattgataatattttccaaaatgaattggcaaaataatagagagtacaaaatcagtcaatacttgtcaagttatacattacttatcaagcattcactgtgcttggtggataacttaaaaatcgagcagaggaaacattcgaaggaaataatgttcaatgttcaatcggggcacctaagaaggagtcacttaaaacttaaaggtacaataaaatgatgtgaaacgtagtgacgaaatcaaacgaaaacatatccaaatgtaaatgcaaaatgtgggatggtaatcaaagccactacacttatgtatgtcttggatcgtatacatatataggatatagaaatgataataatgttaaatagtagtacatagagcaggcgatctacgagcaaacagttaacagacagttggcagacttgtcttacatggttacataactacatacatgacatcatgatgttacatacatggcacacaaaaactttggacaacatgaaatcaaaatctgtgtgtctgtgtgttgtgagtgagtggtataattatgtttacatcattagaactagcttattaggtgattaacttgtctttggtggaacccaaaaggtatgggttatcatacatatatcttttggctgctgaggggtttttgggaacgcagtcgcacttctcctttaccaggtggattatgggatttactcacttgacgccttgtagaactcacagatcaacacattttgggactcatttacagagacacgaacgttgagcgctacggggtggattaacaactgatcgattaagccaaataaaactccctcgatttgtacaattcctttatttcagtttcacttctggttgggtttgtttttgggtttcatcttaacccgcattaaaaattcacaattatctctgaactctaagacgaacggttttcgtgggagcgatattaaatctgatttaattctttcaaacaaaaactgattttgcggtggttcggttcggggtggcacatgcaaaagacacgacactatgcaagcattacatgaaaacatcaacaaaccaactgaatttgaatcgatctagtactctatatacctacatatatagagagacgtgtgtcgacgaggtgagtgggtgtgtttttttgggctagctaagaaaaggggactgggacaaacaactatccaggcacaaggagaaagtgtactctaggctcagctcattcgggtggggggatcggatcttttccacatccatgggggttaacttctgttactgctcgggtgatgctacgcaatatggcaaccaattaaaaaaaataataataataagaagagaaatatgcaaacgataggaggtgtggaagtgtcagttgtgtgattctggtgggttcacataatttgctatcatcattcgattctacgcaactatcaacaattcacaacaattgaagaacttataaacaaactataaggtcaaatattaacaaaacacgatgtgtccgaggaaattttatgaatgcgtttggaaattcacttaaatcttgaagacagtttgtatgcagcatttgcatggttttaaataatataaaaataattgttcaactagcaagaatgaagtttttggcttaaacgttaatactccggatacacgaaatgaatttaatgaaaggaagaaaaacaaaatctactaaaagcctatgcagaaagttattaattcaaatagattctcttgcgataaagcgccatagagatggatagatatatagcggagaaagaaacagatagagagtgatggagtgagacagcttgagtgagagacaaagcaagagataggcagaaatcaaagaaagaacgaaaaatataaacaagaggaatagattttgcaaaaaatttggtttcattgtattcataactaaatatttaactttcattctttcgtttctttttaagtagaagaaaacataagctttgttgtatttttcactagtattacaaaaagagaagagacttgttgcttttttttttttttttttgtttgctgttgattcttgtggttgttttaatttatattttttgtgattgttggttgttcagatgctcgacttacgatagtcagcatcattattctccaagtagatcagagttatctgctccatatcgggtaactccaccctgtagataatctcgcctgagcagtgattagtcgatagcgatgatagcgtagttttagaagaatttagtagttggttgttgtcgcagttcgtgagcgcatggttataacaaatatatatgtatacagagatatatatatcggtggtcatattgttggtttcaatttttttttttgttgttcgttttgtttgattgatttgagaagttaaatatttatatatagagcgatattgatatgtgtggtatgggattgtgtgtatatttagagcaagagaaaatattgtgagttaaacagaggtttacaaattaaggattttgtgtttagtttcggtgtggttccatcaaaatatatagttcgatatatatttagaaacagagaaacagagagcgagagagatggagtgacgttgcgtttgcgttttacgcacagttataaatcggtagtagatatagtagtagaatagtagtagattcgaacggtagtagatgttgttgtcgttgttgttgaagtagttgtagttgttggttggttggttggttggttggtagtagttgagtagtaggcaaacaacacaagaattcaaagtagttcacagacacaggggttaaatgtaaaagaagaacaaaaataccaaaggattaacaacaaatcgaaatcgaaatcaccatttactcatgtcttgtactgtctgtctgtgactgactgagaactaaaaaaacaacaaaaaaaaatggaactcgaaaaggaaaatgagggatttgagtttgggttcttagttgcgagttcctttcctgtctacgagtgtgatttattcgtgtgcattccgaactgagaattgtccaaggaaatctttatttcggttgtctgttatctgggtggtgtatctgtatgatgatctgttctgtattcacatcaagtacgccattccagttacatttatatgtacagtatatatcgcatcgagtgtggcaacattgaaacacgacgtgtgattgatacaagcgcataataatagaacagcaagttgcgatcgaaatggtatacagtttgatttctgtctgcatgtccgtatatgtatgtacacactatgcaatgtgaacaaccaggggaatccaaagtattaacttaaaagacgaacagaaacccctacaaaacagagatcatctccctggaagatcatcttgggattgtaagaagattcgatgtttggtcttcctgtacaactttttgtgtcgcgacggccagatctattcagatatcctatgcaaatcagacgtacatccgtagacgtacatttaacatatgtacttcccttcttttttttttaattcctttatacatttagtgtacatttaatggacatttacatgcatatgatagagttctttcgaaagttacatttgggcgattcatttattccgcaatagtcttgcggagcggttagatatatggaagataatgggctatatatatttggagaatcttggcatgtatttatagcgatagagagtgatgtacgagtagagatcgccagatacatgtgatgtacaaatgtattgatgcaaataaaaagcgctgaaaaccaaaatctctaacggaaccaacgaaaaatcaagaaacagtaatcacgtgtaatgttttgatgtatgcatgtatgtaaatatgtatgttatgtatgtatatatgcaggtaagtggttattcgcatgtgtttctgctgaaactgtgttagttcttacagcaaatgcatttctatgtatgaaaatcgaaagttagcatggttaaatgtatgttacgtcttttttatgttcagtggatttactcagatatatagatagattgttatgtataagtagatatgttggtaaattgatctgatcgagtacatacctccttcagcattggcatcgtcttgtgtgtagcaaagcataaaggctagaaaacgaagagaaaacaaacgagaaaccgaaagggaagagaaaagagagaaaacagaagagaagaaatcgaaagagatatgtttggtcagtttaaaacagaacagcggttgaaatcggttcatttgagtagacacaacattatatattattataattgattaaaaatgtgatcttgaatggaacttagtgcatcgaataccattaattgattagctttgaagtgtaagctttatgtattatattcaaataagaaatatatgtaagaaccattcaagatttttgtaggttttaacaaccatcaaaatgttccttctttccttctgtatgtattataataggaacaggatggcaagtagttaaaggttgttgctggttttcagaaaactgtttaaagtcgtagtgatgtagatatttgatgaaagcagctggactcagagatttaaggttggattttttttttttttttgatagagagaagagcgataagaagataaatgtactgtcagtagagagttgcgggaggaaaagcttttttaaatgaactaaagaacgaaatcaacttggtttcatatctcgatgggctgttgatgatgtatcgttagatgtacattgatgtaaaacgtgcaaccctgccgctgaagaacactcttcggatacagatacaattacgattatctttagcttaatccaagactatatacacgatagatggccatgaactatacaactccccgcgaggactaactgttagtaagatcgtgtgactatagcttactgtctaatatgtgtatggctgtgttcgtatacaagttgtgttgtgtatgtgtgtgtgattgttaaccatgactagaccatctgagaagccctgacacctggatacatttacaagcggatacaactcgacatttataccgccagcttcggttgtgtttggaaaacttttcacctgacatggtcggcacttacgttgcggttcatttgactggttgttgttgacattattgatgtcaatctcgctggtgctgctcacaactccattggctaaacatatagttcgggatcggggcacacacaaa

SEQ ID NO: 27227 - DNA, 587 bp, DROSOPHILA
tctctttcgatttcttctcttctgttttctctcttttctcttccctttcggtttctcgtttgttttctcttcgttttctagcctttatgctttgctacacacaagacgatgccaatgctgaaggagcttccgaggagaacgtgttgtcctacgaggccgtacagcgtttgtccatcaactacacgcgcccggtgattattctgggacccctgaaggatcgcatcaacgatgaccttatatcagagtatcccgacaagttcggctcttgtgtgccacacaccacccgacccaagcgagagtacgaggtggatggtagggactaccactttgtatcctctcgcgagcaaatggaacgggatattcagaatcatctgttcatcgaggcgggacagtataacgacaatctgtacggcacatcggtggccagcgtgcgcgaagtggccgagaagggtaaacactgcatcctggacgtgtccgggaacgccatcaagcgactccaagttgcccagctgtatcccgtcgccgtgttcatcaagcccaagtcggtggattcagtgatgtaggttttccgcatgtccagcgactaa

SEQ ID NO: 27228 - protein, 158 aa, DROSOPHILA
MLCYTQDDANAEGASEENVLSYEAVQRLSINYTRPVIILGPLKDRINDDLISEYPDKFGSCVPHTTRPKREYEVDGRDYHFVSSREQMERDIQNHLFIEAGQYNDNLYGTSVASVREVAEKGKHCILDVSGNAIKRLQVAQLYPVAVFIKPKSVDSVM

SEQ ID NO: 27229 - DNA, 3548 bp, DROSOPHILA
tctatatatatatacatatacatatattatatatagaccaatatagagcttttggaatggagaagctactgagctactgagcagctgattcacgccggttaagtatctcggtaatggtgaaaccagcttcgagaatgttgccccctttttcgtatctactatacccggcgtgatgagttgcccagttgggattagttatgcaatttaccttcttttcacctctgtctgctcatctaaggtttgcctatctgttttacgattcaccttcctatctatttaattgtttctgtttgctttgttggaaacaataaacgttaggagcatcaaacggttaataaataatatccatttcatattcataatatatttgattattcactgtttctacctgcaaatcatattgcttttataaaagtagtttcttgcagtaaattagcgggttgcctttagcgaacgatccctgtattaagcagtcatatttctgttcgtggcattcaaatgagtgtgaatcacgcggtgacgatcgattgcgaaaaatctatgaaaactatgagaaagccggcaaacaatgcggctgctgttcaaatcgagaatgattaatgtcaagggaaatggaaaaggaagaagaaaagtcggcctccgaagagagtatcttctaggctattaaatttcaccgcattgcgatataaaattcacttaataagagagctccgcaaaaaacgatgactcatgagcagagttggaggaaaaaaaccatacaaaaaaaaaaaaaaaataataataataagagagtggcgaatgactaacgcacaaaacaaaattaaatagaaggggcagcaggcgatgggaaagggcgtgggatgcaaggtgcgccgcaaggacactgggaacaaacatcaaaatggtattcaaattacgacggtgtactataatactcgaatgacgacgggaacacaacaaattaattagaaacgcaatgataactggtgttgactagttgctatttgcagtggctagactcacccaatccgtatttgcagaagatctcctcgacggacgcaatctttggctgcggctgggtcgattcaactggcgccactggcacaaccttcggcttggccggctccaccttgggtttgggtggctctggtttcggctcgactacgggtgcggcgatggtgggtgccttcggcgcctcctggacagtgggtttgaacaccacctcctcgtcatccaggtcggttatcaaagcggttgtcacgggtacagccactggaaccggctggggtttggcaactggtactgatactggtactgccactggagcaggagcaacagctggagcagcatcgagaatgggagctggtgcgggtgctggtgtgggtgctgagcgtggctcctccttaaaatcgctggccagatcttccgacgagatgaacttctcgttgtcctgatccttgagggcatctacaatgggtttcttggccggcgatggtgtgtacgagacggacggcgattcagtgtcggaatcctggttggccttggtcaatggggcgacaggagctgctggggcagcagtggttggcttgcccaggaagtcatcctcctcgtcgtcatagaaattggccgtggacggtgccgttggctggaaggcctggagtggtgccgatggctggtcagtgaagctgcccaggaggtcctcctcgacaggaagcggagctgggacagcaggagctggcgccactggagctggaacggccggagcatgatcgggaacagctggagcttgtgctggaataaccggagcttgagctaccgtctctgagaatggagccaggggagcggagaagccccgctcggcattcataaagtcggtggtcagtccactgatgccctgcttcacctccttgccagcgtcgcgcagaaagtcctcgaaatcatcagtcttctgtgcaaacttggtgtccaaatcgagtttggcatccttagcgtcggcggccaggcgttggacaaactcctgcgcatcgccaaagtccaacttcttttgctcgttggcgaagtagtgctccgtgtgggcattatcgtcctgggcaccaccactcacattgccagtatcgccaccaagtgcagagtcttcgtaggcacgttgcgcctgcttgaagatgtcctcgttggtggcagcggcctcctttttcagttcgtcgaagttccgatccatattctacagtgttttgatttcaaaatataacacttgtgatcaataagaaattttcacagatgtgtttgaatatcctggccttctgattggaacttcgcacacacacacacgtacgcacgcacacgacacacccacacacacacgcacaggcaccgagctacagctgattttgccggttgaaattaatatgattttttttagccgacttaagtgccttctggtgactaaaaggccgcaattcgcagtgttttgtgctcgggaacgttgaatttaatttgaaccacagcgactcttttacaggcgccgtcgatgcagacgtttgaaaagtttcaatggacctgcgctagaggtggcacagcggtcgatactatcgatgacgctcacagcataattgcctaaaaatggacaaataccttgaacagccatgtttcgaaccaaagttttgatgttgccggcatctttagccatgacattaacccaatggctctggcaaattggctaaaattcacgacagctaaaatttgttgtatgtatttccagaaacttcgcgcaattcagttatgcctaatgtttgatttatttgtaaacataacaaccatgctcaggccgtccacttgaggcagcgcgtgtcctggtgcgtttgcaggcatctaacgcaacagtatcgcgttccgcaggcggtgcacgagtacaacgagaagttgccgcaaacggcgcagaaatgccgcagtggcttttgtggagccggcgctgcggcgctctcgtagttgggctgcttgtccttgtcctcctcgagcagttgctggaagttcttgcgatacttgacgagaaagtattcggcgcccttgcgcttgcctttcttctccttgccggtcttcaggctgtcctggaatttgggcaacttcttggacatgacaaggtcggcgtgtgggtcatcgtggtagttgtcctgctccagagcctccaaggctttgcgggcacgccgctggcgggctgtggagtccaggacacgcttcttttcagcgtccttgatgcggttggattcgcgacccgtcatggttgtttttaggtttttacttttggctattggattttatgggttgtgtaggttctaagcgtccttgtcgtgcagcggaaagcttatccgatccatcaagtcgtccactcgcgcctgcaaaacttccacaatgtccgtggagataaacaaatggttctcgtccagatcctggataatgaatttgcgtcccagagccagtttttcgtccaagtgcagcaggaattgtttcatagcaggatcactgcggggattgggttgaatatagcgaaacca

SEQ ID NO: 27230 - DNA, 1439 bp, DROSOPHILA
aaacttttcaaacgtctgcatcgacggcgcctgtaaaagagtcgctgtggttcaaattaaattcaacgttcccgagcacaaaacactgcgaattgcggccttttagtcaccagaaggcacttaagtcggctaaaaaaaatcatattaatttcaaccggcaaaatcagctgtagctcggagttccaatcagaaggccaggatattcaaacacatctgtgaaaatttcttattgatcacaagtgttatattttgaaatcaaaacactgtagaatatggatcggaacttcgacgaactgaaaaaggaggccgctgccaccaacgaggacatcttcaagcaggcgcaacgtgcctacgaagactctgcacttggtggcgatactggcaatgtgagtggtggtgcccaggacgataatgcccacacggagcactacttcgccaacgagcaaaagaagttggactttggcgatgcgcaggagtttgtccaacgcctggccgccgacgctaaggatgccaaactcgatttggacaccaagtttgcacagaagactgatgatttcgaggactttctgcgcgacgctggcaaggaggtgaagcagggcatcagtggactgaccaccgactttatgaatgccgagcggggcttctccgctcccctggctccattctcagagacggtagctcaagctccggttattccagcacaagctccagctgttcccgatcatgctccggccgttccagctccagtggcgccagctcctgctgtcccagctccgcttcctgtcgaggaggacctcctgggcagcttcactgaccagccatcggcaccactccaggccttccagccaacggcaccgtccacggccaatttctatgacgacgaggaggatgacttcctgggcaagccaaccactgctgccccagcagctcctgtcgccccattgaccaaggccaaccaggattccgacactgaatcgccgtccgatcaggacaacgagaagttcatctcgtcggaagatctggccagcgattttaaggaggagccacgctcagcacccacaccagcacccgcaccagctcccattctcgatgctgctccagctgttgctcctgctccagtggcagtaccagtatcagtaccagttgccaaaccccagccggttccagtggctgtacccgtgacaaccgctttgataaccgacctggatgacgaggaggtggtgttcaaacccactgtccaggaggcgccgaaggcacccaccatcgccgcacccgtagtcgagccgaaaccagagccacccaaacccaaggtggagccggccaagccgaaggttgtgccagtggcgccagttgaatcgacccagccgcagccaaagattgcgtccgtcgaggagatcttctgcaaatacggattgggtgagtctagccactgcaaatag

SEQ ID NO: 27231 - protein, 388 aa, DROSOPHILA
MDRNFDELKKEAAATNEDIFKQAQRAYEDSALGGDTGNVSGGAQDDNAHTEHYFANEQKKLDFGDAQEFVQRLAADAKDAKLDLDTKFAQKTDDFEDFLRDAGKEVKQGISGLTTDFMNAERGFSAPLAPFSETVAQAPVIPAQAPAVPDHAPAVPAPVAPAPAVPAPLPVEEDLLGSFTDQPSAPLQAFQPTAPSTANFYDDEEDDFLGKPTTAAPAAPVAPLTKANQDSDTESPSDQDNEKFISSEDLASDFKEEPRSAPTPAPAPAPILDAAPAVAPAPVAVPVSVPVAKPQPVPVAVPVTTALITDLDDEEVVFKPTVQEAPKAPTIAAPVVEPKPEPPKPKVEPAKPKVVPVAPVESTQPQPKIASVEEIFCKYGLGESSHCK

SEQ ID NO: 27232 - DNA, 6940 bp, DROSOPHILA
gggcatcaagtatatgtttgatggcaaactggtgaccgtgtggtcggcgccaaactattgctatcgctgcggcaacgttgccgccattcttagcttcgaaacggcggagaagcggcagacgaagatcttcctggctgttccggatgcggagcgtgtgatacccaagcagaacacaacgccctacttcctgtaaaacgttctgatgtgatgcgatgtgaagtgatgcaacgcaatactataccacataccataccacataccgatccaatacgatccgcccactgttccggcatcgtggctaataatcatatacgcttgtggagagcagagcggagtgcagccttcgactgactgatccgtttcatttgaccacccatgaactcaacgccttaaactcaaaacgtgcgcaacgagcaccccaagcatagcaaacactcagaacagcaaacacaagccacacacaccacacacacacctgtaacttgtaattttcgtctctttttttgtatggcaaaaacacatatctaattcttaagagcacagttaaaaaaaaactttgttattagtttccggcaagtccaaagagaggggaacacgtgaattgatttctttaagttgtatatccaagtattgtatttactgataacggatgctaatggaagcaagaagtatatagagattcactttgttattttgtattccaaacctacatatttatttctgtgaacaaacacaaaaatcatatactttgtacattttgtattagtaatgctttgaaggaaataagaataactaagaataacccaattgtgtgatcccgatcaaaacgatatgattaaaacaaaaaagacaattcgaaatgcgttgtccggtaatcagtgggaaaaaccaggtgtcccttattccgctcccaaaatgtccatcatccgtctctgtcgttttcgcgacacggctccgatattcaaagttccactgaaataatttcgattatgagtttcttacataaatatcatttatttcgtttcgttttcgttcatgaatcattctcattctcatgctttgcaacatctcaacaattgtgttttcatatatattggtttgctttgccccaacatttattctagcgtcccaactcaaaaacaaatatgtataagtactagactttctattaggggcgaaaaagaggtaaataagtgagtgactttcgcattctggggtcggtcatcatcatgtggcattcataattcctcgcaacttgcttttccatggcacctggccatgctcacagtgttttggatacttctctatttgtatatatatatacgcgtgcgtttccgggtcaacaattacaaaaaaaagaaaactaaataatcacactagcagagtagtgcatgttaggaattaaaagaattctcaacaacaacaacgatttgtttaaacgatagagaataaagaggttccaatcgattggctcatatcatgcattttcttacaaaaaaaataaaataaaagaggagagaaaaactgagagttgagcagcaaatacgtggtgcattaatgttgttgtagtcgtttgggtgtttgtcttcgcctgatttctatgatcatccacattctggttagtgttttgccccacggtcagccaacccactactgttccactactgcggcgatatatagttgtgctcgaagatgtccagctcgttctgtatgtagttggccttgttgcgaagcagcttcaattgcttctggttcgcctccaggatgttcagctgcgagtccagcgtcttgagctcatcattcatgtccgtggtggcggtatcaaccgtgcggcacaaacgggcaaaggtgctcgacaattccctgttgagatgtgacagagaatattcgataagtgatcagcgattcagacgctaagggatcaatactcactgctgcacttggtggctgcagttggccgaggtgaggtcgacaatcatcttgagcttcttggtggcatggcgcacgtactgcgacttgaacgttcgctccttggctgaatttgtccacgagaggcgctcgtacaggtagatgcagccgtagagggcacccacgcccaccaggacacgccagccgatagttttcagcatctgcaagtggtttgatttcatcacatagctatgcactatcacctgcttggtcgttggtaaggacaagaggtgttatgataatttaaccgttaacacttacgacaccggctacgacgagaccaccaacggtgccctgcgatccaatggaggacaccgcgaagcgtgagatcaacgacagctgctcgggcgtaatgccagccacaacgggagcgggcagcaggcacacaggagtggcttccacgggcgtcgtggtcggcgtcgatacgctgtgctgtgaacgagattcgatggcagagatatagtaaaggtggtgcaacacaactatactgtagaaactcactccaatactgctctgtcgattgaccagcgccggctggcccttcttgctgcgctcgcgcaccttgccggtgaagcgctggatcatcgccgcaatgccccagctgaacttaaactccagatcctcctggaagtcggcgcagaggttctggcaattcagtgagtagagcatctcgaagggctgcgtgcgcaccaccatcttggtgctggtggccaggagctgctcgttgggcaccagggcgtgcatgcgatcggtcatctccgtctgggcggactcgacgttcatggccagggccatggataggcgggcgcgcagattgctgcccaggccgctctccacatgggcattcaattcctttttgtagatgttcagcaccaaacgctccggatggaagggcatattgaactcgtcaatgagtacgcccaggcgccagatctcctcgttcagcgcctttgacaccttctcctccacctcctcgaccatgttgtggatcttcatcttcatttcccgcgtaacctgcatcatctgcgtctctgtgccctggatgcgttcggtgagcaggttcttctggtcctgcttcagattgcggaatatggtgatccgctcgtaaatgttgtccaacattgatttcatgtcacccgaaacactcttgccgcgcgaactgtgctgctggaactttgttttcacagcactctgcgagatgcactcctcgaacttgcgctcgaagtcctggaactcgaagtagcgtatctgaaagccctcggcaatggcacccatgtgcggcggattgcccttggcctcctcgatgcgcgcctgcagcgtttccctggcggaaacgaagaataccctttcggccgcctccttctcgttgctcacctttagctccttggtgaggaagtcgatgcagcgttccgtgtgctgagacttaacctatcaattgatgaaataagcgtcttagaaagtgcatagatcaatcaatcagggcaactaagtaagctgctttgggaagagtcaacaaggaggtgttcatcggttcaattcgataaagagaccaaagcagagtggattgggtttttgtgggaccaagcaagcgggtctagctcattcattaccttagccaattcctggcgttgattacagtggatagttggttggttgtttgatagattgattggttggttgggtaataaacaaaaacaaaagacacacatcaacatagagagacaacaggcatacgaagaggtccaagaaattacttatgagatgtggcagtgcaaaactgctggcaaacgaacatatgtacacatatgtggcatatggttcgcctgccatgtaatggtaatgcagggtctgacagagattgtggactaactaaaggggccgcctagaagatcataccgattcctggcactcgggctcgttggccgacgcatcccagcgattgttcaggatgaagatgttcggcttgcttagcttctgcgagacggtgtgaaagaactgcttctccgcacgcgtcatcgttgactcggcattcaggaccagcacaaagacatcggcgttcaggcaatggttatcgatccagtcgtccaaattggccgacacatccacaccaggtgagtccacaaagacgacatcgtcgcgcagcaggctgcagcgttccctcggccaaaagatgcgcaccaaactgctctcgcagagcttctcctggcacaaggcattcgccagttgtttgatgttctgcaaacaagggtcactaggtcattaggcgaaacacatttcccagaggagagctgagtagcccacttaccaccacatttagcttctcctcggagccctctgtcataagatacgcctcgccgccattgctgccctccacttggcagaagcaattcgtggtgtgcccaatgccgctgggcaggatcttctcgcgcaacatggcattaatcaccgagctcttgccgttggaggtgcgtccaaagaaggccaccttcatgtgatcccgctgcagtacttcgcgaatggccgccaccttgtacacatagctttcgaacagctcccgttccgccttgtccacgatctccgcttccgcgtgcagggctgaaagagcaacgaacattggtttaactgggtatttcgccaaaggcaatagatgttagataagaatcaaaatttcaccatttcccttgtaaaacgatgaactgaatcataatcgttcttatcgaataccatgcaacatagaggttcaaggattggcttctgttgggtattttaaaaatataatacataactcaccgttgataaaggtggtcgtctcatggacatactcctcgatctcgccgtagatatcgttgatcttctttttggcgcgcacaaagatctggagcggtgatttgtcgttggattgatagagccgcgattccggtagcagattggcggccattgtggagccggattgttgcagcgatgagttgaaccgggatagcggggaaccgggtccggatttgtccaccgtgtccgtggaggaggcgtgacggtcgtcgtcggcggggcccgtttgcccggtcaccatcgagatggtgcggttcaagtaggccgccatttcgggatccggtttatggttgattcggtttagcagatggttttttggtagaagaagagaattgcgatacaaaacaaaaggtatgcagcccaggggatttggttgttcagacttccaacttctgcaacttcgccgccaacccgaaactcaaaacttaactatctctgtttattgtgtgttatattgcttttgggggtatttgctcaaaaatcaacgtcataaaactgaaacgaaattaaatgaaaaattatgacacgaaagaaaaaacaaaacgattgaatacagtgcgcaccagataagctcaacttgagtggtttaagtgttaaacaaaatgtgcgctacaaaatcaagcatgtgtttgctaagtatatcttagagagaacataaactattgatttgttgttcgctatgtcgagagtgcactgtatttggcgaaaaggaaaataccgcaacgcaaattgcacgcacacacacacacgtggtccaattgcgctgcaaacaaatataggcgaaaaaagtataataatctaatgtttttggtttttcttttttctgacaatttacatctgtgtgcgtaaatcgagttgataaagtttaatctgccctctcgctctatcaactaacctgattaatgccactctcgctcatatttgtatttgttttattttatatttgtatttattttcctctccggttgttcgattcttttaattgctgcccctcagctgatgcgttttcaaatggcaaattgtggaaagcgtggttcgaacttccaataaccgtacattgccgactagaatccagttgcagagaagcaatttcacgaaatttagttaatattattaattttttttaaatgcacatgatgtaacgttaaggtgaccaactcatgttgttcgctgacatccggcgttagtgcatttttatgccttcccatgtctagtatatttttatgccagtcgaaagcttaatatggtattttttcaattcgctgccatatttaattgaaattaatttttttcaattactaccacctagcttatttttatttttattgtctaatttaaattttgtctaatttaaaaatagaatttaccctgacaatgattttcactgattggaaatggtcacactagccagtttccagttagccagaatgtaacggcgcctttcccgctccaattggaatccgcgtgtaattttgtgtctcgtgttaattgtattatttcccccgcttttcggatttccgcataaaaagcgatgagtctacaggacgagagttttccgacggacgagctgtttgaccagctgaacaatttgagtagcagtggcgccaggaatacctggttcgcggagcaccataagcccgcagtcttcgagcgggatacagcgccatttttggagatctgctacgcggatccagactttgatgcggatggggatgtggccaacaagagcgccaagacatgcgtaagcgatcccgtgggtcgtgatcaggaggatgaggacgactatgatgaggatgtcgatggtaagaagtgttcgctctctctctacacttgcttaactacaatgggagaaatattcccatcaaacatatctcatatatgtataattttggtacttccatgtctcgatgtataatgggtacttcattcaatgggcacagtcaattagctagtgctaacatgtatcctttcttattcaaccaggcgatgatcataaactgggttgcgagaaggctccattgggcagcgggcgctccagcaaggcggtctcttaccaggacatccattcggcctacacgaagcgccgcttccagcacgtgaccagcaaggtgggccagtacatagcggagatccaggcgcaggacca

SEQ ID NO: 27233 - DNA, 3477 bp, DROSOPHILA
aacgttacatcatgtgcatttaaaaaaaattaataatattaactaaatttcgtgaaattgcttctctgcaactggattctagtcggcaatttttatgacgttgatttttgagcaaatacccccaaaagcaatataacacacaataaacagagatagttaagttttgagtttcgggttggcggcgaagttgcagaagttggaagtctgaacaaccaaatcccctgggctgcataccttttgttttgtatcgcaattctcttcttctaccaaaaaaccatctgctaaaccgaatcaaccataaaccggatcccgaaatggcggcctacttgaaccgcaccatctcgatggtgaccgggcaaacgggccccgccgacgacgaccgtcacgcctcctccacggacacggtggacaaatccggacccggttccccgctatcccggttcaactcatcgctgcaacaatccggctccacaatggccgccaatctgctaccggaatcgcggctctatcaatccaacgacaaatcaccgctccagatctttgtgcgcgccaaaaagaagatcaacgatatctacggcgagatcgaggagtatgtccatgagacgaccacctttatcaacgccctgcacgcggaagcggagatcgtggacaaggcggaacgggagctgttcgaaagctatgtgtacaaggtggcggccattcgcgaagtactgcagcgggatcacatgaaggtggccttctttggacgcacctccaacggcaagagctcggtgattaatgccatgttgcgcgagaagatcctgcccagcggcattgggcacaccacgaattgcttctgccaagtggagggcagcaatggcggcgaggcgtatcttatgacagagggctccgaggagaagctaaatgtggtgaacatcaaacaactggcgaatgccttgtgccaggagaagctctgcgagagcagtttggtgcgcatcttttggccgagggaacgctgcagcctgctgcgcgacgatgtcgtctttgtggactcacctggtgtggatgtgtcggccaatttggacgactggatcgataaccattgcctgaacgccgatgtctttgtgctggtcctgaatgccgagtcaacgatgacgcgtgcggagaagcagttctttcacaccgtctcgcagaagctaagcaagccgaacatcttcatcctgaacaatcgctgggatgcgtcggccaacgagcccgagtgccaggaatcggttaagtctcagcacacggaacgctgcatcgacttcctcaccaaggagctaaaggtgagcaacgagaaggaggcggccgaaagggtattcttcgtttccgccagggaaacgctgcaggcgcgcatcgaggaggccaagggcaatccgccgcacatgggtgccattgccgagggctttcagatacgctacttcgagttccaggacttcgagcgcaagttcgaggagtgcatctcgcagagtgctgtgaaaacaaagttccagcagcacagttcgcgcggcaagagtgtttcgggtgacatgaaatcaatgttggacaacatttacgagcggatcaccatattccgcaatctgaagcaggaccagaagaacctgctcaccgaacgcatccagggcacagagacgcagatgatgcaggttacgcgggaaatgaagatgaagatccacaacatggtcgaggaggtggaggagaaggtgtcaaaggcgctgaacgaggagatctggcgcctgggcgtactcattgacgagttcaatatgcccttccatccggagcgtttggtgctgaacatctacaaaaaggaattgaatgcccatgtggagagcggcctgggcagcaatctgcgcgcccgcctatccatggccctggccatgaacgtcgagtccgcccagacggagatgaccgatcgcatgcacgccctggtgcccaacgagcagctcctggccaccagcaccaagatggtggtgcgcacgcagcccttcgagatgctctactcactgaattgccagaacctctgcgccgacttccaggaggatctggagtttaagttcagctggggcattgcggcgatgatccagcgcttcaccggcaaggtgcgcgagcgcagcaagaagggccagccggcgctggtcaatcgacagagcagtattggagtgagtttctacagtatagttgtgttgcaccacctttactatatctctgccatcgaatctcgttcacagcacagcgtatcgacgccgaccacgacgcccgtggaagccactcctgtgtgcctgctgcccgctcccgttgtggctggcattacgcccgagcagctgtcgttgatctcacgcttcgcggtgtcctccattggatcgcagggcaccgttggtggtctcgtcgtagccggtgtcatgctgaaaactatcggctggcgtgtcctggtgggcgtgggtgccctctacggctgcatctacctgtacgagcgcctctcgtggacaaattcagccaaggagcgaacgttcaagtcgcagtacgtgcgccatgccaccaagaagctcaagatgattgtcgacctcacctcggccaactgcagccaccaagtgcagcaggaattgtcgagcacctttgcccgtttgtgccgcacggttgataccgccaccacggacatgaatgatgagctcaagacgctggactcgcagctgaacatcctggaggcgaaccagaagcaattgaagctgcttcgcaacaaggccaactacatacagaacgagctggacatcttcgagcacaactatatatcgccgcagtagtggaacagtagtgggttggctgaccgtggggcaaaacactaaccagaatgtggatgatcatagaaatcaggcgaagacaaacacccaaacgactacaacaacattaatgcaccacgtatttgctgctcaactctcagtttttctctcctcttttattttattttttttgtaagaaaatgcatgatatgagccaatcgattggaacctctttattctctatcgtttaaacaaatcgttgttgttgttgagaattcttttaattcctaacatgcactactctgctagtgtgattatttagttttcttttttttgtaattgttgacccggaaacgcacgcgtatatatatatacaaatagagaagtatccaaaacactgtgagcatggccaggtgccatggaaaagcaagttgcgaggaattatgaatgccacatgatgatgaccgaccccagaatgcgaaagtcactcacttatttacctctttttcgcccctaatagaaagtctagtacttatacatatttgtttttgagttgggacgctagaataaatgttggggcaaagcaaaccaatatatatgaaaacacaattgttgagatgttgcaaagcatgagaatgagaatgattcatgaacgaaaacgaaacgaaataaatgatatttatgt

SEQ ID NO: 27234 - protein, 833 aa, DROSOPHILA; identical to SEQ ID NO: 7485

SEQ ID NO: 27235 - DNA, 3697 bp, DROSOPHILA
atcttcaaagtttgcatttggagggaaattatattaacaattttgaacttacaccctggaaacctcatccaagtctgaaagaggttgctctgtacgataataaattccagcctaagggctataaaaatattacaaagttcttcaatgaaattggagtaaacgtcttagagaaaacgcaatacagtcaatcaaacaacacgactccaacttgtaagccgtgcataccagatgccagagattttcctacgagtataagcgccgacacaaaccaaaccatagataccaaagttaatcctttaagcaacgacacttatcaatggaatgtatggaacgtactgatgctagtttccctgattgtttccttgttcgtaaactcttttctaatcgtgaaactcattcgtttgagaggaagaaaccagttcacgcaatcatcatcggtacctgccataatcgaaatgttttcaaacgaatctgatgatgaaattatcctgtaatataatcattctacttaacatgtatatatttaaacttttccttaaataataataaagaatctcttgagtttttcctaccatgcacatttaaataaccggctactcatttggatgtgcctacatgctgaatgatatatatatacaatatatactactataacgaataattgaaatgcatcaaatttaaacatcaattattacattttattttccagggccacatctattttgaacacaagcatttccccaatggtttgtaaacgtaggttgaaacatctcagtatatgtatctgaaatatgacggaattgattctgaattgccttatcaactaactgaacgaggcgaaagctttactttgttgctctcggcaaagctcccatgggtatttaaattacccactatcagcagtgagtaaagctccacccgctggtccacaaatccagatgataagaacatgatgctgttgccgcttcgatcggggctagtgcaatatttgcagtcgaacaaagcgcgagcaaagtgatacggaataacatgcatttttacaagtacattttactcggtatttgcggcttaacggtaagcgatgcacttgccgtgtacgatgcctccggacgctttaatctcagtgccagttgcccggattccttctgcagcttaagtgatcggccagtggcatactctgcgactccggctcttcagctccgggaattgcacttgagaaactgcagccggcaatcgatcacatggctggttctgcaacttacacctggtcttcgcaccttggttatccgcaactgtgccacctaccacattagcaaggagagtctgaggccagtggaaaatctaacctccctgcagatgcagggcactagtcttggcgtcctccgggatcagatctttaatgcagtgcctcgtttggagatcctgcagctaagtcagaacttcatccacacggttcacgtagccgccttccagggcttatccaaactaagattactgggtctgcaagggaatgcgatagctgaaatcctgtctagcacacttgatcctctgatggagctagtccatctggacttaagcaggaatgagctcacaactttgccacaaaacatctttgctaaaaataagaagctacaaaccctgttactcaatggcaacccattgagaattttaatgccagatgtactaggctctctacccaatcttcgactgctcgacttgggacatgctgctgaattggaggtgatgacgctaaaccttaccaatgtgcagaatttagttctggaggggagtagtcttagcagtttagtcatcaacggaggctttatcaaactgcaggcggggaacaatgagctgaatcatctgcaagtgggaaacaagagctctgtgattgagatggatttgcatggtaatttgttgaatggaaatgatacggccgcccttctcaggggaatgtggaatctgcaaaggctggatctgtccaaaaataggatcgaagcattgccccagcatggaagcggattggatgcttccggcacccaggagctgttgattttgcccagtttgaagtttctgaatttggcgaacaatcagttggttcgcttgcctccggagtcgccaatcctctcatcgcgtctcagctatttggatttgtctcacaatctgatgctaaccctcgatgtcgcgatactcagaagcctgtcggttctgaagggcctgtacgtggagggcaaccgcctgaataccattaactaccagaagctccatgaagagcacccagatctctcagagctggggcttcatgacaacccctggtcatccggcttataccgcaagatgtttctctacttcaccgatagaggagttcatctgcaggcgaggccccaaaaccgtgtcctaaacaagagtagccgagtggacatcgattggccaccgaatgaaggccaagcggaggctcagaagatggatccgccgggagtgactggcatacacccctactggactcttagagatatccttgcatttgttacgctcctggtggtgatgattattctgctgatgaatctctaccacatccttgaggaagagggctgtctgcgaaggtttcgccattggaggagatctcgtacccttgggcaaaacacttcaacgaccaggaacagtggccgtcgcctcgacgagcaggactccgaagtatgagcctggtcgacactttggcttactcgcttatcctttctccgtttctcaaaacagcaaagctccagtgaatagacgtgagatgtagccaagctgttccgtaagccaaataagcgccaattggatgtcaatatagcgctagtctttgctgttgcttacctacttgtttgcagctatcatctgctaccctgtacttatcacttgaggggagcgtgccgaagttagatataagttgccaatacaaaaaatgtgatagcaatagatgaaaatttaaataataaatcgctcttttggtttctagacctacttgaccgataagaaaatttacataggtattaaaaaaatgataaatgaaagcttataaacctgtaatcaggctaatcactaatcatatattttcccatcgctgattaaagtattgtatttttcactatgttcaagggtatggtcattatcgtatcatttagtaatgcgctatatattttgaatataacattttagcagcgaaaggatagcaacagtttacaaaccagagctccgaaaaggtagagatgcgaagtaatatatgggcattactttaaaaataatgtgacacacaaatagcgaactgagagcatttctctcagtgcagagaagagctcaccggtccaagcgaacaagatgcacttacaagattcggacaaaatacgaatttaattcaaaataattgcacggcatgcacaggaggacatgtggagtgctctctggctgtggggctgctgttggcccaagactagttagtactctgcctggaagttggtcaagaaggggaagtggagtggagtagtgagtggctagacctggttgaacatcgaattttccgccttcctttgctggcacatcttgcatgtttgcttcgaggccgtggatatgtggcgtttgcatttgcgtagaccttgccacaagcctacatacttactttgtttatatgcaggcattatagccccgacttgctacgccaccc

SEQ ID NO: 27236 - DNA, 1697 bp, DROSOPHILA
aaagcgcgagcaaagtgatacggaataacatgcatttttacaagtacattttactcggtatttgcggcttaacggtaagcgatgcacttgccgtgtacgatgcctccggacgctttaatctcagtgccagttgcccggattccttctgcagcttaagtgatcggccagtggcatactctgcgactccggctcttcagctccgggaattgcacttgagaaactgcagccggcaatcgatcacatggctggttctgcaacttacacctggtcttcgcaccttggttatccgcaactgtgccacctaccacattagcaaggagagtctgaggccagtggaaaatctaacctccctgcagatgcagggcactagtcttggcgtcctccgggatcagatctttaatgcagtgcctcgtttggagatcctgcagctaagtcagaacttcatccacacggttcacgtagccgccttccagggcttatccaaactaagattactgggtctgcaagggaatgcgatagctgaaatcctgtctagcacacttgatcctctgatggagctagtccatctggacttaagcaggaatgagctcacaactttgccacaaaacatctttgctaaaaataagaagctacaaaccctgttactcaatggcaacccattgagaattttaatgccagatgtactaggctctctacccaatcttcgactgctcgacttgggacatgctgctgaattggaggtgatgacgctaaaccttaccaatgtgcagaatttagttctggaggggagtagtcttagcagtttagtcatcaacggaggctttatcaaactgcaggcggggaacaatgagctgaatcatctgcaagtgggaaacaagagctctgtgattgagatggatttgcatggtaatttgttgaatggaaatgatacggccgcccttctcaggggaatgtggaatctgcaaaggctggatctgtccaaaaataggatcgaagcattgccccagcatggaagcggattggatgcttccggcacccaggagctgttgattttgcccagtttgaagtttctgaatttggcgaacaatcagttggttcgcttgcctccggagtcgccaatcctctcatcgcgtctcagctatttggatttgtctcacaatctgatgctaaccctcgatgtcgcgatactcagaagcctgtcggttctgaagggcctgtacgtggagggcaaccgcctgaataccattaactaccagaagctccatgaagagcacccagatctctcagagctggggcttcatgacaacccctggtcatccggcttataccgcaagatgtttctctacttcaccgatagaggagttcatctgcaggcgaggccccaaaaccgtgtcctaaacaagagtagccgagtggacatcgattggccaccgaatgaaggccaagcggaggctcagaagatggatccgccgggagtgactggcatacacccctactggactcttagagatatccttgcatttgttacgctcctggtggtgatgattattctgctgatgaatctctaccacatccttgaggaagagggctgtctgcgaaggtttcgccattggaggagatctcgtacccttgggcaaaacacttcaacgaccaggaacagtggccgtcgcctcgacgagcaggactccgaagtatga

SEQ ID NO: 27237 - protein, 555 aa, DROSOPHILA
MHFYKYILLGICGLTVSDALAVYDASGRFNLSASCPDSFCSLSDRPVAYSATPALQLRELHLRNCSRQSITWLVLQLTPGLRTLVIRNCATYHISKESLRPVENLTSLQMQGTSLGVLRDQIFNAVPRLEILQLSQNFIHTVHVAAFQGLSKLRLLGLQGNAIAEILSSTLDPLMELVHLDLSRNELTTLPQNIFAKNKKLQTLLLNGNPLRILMPDVLGSLPNLRLLDLGHAAELEVMTLNLTNVQNLVLEGSSLSSLVINGGFIKLQAGNNELNHLQVGNKSSVIEMDLHGNLLNGNDTAALLRGMWNLQRLDLSKNRIEALPQHGSGLDASGTQELLILPSLKFLNLANNQLVRLPPESPILSSRLSYLDLSHNLMLTLDVAILRSLSVLKGLYVEGNRLNTINYQKLHEEHPDLSELGLHDNPWSSGLYRKMFLYFTDRGVHLQARPQNRVLNKSSRVDIDWPPNEGQAEAQKMDPPGVTGIHPYWTLRDILAFVTLLVVMIILLMNLYHILEEEGCLRRFRHWRRSRTLGQNTSTTRNSGRRLDEQDSEV

SEQ ID NO: 27238 - DNA, 3731 bp, DROSOPHILA
ccaaataaattaaagtactataaaaattaataatacaatcgagatataactgttgttcaattttgttaataaacctcaactaaaatcgaaatcaatctgataaaattgtagtattgataactgaaaattcttttttctacatgccgctgataaacttacgtgtcgccgctagaaattcaactgctttcactgcttgtcaggtttcttactcgcggtgtagaatgtagatatcattatgtagatgcaaacggtgtatcaaatacgcgtagaagtgaaatgatcatcttgtgaaaaattaatttatatatgaaaatcgtcgacagtcaataatggatgtggacgaaccaatggaatcttacttttcccatgtctacgaatgccgtttcccgatcctatccctattccataggttgagggtttttatttaaggcttaattcaaaatgctatctgatttaccttctgacataatttgtgtgtacatatatttctcttacatgccttgctctcatttgttggctaaataatgtaaaatatgacctatcttttaatgcagttacatagtttacatgcttactgccagcaaaagttgttgcaagtatacaatttccgaggtaagcggtctctcaagctcatattcccctgttttgtgccttttgtgttttgctgtttgtactcttctttttaattttctaccctttttttctatctgattgtttggttgtctcgcctgtgttcgttttaacgctccaagttgcattgcatgttgcgttttacccacttagcacttgtataaaatgccaaaagtcacccatccgcctagttgggtttcagttcagctttagtttggcgctgcatactttggggggggggggggtcgcagatgtatccaaccaccgcagttttgcagacccatataccgcctcccttggtatctaaacaaatagttgggtcgatttgactctgcagcgcctaggtttagtgtacttaaagccctcgacgatattggttctggcgggacagttccgtatattcttggtcccacacatgtgtctgtggcgcgttatctttacggcacaccgtaataataaaatcgcgaattattcgcattggacagtatctaaactacgtcccacaaataccaactaaaccgattgcagcgctgcagttcgttgaatcgtgtcgatcatacaccaggggtaagcggctggtttccgtacaaccgcacccatatttgctcaagtgctttcctgtacatataatcggttcttggaatctcatttgggcttattgggatcggaaagaggtgatcaaatgtcaagcataattcacacatacatagaagacgaaaaaaagaatatccaaaatctgtctgtattctagttgcgaaaaaagaaacaagcctccttctgaaattgcgactgctttgtacaattttcaataaataacagtagttattccatttcgactattcataacccgatagtgcatagtgagggataagccgtacttttatatgactttgctgcaggttccagacaatcgagttggtgaacaggcaatatatatttggtgtattgtcgtgctaattcctggaattccatcggaattgcgttaataatgcattgttctgtcttcccttcgactttagtttaattaatttccggtgtataattttattaaattttttatatatatttgcttttattttaattagccagcagccaatgttttaactaacttaaattcatgcgatccatgcgcatttttctctttctctctctgtcatgcacgcttttgatgctttcttgctcgctcgctcgctggccatgtcacgcccacctcatcccaccctacagatcaacgaagctcttgaattggcgctgcaagctattgatcgcgaggcgacaaccaagccaatggacaaggcacaacatccacagaagcgggaacagaaggaggagctgggaggtaagccggaggagaaggagccaatttgcgaggagcagcacgacgaagagtccaacgagcagggggaaacacacaacgagggtggggaaatgccaaataaaaccgataagcaaatgcaggggggacgagagcccatctatgagaatgtcagctcgactatatctatgcatgaagtagataatgaacagatagcaactatgacgataaccacacagacccaagcgacgcgaataagtcacaggagaagcattccaagccagcaaaccagcaacagtaacgagaataatcaaagcactaatcaaaccagcaacagcaggaatcaaaaagagagcagcacagcagcaacatcggcagcgaaccccgtgccaccaacaacaccgggggaacaagcagagccctactaccaagtgccgaaggccacggagccctactacgatgcccccaagcatttaaggccggtgccggtatacgaaaatgtcgagatcttttactcgggcctggagattagtcagggatctgtgggagcgccagtagggctgatggagccacccaaggaaaagccaccaccaccgcccaccgagagtccgattccgctggacgagggccatgacgacgagctggatggactgggcaacagtctgggccacaacacagacacctggtcatcggacaacacctacgagaccatatcgaacggcactcgccggcaccttcagggacaaccggaacccgcccaaccctcgccgcccatcaagaggatgaactcgaccaaacggatcaagaaggagttgcgcaacaagcgctccagcttcctgggcatcgaaaacgacggcgatcttgacgacatggagacctatctcgagctaacagtggccccgcctccggatatggcgcagctcttgcaggaggagcggcgactggagaagcagctgtacatcaaggcgggactctgcgacagttccgacacaggttagtcgatataagtttttgcatagcctgtaagagcaacgatgggtgtggaagaaaaccgataccaaaagccaacacggcataaaaccgaaagacgagagtaatgagcaaatcaccagcatggaaagaagggggttagggtgtcgactgggccagagggtatagggtggcccccatctaccccgcgaggttaagtataaataatccgtttagtgtgcgtgacccatggagctgtcaaagctttgactgcaattttctcccaattttgtgtttaaagaactaacgcaaacgaatcataccgataaaaacgtaacaaaagtattttatgagattatatggcaaaatgagtacgttttatatactcatagatggaagtacataaatagttattgagcgaagtatgaaaagtttagaaaaaaaaacctataatgtctggacacaaatgcgggtactaaactttacgttaattttttttgttttatggattagccttttccattgctcctaaatatacatagttgacttttgctgtcaatattaaccacacaatttgtctaattctatcgaaggtgaaagccgcgattctggagtttctgaaaaccactctcgccagagcagtgagcactacacgaactcctctgaggagaacgatacacagtcagaggccacaccgccgccattgcctccaccaccatcgaccgcccaagtgggtgaagtcatataccaaaatgagagcctcctggctgcccagacgccgcttctccagacggtaaaaggaaactccgccgagtcc

SEQ ID NO: 27239 - DNA, 1071 bp, DROSOPHILA
atattggttctggcgggacagttccgtatattcttggtcccacacatgtgtctgtggcgcgttatctttacggcacaccgtaataataaaatcgcgaattattcgcattggacagtatctaaactacgtcccacaaataccaactaaaccgattgcagcgctgcagttcgttgaatcgtgtcgatcatacaccagggatcaacgaagctcttgaattggcgctgcaagctattgatcgcgaggcgacaaccaagccaatggacaaggcacaacatccacagaagcgggaacagaaggaggagctgggaggtaagccggaggagaaggagccaatttgcgaggagcagcacgacgaagagtccaacgagcagggggaaacacacaacgagggtggggaaatgccaaataaaaccgataagcaaatgcaggggggacgagagcccatctatgagaatgtcagctcgactatatctatgcatgaagtagataatgaacagatagcaactatgacgataaccacacagacccaagcgacgcgaataagtcacaggagaagcattccaagccagcaaaccagcaacagtaacgagaataatcaaagcactaatcaaaccagcaacagcaggaatcaaaaagagagcagcacagcagcaacatcggcagcgaaccccgtgccaccaacaacaccgggggaacaagcagagccctactaccaagtgccgaaggccacggagccctactacgatgcccccaagcatttaaggccggtgccggtatacgaaaatgtcgagatcttttactcgggcctggagattagtcagggatctgtgggagcgccagtagggctgatggagccacccaaggaaaagccaccaccaccgcccaccgagagtccgattccgctggacgagggccatgacgacgagctggatggactgggcaacagtctgggccacaacacagacacctggtcatcggacaacacctacgagaccatatcgaacggcactcgccggcaccttcagggacaaccggaacccgcccaaccctcgccgcccatcaagaggatga

SEQ ID NO: 27240 - protein, 271 aa, DROSOPHILA
MDKAQHPQKREQKEELGGKPEEKEPICEEQHDEESNEQGETHNEGGEMPNKTDKQMQGGREPIYENVSSTISMHEVDNEQIATMTITTQTQATRISHRRSIPSQQTSNSNENNQSTNQTSNSRNQKESSTAATSAANPVPPTTPGEQAEPYYQVPKATEPYYDAPKHLRPVPVYENVEIFYSGLEISQGSVGAPVGLMEPPKEKPPPPPTESPIPLDEGHDDELDGLGNSLGHNTDTWSSDNTYETISNGTRRHLQGQPEPAQPSPPIKRM

SEQ ID NO: 27241 - DNA, 3723 bp, DROSOPHILA; identical to SEQ ID NO: 5362

SEQ ID NO: 27242 - DNA, 1193 bp, DROSOPHILA
taacacgtgcgcgcccgaaagagatttagtagaaatacacagacaggatgcagaactcctttcttccactgaacacacggcgttttcgacagcgggcccaggtggaaacgccggatacggtgtactgggaccgactggcgaaaccagaactactcaaggagcacaacaccatcgattatttggacttcagtccaagcgatcctgacaactttgttgtgacctgttcggtgcgcgttcagatttacaacctggtgaccatgcttgtggtaaagaacctttcccgattccaaaagaccgcatacggctgccgtctgctcaccatgatgtcgcagcatcacaaaacagtaacttgtctgcgactgggatccgatggcaggagattgctctcaggcgggctcgataggcacgtgaaaatctacgatgtgagcacctacaaaacagtgcacacattgacttatcccaatgcggtggtcagcatggctgttgctgacggagatcaagcagttgtggctggaatggtcgatggtctagtctccattcgtcgcatgatggtagacagcaagcccagtcatttgaaaaagattcgtgcggatcgcgctcgaaagtacttcgtgagtacgaaacgcacgaacaacacccaagaggttgatcacaccatcaaggaccacgtcaaggggcctggattgaaatcctacgatgtgcacttgcgccagtttaaccacaagaaggctttggacgacgtgatgaatgcgcagaagatgcaataccagccggagctcattgtggctgtcatcacggaccttctgcaccgtggatcactgggaaaagccctcacgggtcgtcatgaggcagcgcttgtccgattcatcgacttcatttgcaaccacttgggcgaggtgcgattcatgcgcccgctgatgatggccgcgagcacggtccttgatgtcttcgagcaacgattggtggcctacagccagaagctgatgaaagccttgcaacgattgtcacttgcaatgcaggaggaggtgaggctcaccgccgagctgatgcggatgaagggtgctgtggatatgctcattgggatttcaatggacaatagcgaggtagcccataagcccacctatgtggagacaaagacacctaagatgcatccctccgtggcggcgcaaaattatgtggtcttagttgagtga

SEQ ID NO: 27243 - protein, 381 aa, DROSOPHILA
MQNSFLPLNTRRFRQRAQVETPDTVYWDRLAKPELLKEHNTIDYLDFSPSDPDNFVVTCSVRVQIYNLVTMLVVKNLSRFQKTAYGCRLLTMMSQHHKTVTCLRLGSDGRRLLSGGLDRHVKIYDVSTYKTVHTLTYPNAVVSMAVADGDQAVVAGMVDGLVSIRRMMVDSKPSHLKKIRADRARKYFVSTKRTNNTQEVDHTIKDHVKGPGLKSYDVHLRQFNHKKALDDVMNAQKMQYQPELIVAVITDLLHRGSLGKALTGRHEAALVRFIDFICNHLGEVRFMRPLMMAASTVLDVFEQRLVAYSQKLMKALQRLSLAMQEEVRLTAELMRMKGAVDMLIGISMDNSEVAHKPTYVETKTPKMHPSVAAQNYVVLVE

SEQ ID NO: 27244 - DNA, 8397 bp, DROSOPHILA
ggggtccaatgctcgatgcattgccttcctgcacgccctgcgccaggttgtccacgactttgagacgcccgccaagaaggagtttggtcgcagcctggacgccgccgtgaagcaccacgtagaccacctgcacaagtgccgaccgctggccgtgtccgtgtccaatgcgtacaaacaattcaagaaccaactgacacagctgccggcggatgttcccgaaacggaggtaagaatcaaaatatatttttttaactcaattggtaacatgcatttgctcaacagtcgaaggagctgctcgtccacttcatcgatacttacattgaaaatcaaatcggcaaggcggcccaagcgatcagcggttttctgcaggaaaagatcaccgatggcgacgtgctgctgaccttcgcctgttcctccctcattcagttcatctgcgaggaggccaagcggcgccaggtggccttccgcgtgattgtcgtcgattcgcgacccggatgcgaaggccaggagctgctgcgccgactgcacgccaccggaatcccgtgcacctacgtgctgatcaacgccgtgggctatgtgatggcggaggccacgaaggtgctgctgggagcacacgccctgctggccaacggatacgtgatggcgcgaacgggcaccgcccaggtggccctggtggccaatgcccacaacgtgccggtgctcgtgtgctgcgagacgcacaagttcagcgagcgcttccagacggacgccatcgtctacaacgagctgagcgatcccaaccaactggtgcgcggcgacaagtgccagctaagcaactgggcggccaagggaaagctgttgccgctcaacctgagctacgacattactccgccggagctggtgagtgccgtggtcaccgaggtggccatcctgccctgcaccagtgttcccgtcatactccgcatcaagccagacattggctactaatcagacttcatcgatcgctcagtagaactcgcagttgttgaataaataagttttattacactttgatcaaatcgacaaacaagattgatgcgtagttcataatttacgggtatgctagtggaatatgcttgatgccagggaccgctgctgcgaaggagggctaggcccaagtgtctgtacatccggcagaccgccgagttcctcggaaattataaatattttgatcaagagcaagtctgcgctctgacatgcaattgtactttccgtgcgggtggggctgggattagcaaatatgtagctctagattctaataacaaaatacagttttgtgcccggcttatagactaggacgatgcctggaagccaatcgctggtggattgatttggttttgctcttttgatttccatttgcaacaacttgaatgagcttctacaagcagctaagtctacaaatgcaacaataaatacacacaataaatttaatagcgtttccatatcgattgcacaccctagctccgctccattcctcgatcctgcctgccttgcctctacgggctttgcttttgcatttgccggaagcagccccggcacaccggcaccggctttccactgtcgtgtcctggcagagccacgttcttgtctatgcagcgctcgcagaagatgtccccgcagcgccagcagtgagtctattcgaggattggatcatcatcagtggcaggcttgcttaagtacgcggagttacccacctttttgctgaactgatcgaagggcgtggagcaggagcaggtggttacgttgcgcatgggcttccagtctacggccacggagttgatctcctcgggcagcgcctgcggcggactggattgttccgcgctcagcgacagactggcgaaggacatgttgctggccttcagcggatgatcgtcgtcggcggcagacagttcgctaagcttcttatcgtagttgtatctgcaataagcggatggattataaagcatactatagcataataactaatatctatcatacgcacttgttgtcattgatctcgttgctggagagctccttgttcactttgccaggggcgctggtggcgtcttgcagtttcttggccgacttggaaatgtagttcttgaagctggctatgcgcttggtcagatgctgcacgtggtcctccagcgagttgcagtgctccttgctatcgagcagcacgtcgcccagtggctcccgcggatgaatgccgctctcgaagcgactgtacatgccgcgccagaacctgtgtgagaagcgcatagtttatataggatttggctcattccagaaagtcctcacttgatgcactgcggtgccaggttggccttaatggcctcgtctacatttggtttgtacagcgggttgatatactcgttcaggtgattggccatatagccccacagcgagaaggtgcgctcggccagctttaggtccaagcgatccttctcgcagttgcccacgaaggtgccgaattgacatgagtgcacatggtcgtgcaggatgagcaggaaccgctcgttgaactcgaaggcctcgctgcgctgcgacattagctgccaggtacagtccaggaactgtgtgaagatcggcgacacctcgcgggcatccgtctggatgtgaccgcagcgctcgctgaacttgtgcccgaatgccagccagtccttctcgattagcgcctggaagcccttgatggttcggtagtaggggttcagcatcagctgcgccagtgaacagacctgggccgtgcggtcccagccgtcggagcagtggaccaccaccgagacgcccttgtccacggcgttggcgatgaagctgcagggtgacacacacagaatgttaacaactcagtccacaatgccattgggagattctcctgtctgttggctcacctcgacgtgtccaatatggagcgaatgtgcttcagccagccggatgactccagggcatttatgaaggcgctcatcgtgggcgacttctgttcgcaggcctcaagcaccttttgcagactggcacgctggacgtggatgttctcaatgccgaggaagtggaatttgatgttctcgtagaaggcctcgttctcgtatcccttgccggcggctctgtttgccatggcattaatctgcaaatggcgtaaatggattatttgcatttatgctcgcctcgggagattcccctgtcacactcacccgcggtcgcgtgtccaccacatacatgtagtccgtgttggaattcgtcttgcgtatggcctccagcatctgctcatcctccagacagcgggcactgaatccggacaggggctgactgcagcggcagatggaagcctgcagtggttcccagttatgtaagtttgctgataatatgagttatgtatatcttcgcctaaccttgttgttgtgcagataggtgagcactggcagccgccccttggagcggaatcgcgagctgctgatgagcatcagcgtggtggcctccttgggcacgtaaatctgacgcggataggtgtcgcacagctcgtacttctcgttcatggagcacagcgtccaggcctcgttgggcaccagcatgtgcttgaactccgcctccagtttaaagtaatcccagccagcgttcttggggaaatcatccttgttcggctggtagttgaagcagtacaatttgttgatggacactgttcgcgggataggaatgtaggcttgtgaatggcggccgcattgttgtgtttggtggattcttacccggctggaagagtttcagcagcgaagtgtagacatcgtggcactcggagtccttgggaatgacgaaagttacggagaggaaggtcttgcagcggatgagtagcggagatcctgtcgtgctcaagggaagcttctcaatgctggccacgtgcatgtgcaggatctgaagagagcgcaaagcgtaaatacaagtatataacgtccggtgtggttaataaatctgcagagaatgggttgcgttggcttatttcccccagctactcggatgattgctgcttatggtttgctgccctttgtgagcgaaacatccaagaagccagcttgcgaccgtgacttcgcccaaggctgctcttatgcaacgcgggcaaaagcaaaacttcactccccccttggacacgggagctacgtgcccgaacagaactgctttcgccactaaataattgatgcgccccagtggcgggcaataaaaagaagcggagctagacaggggagggaagaagcaaccggattatgaggaactaagcaaccagttttcaatggcgcacaaaatcgatagttgcctgctcttttcgccccctcacggcggctctcgtgctctgatcctaagtgttttcacttttaattaaccactttgcgcggcccccgcaagtgcgactcatccggaatcccgacacttacgctcctgggccacttgtggcactcgaatgcgccaacttgctccggggagtgcataattaatacaatttgggcgaggcaattaaaatgcaatgcttgcctgcttccggccagcaacctcgttacgtatacgcagtgggcaacttacacggttggaataattaaacgcatttagtggcactcgcatgtgcagggatttgagcaacaaatccggcggtgtgtccaaaggatatgagcttgtcgggcacttattgtgcaatataacgctaagccagggctttttcgcgactattcaccaggccgcttattgtcactatatcctttcaatttcgctgcgaaaatcgcattcgccaacacaacgaacgagccttaagctgcaacagcttttcaaacaattcccagtgaatttaaagcaaagcagcaaggaaatatgctcacaattaacgtacacaaaagctgaacgaattcaattcgtatgtgtgcaatggggcgtatacgcaacacgcttgtgcaaacattcttttgtgtgcgccagattgcgattgcaggaggcgaattaaattacctgttaggtaaataagaatcttaaagcgcaggaaacatgctgcaaactcgttaaaggaaacttttccccactcaaccgctgtcttcctcctctcgagaaaggaaaggtgcagagcacctaagacatcagtcggctggctgccagaggggctctaaactttttgacagctgcgaggtcggtgctaaaccgaaaagaaacccatttgagcacgttcgcaggcagcggacttagttgccagcacagtggtgactcacataagcgttttgcgtggcccacaaacgcaaatccacatttgccactccagccgacaaagttgttagcaaaggggacgcgaattttagtcgggagctagcgtattgatgatgtcattatgggccacttacccaggtctccttgttgctgtcgggctccacgaatatcagatgggtggccgttagatagagtgtgccaaccgtgggatttttggtattgtagcgatctatcatccgcacattttccacctgcaaaaacaaaaacagagacagagagaatggaaatgattacaattgggtttaaattcgctatttcatttcagctgcgcccccggctgacgtcagcggaatccatatagttttgtggaaacccactcgtacgtacacattgcatacgagaaagaataaactgcatgagtacgaagaaaggagcaaactttttcaatcaactttcagcgaatacccggctgaagtgaatggaaacttcatcaaagattcatcaaagccgaggatatgtcaactttaaagcaccacctaaatataggcaccacaatatgtgccccttgcggttagttgtttggcatccatttaacaaaaccgtcggccgaccagcggcacattaattcctttgatggtcctgcaggccggattccccaaaccaacccatgccgccgcttccccatctgcgccggcttttattgcccaggaggtctatacatattccatttccctagagccgttcatcatcggactaatttcctttcatgtcacttagattgaggcccttgtttgagccgggtccattgtcgagatagataaggttagttaattgtctgatttagccagtgcgagttcattaccctcgcccagcgggcaggcaaattaaagcgtggatttaagataaacaaatttgcctaactaatcatttgtataaatgaaccttcataagctttcagattcagaaactgtagcatatataagcataatgcatagcacgagtatttgattagatttataatggttaagttgcacatgcagaagctcaatcagtttgttggcaacatggcgcatacttgatgcacgattatcaaacgaactgagccataaaacttaattatattttgaatttcgaaattatcagatacacacaaataaagacaaacgaactgcattaattcaatctgcgtatagtgcacatggggagttggtgccattgtccattggtaatcaacatgggtaaccttgacaattgccaagtccggtggcctgctcttgatgtacgagtgcaatttgccagccgatggcagttgcatctgcgactttgatggaaaacccattccattaattgacccagctccgcacccgagtatcccgctgacaatgcaacaatctgtcagacttgtgggtgccccgaggagtgattgtggtgacgcacttggcgcccggatgcagacctgctcctcgttcccacacatgacccacataggaaacgggtttcgggaagaaggggaagtcagcttttggcaggcccccgaacatactgcctgtgtgctgatttgcatattttccggccagtggccagtagccggtggccatgggtgagatgggaaaattagcacgatttgctcgccatgatttgcatgggaaactggggagcaggatgttggtctgttgggcgggtttaccttcttgagcacactgttgccgttgtagaagaccggagcctcgttgaactcctcctcgatccaggagaccaccttttcggagacgaagggcggcactggcacgccccacagcctcttattgccgtccggcggctcctccgtctccggcgagatgttgtcgaagctcagccgcagcgcggaggtcggggacaattggcgctcgatctcgttgaacttgttcatgaatcgggtgatgtccattgcgggagactggcgggccgctttattgattttgaatcagcagcagcaatcgtgtgctggcaactcaaatggaatcaatccaagtttgtatgggtggaatggcctgggactttcacttttcgcctgcctaacgagcgcgaaactcgcgctattcactggcgacttgctgtgcctttttgtgcgattttaccccacggatatgagtgtgtgtggtttgcttggggcagcgcgaagtgcttccgtcaaacgatggaatggaactcagttgcctgcgacgaatgcgcgcgcttaaaagcgagctacgattttgtgttggggaaatttgtcaagggaaattctctctctctcttgcgaagagaagacaaattgagcagtttgttacatggaaataccctgtaaggattgggatcttactaaacaaaatcaagatatttaactgcatgattaaatataaatgataatgtaataagatactgcttctaatttaagttacaaaaacattttagagaaaagcagcattacctatacgagttttttaaattgactaataacttcttctattaagtttacattacttaaaataggtatttgaatttgaaagaatatttattatccaacttagaatgcaaatatttcatatttcaaggagtttctaatgatttatgtaagaatttaagataggtaatttcagtttcgttacattcaagggcagatctaagctgcaaataagtttccaaacttgcattgataagtaacccaattcggagatgcgggaatcccatcaacttcggccacaacacgaacccagttaaataggccacgtcgaagggcagaaatgtatgtagccttccattttggacgctgagagaaccttccactgatttggatggacgacttttcacggttaaaaattgtggctgagtgggtggattctgggtgattttgggatgggaagagagcgcggctcgaaacttatttactttgcattctatgcgcatgttttggttccgcattaatggacgtggatttctgggagtgcttccacctttccgggggcggagcaccccacctgtgtgggcggagtagccggtagttttcccacggaaagggcgcaggtggagcacccttaccatcgatttccgaatggccagcccccgcgatggatgactcacagcgccttcgcggcagcccagccaggtgctccacggtggtcgccgaggtatgaccctggctgcattgcaccctat

SEQ ID NO: 27245 - DNA, 3047 bp, DROSOPHILA
tttgacggaagcacttcgcgctgccccaagcaaaccacacacactcatatccgtggggtaaaatcgcacaaaaaggcacagcaagtcgccagtgaatagcgcgagtttcgcgctcgttaggcaggcgaaaagtgaaagtcccaggccattccacccatacaaacttggattgattccatttgagttgccagcacacgattgctgctgctgattcaaaatcaataaagcggcccgccagtctcccgcaatggacatcacccgattcatgaacaagttcaacgagatcgagcgccaattgtccccgacctccgcgctgcggctgagcttcgacaacatctcgccggagacggaggagccgccggacggcaataagaggctgtggggcgtgccagtgccgcccttcgtctccgaaaaggtggtctcctggatcgaggaggagttcaacgaggctccggtcttctacaacggcaacagtgtgctcaagaaggtggaaaatgtgcggatgatagatcgctacaataccaaaaatcccacggttggcacactctatctaacggccacccatctgatattcgtggagcccgacagcaacaaggagacctggatcctgcacatgcacgtggccagcattgagaagcttcccttgagcacgacaggatctccgctactcatccgctgcaagaccttcctctccgtaactttcgtcattcccaaggactccgagtgccacgatgtctacacttcgctgctgaaactcttccagccggtgtccatcaacaaattgtactgcttcaactaccagccgaacaaggatgatttccccaagaacgctggctgggattactttaaactggaggcggagttcaagcacatgctggtgcccaacgaggcctggacgctgtgctccatgaacgagaagtacgagctgtgcgacacctatccgcgtcagatttacgtgcccaaggaggccaccacgctgatgctcatcagcagctcgcgattccgctccaaggggcggctgccagtgctcacctatctgcacaacaacaaggcttccatctgccgctgcagtcagcccctgtccggattcagtgcccgctgtctggaggatgagcagatgctggaggccatacgcaagacgaattccaacacggactacatgtatgtggtggacacgcgaccgcggattaatgccatggcaaacagagccgccggcaagggatacgagaacgaggccttctacgagaacatcaaattccacttcctcggcattgagaacatccacgtccagcgtgccagtctgcaaaaggtgcttgaggcctgcgaacagaagtcgcccacgatgagcgccttcataaatgccctggagtcatccggctggctgaagcacattcgctccatattggacacgtcgagcttcatcgccaacgccgtggacaagggcgtctcggtggtggtccactgctccgacggctgggaccgcacggcccaggtctgttcactggcgcagctgatgctgaacccctactaccgaaccatcaagggcttccaggcgctaatcgagaaggactggctggcattcgggcacaagttcagcgagcgctgcggtcacatccagacggatgcccgcgaggtgtcgccgatcttcacacagttcctggactgtacctggcagctaatgtcgcagcgcagcgaggccttcgagttcaacgagcggttcctgctcatcctgcacgaccatgtgcactcatgtcaattcggcaccttcgtgggcaactgcgagaaggatcgcttggacctaaagctggccgagcgcaccttctcgctgtggggctatatggccaatcacctgaacgagtatatcaacccgctgtacaaaccaaatgtagacgaggccattaaggccaacctggcaccgcagtgcatcaagttctggcgcggcatgtacagtcgcttcgagagcggcattcatccgcgggagccactgggcgacgtgctgctcgatagcaaggagcactgcaactcgctggaggaccacgtgcagcatctgaccaagcgcatagccagcttcaagaactacatttccaagtcggccaagaaactgcaagacgccaccagcgcccctggcaaagtgaacaaggagctctccagcaacgagatcaatgacaacaaatacaactacgataagaagcttagcgaactgtctgccgccgacgacgatcatccgctgaaggccagcaacatgtccttcgccagtctgtcgctgagcgcggaacaatccagtccgccgcaggcgctgcccgaggagatcaactccgtggccgtagactggaagcccatgcgcaacgtaaccacctgctcctgctccacgcccttcgatcagttcagcaaaaagactcactgctggcgctgcggggacatcttctgcgagcgctgcatagacaagaacgtggctctgccaggacacgacagtggaaagccggtgccggtgtgccggggctgcttccggcaaatgcaaaagcaaagcccgtagaggcaaggcaggcaggatcgaggaatggagcggagctagggtgtgcaatcgatatggaaacgctattaaatttattgtgtgtatttattgttgcatttgtagacttagctgcttgtagaagctcattcaagttgttgcaaatggaaatcaaaagagcaaaaccaaatcaatccaccagcgattggcttccaggcatcgtcctagtctataagccgggcacaaaactgtattttgttattagaatctagagctacatatttgctaatcccagccccacccgcacggaaagtacaattgcatgtcagagcgcagacttgctcttgatcaaaatatttataatttccgaggaactcggcggtctgccggatgtacagacacttgggcctagccctccttcgcagcagcggtccctggcatcaagcatattccactagcatacccgtaaattatgaactacgcatcaatcttgtttgtcgatttgatcaaagtgtaataaaacttatttattcaacaa

SEQ ID NO: 27246 - protein, 676 aa, DROSOPHILA; identical to SEQ ID NO: 6684

SEQ ID NO: 27247 - DNA, 2729 bp, DROSOPHILA
gtctggatctctcgtttccttccaggaacaaagatcgtgctattaccctctcgctcccaaccacagttcaacggtatccacttgcaaatctctggcatctcaccctctcgctcacgctctcccccgctgtgagagagagaaagcccttgaaaggcgaaaatctggaaaatccgttccatttgatcccactgcgcctgtgtacaaactactgaccattggaaacaatggtctagagaggggcagcacgcccaagaacacaattccagcgattcatcacgctcaattttggaactcgagcccaaaaccgatcttaaaccggaatccaaaaccgagtacaaacccctagccctgagccataaaaataaattagttttgttccattggcatttcaatttgctgccttgtttgttaaagtggaaatgtccttatcggatttcatatttcatatttgaagtgagcgattatccattctgtctaacggtttttactggaagcagttacatagtacatataggcatggtcgtgcaaatgaaagtttttagggggctcatgcttataaaagttttttttttctattaattcttaaaaatctcgattcacatgtattagataattcaatgccatttaacgaaactcatttaaaaagactactctcggttaccacatttcaagtgatttatgtgacatgctcaagaagttctacaataaataataagagttttggtagaatacaccaatgctcttctaaaatatccagcctacgcccctgatccgaactaagcagaactcgcatatcgtgcagcgatgcccaggtaaaatccttcgaaaaacgagttatctccttggatttttcattggttttcggcttatcgttagacgtgtgttgaggtttttatgtttttcctgagtaaaacaaacaatggtacgcaatccttcacaaataaatcacgttcccgaccgcaaatctcgtccgctggccatgcaggtaaactagacgacaggcgtatttcacatttctccggtttattgaataacagtgaattgggggaaaaaaaataatattttgggatggcgatgttgggcaggcctaccaggatggcgccttaccctcgctgccggcgggacggccgtatagggcactcttgtcccggaacatggtcatacgttccgtttccttcttgtccaggaagtggccaatggcaaatcccagcaggggcaacgcgccccacagtgctcgcttatccagtcccaagaccatggtgtatatttgtgtatcctcttagcgctgatccttcagctgggctcggtgtgccaactggagctgctggcgtttccactggcgggtgtgcgaccaatctgcgtaaatcgatccgactgcaacagtgggaaagaatatcactgcgccgtactttcgagccaattgaaccacaatcccactgcccataggtctgcaagacaagcacaggagatggcgagatttacatatgatttacacaaattgatgtggggattgttatgttatgggttgacattttgccgcattacgtaataaaaacgagtgatttctcccagcgtcgtgataactgtgttgatatttttgagaacttcttacgccgcgtgtgtggaacgctttatattgtattttttgggattctctcgtttagttttaaacacaaatttgctaaattagttttgttttcaacttacttatagcatcgatagcaccagggctgtcgagtcgtttttagtttaataaaattttggcagtaagactatcgccgacagggatgccactcagcttaagtcccgacgtcagctagaaagtagcaatattttatgtaattcaaaaaaaagttttagattatcaaaaaagtgtaaatataggtaattacacaaacatggtcaaatatggtaaattgtaattctaaaaatatatttaatatatttaaagacaagccgcttatcgataagtgggcgtctatcggactttagccatcgctaagccgcccgtcaattgttttcatgaattgacgtgtcttgttgaatgcgaaaaaacccagaatagaccgtaaacacacactcgcatggagttcctgaagagtggcatcaaaacggtgctgggcagcacggagccgggtcagcagccgagtgccgccgagacggtggagaagctggtggaccgtgtctactcctcaacgctcctggaggatcgacgggatgcctgccgagcgctaaaagccctgtcccgcaagtaccgcatcgaggtgggcgcacagggcatgcctccgctggtccaggtgctccagaacgacggacaggatgcagagatcatcagctatgcgctggacacactgtgcaacgtggttactagcgaggagttcgacgaggaggctgataatcccaccgtttcggtgaatgtgggcgagcagttcacggagatgttcatcaagacaccggagcatgtaaccctggtaatgggctatctggacgaatacgattttcgagtgcgtcgcgctgccatccaactgattacgtccctcatttcgaacaagacgcgggagctgcaggatttgattctggtcagtccgatgggcgtttccaagctgatggatctgctgacggacagccgcgaagtgattcgcaacgatgtccttctgctgcttatcgaactgaccaagggcaactcaaacatccaaaagattgtggcctttgagaatgcctttgaccgc

SEQ ID NO: 27248 - DNA, 470 bp, DROSOPHILA
cctggtgctatcgatgctataaacctatgggcagtgggattgtggttcaattggctcgaaagtacggcgcagtgatattctttcccactgttgcagtcggatcgatttacgcagattggtcgcacacccgccagtggaaacgccagcagctccagttggcacaccgagcccagctgaaggatcagcgctaagaggatacacaaatatacaccatggtcttgggactggataagcgagcactgtggggcgcgttgcccctgctgggatttgccattggccacttcctggacaagaaggaaacggaacgtatgaccatgttccgggacaagagtgccctatacggccgtcccgccggcagcgagggtaaggcgccatcctggtaggcctgcccaacatcgccatcccaaaatattattttttttcccccaattcactgttattcaataaaccggagaaatgtgaaatacgcc

SEQ ID NO: 27249 - protein, 56 aa, DROSOPHILA
MVLGLDKRALWGALPLLGFAIGHFLDKKETERMTMFRDKSALYGRPAGSEGKAPSW

SEQ ID NO: 27250 - DNA, 3278 bp, DROSOPHILA
cgcttctgattgccgctgtttattccatgttgctggttgctagttgctggttaatagttgctagtttctggcgggttgcgtgccggcaacatcaacgaacagcagcagcaacaccaccagtcgggctcacaaattaccaatgtaatagcaccgcttgttttgtgtttaattttgataccccttagtctttgagaaagggggtatactagtttcgttagaaagtatgaaacaggtagacgaaagtttttcgaccatggatacgtgttttcctcgaactatttcatagttgagccactcgaatacctcttgtcataattttgtattttttgctttttgttgattgtgggggcggtgagtaattgggagcggtgcaatgtggttattaggtggctcactttttggcagtcgatgcaacatttcctaacgcaaaatttttgcgaggaaattttgcgattgcaacctggattttgcaagaccaagtagttcgtgaggctcggacacgtggaaggtggccaatatcgtgaattcgtgtcttagaataaaaagttttagctcggagagtgataaattttgtttggaatgaatgaaaagaaatgtatatatatgtatatatatttatatatatatttatctcacttagccttcgtataaaaggccagccatgtgtaggtgtttttacagtaccttccggattaccatgtcttcttcgattgcagtggtgctggtggtggtgctgattgggatttctgagtccattaagactgattctctgatgatgacctcttctttaactccagagatttcgaagtctgataaattaaaactaatcgtgtcgcaaaatgcggaaagttcaaaggatacagatgccatcgaaactgacatctcaaacgaacatgatccacgtgatgccttaaaggattctagttcgccggatgcggatgttttaaggaataagacaactgaaggcttaatttctttgaataataaagccgagaacacaatgacaggattggatgattctgaaagtcttaagttggcacggccagcgagttcatatcaggaagcgctgctcaatcgcctacaggatcagttgaatcagttcgttgttggcttgcccctggacttgggcttctccaccttgaactatatatgcagcaccattgtggacctcggagtggtgaggtccaagctaataccggatatgtcgcgtatgagttttctgcttcgatcgagtgatgattgtcagaataccagtattccactgacgcaggcggagcagttatggaacactaccggattttatcaggatcgacccactgtcttgttcatcaccggctggacaacgagcattaacaattccaatagtggtcccgtggcaaaagcttatctttgtcgcaatgataccaatgttttggtaagtcggtattaaacctattcatctacaggcataaaaagtttcattaaatataaaaacatactgatagaataaaagagagagatatttatctttaaaaaagttaacctcatatacatacaatttaccttgagtatatcactttcaagtcattacaaatacacctctatttagattctagatgctgcgaacttcatagacaccctgtatacatggtctgccctgaacacagaggttattggagattatctggccaaggcgctcctccggctgaatacgagctatgtgaccaaacagttccatttggtgggtcacagcttgggcgcccaaatagccggttcagcgggcagaaactatcgacgattgtctgggggacaaatcctgaagagaatcaccggattggatccggctaacccatgtttttacgatggcaatgagctggagggtctgcggagtggcgatgcccgatttgtagacattatccacaccaatcccggcatgtttggcacatcgaagcgggccggcgatgctgacttctttgtccagggacggattcccttcaagccgggatgcgagagccttgaccccattagctgttcgcatcagagagccgtggattactggacggaaacggtgtatccgtcgaatgggaatgacttcctggccaagcgatgtaagcgctattcggaactccttctcggaaactattgcaagaacacgaataccgtgatgggctatgccgccaaggccacggatctgggcctgttctacgtgggcgccaatccagaggagccctatggccaaaatgccaatctgcagagctacacaaactccgacacaaaatgtggatcttgtgcatcatgaatattcgtacatgtattcttatagtagtattattaaaaacgaaacgcaataaaaaactgttatccgcagcaaagtcttatgttatattgttaagatgttgatgttacataatctgtacctttttacaacgcctatatcaaccaaagtaatctaatattattcgtaaacgctgagagattttacctgataatttcaaggacaagtcccagttgagcccccgccccctccctcttccggagaatttagagctccgtgatttgtgtaagaaatcgccgaaagctgatgtcaacgccaagttaattcttttgtgacgtctttttgtttggggcacactaaaaattgtccagggcacgttgacggaatgacaatggcttggagattgggagccgtaatgggggaatacggaatgggaaataagtggtgagcaatgggtccgcattaatatggccattaatatggccctgttgtcgtaaccggaggcactatttgatgttaagtacgtgagaattgaccttacactgcaacattacatactagagctttaaatttcaaaaatgagcagataagaaacaaaaaagagatatcagaatttaataaaaggtttgcgaaacaaaaacccacaagtgggattgttgaaatttgtttatatagatactttaggataaataaaaatgtaattaaataatatttaaattatttaactcatttattatgtatatatttttttattatttatatacataagtttattctaaatatatgatttaccagtgtattttttgatacactactgatggcacgggccattgtcggtagagtgaggaattgtgtaaactgaaagatcgtttatgccattatcagttaaaaactgcacgtggcgatggtggggatcaagaaaattttggggaattccaagaccatttgccatttgtttgctgagattaaaacataatctgtttttggtgtatgagaacaattgaattagaggtcaaattttgta

SEQ ID NO: 27251 - DNA, 1104 bp, DROSOPHILA
atgacaggattggatgattctgaaagtcttaagttggcacggccagcgagttcatatcaggaagcgctgctcaatcgcctacaggatcagttgaatcagttcgttgttggcttgcccctggacttgggcttctccaccttgaactatatatgcagcaccattgtggacctcggagtggtgaggtccaagctaataccggatatgtcgcgtatgagttttctgcttcgatcgagtgatgattgtcagaataccagtattccactgacgcaggcggagcagttatggaacactaccggattttatcaggatcgacccactgtcttgttcatcaccggctggacaacgagcattaacaattccaatagtggtcccgtggcaaaagcttatctttgtcgcaatgataccaatgttttgattctagatgctgcgaacttcatagacaccctgtatacatggtctgccctgaacacagaggttattggagattatctggccaaggcgctcctccggctgaatacgagctatgtgaccaaacagttccatttggtgggtcacagcttgggcgcccaaatagccggttcagcgggcagaaactatcgacgattgtctgggggacaaatcctgaagagaatcaccggattggatccggctaacccatgtttttacgatggcaatgagctggagggtctgcggagtggcgatgcccgatttgtagacattatccacaccaatcccggcatgtttggcacatcgaagcgggccggcgatgctgacttctttgtccagggacggattcccttcaagccgggatgcgagagccttgaccccattagctgttcgcatcagagagccgtggattactggacggaaacggtgtatccgtcgaatgggaatgacttcctggccaagcgatgtaagcgctattcggaactccttctcggaaactattgcaagaacacgaataccgtgatgggctatgccgccaaggccacggatctgggcctgttctacgtgggcgccaatccagaggagccctatggccaaaatgccaatctgcagagctacacaaactccgacacaaaatgtggatcttgtgcatcatga

SEQ ID NO: 27252 - protein, 367 aa, DROSOPHILA
MTGLDDSESLKLARPASSYQEALLNRLQDQLNQFVVGLPLDLGFSTLNYICSTIVDLGVVRSKLIPDMSRMSFLLRSSDDCQNTSIPLTQAEQLWNTTGFYQDRPTVLFITGWTTSINNSNSGPVAKAYLCRNDTNVLILDAANFIDTLYTWSALNTEVIGDYLAKALLRLNTSYVTKQFHLVGHSLGAQIAGSAGRNYRRLSGGQILKRITGLDPANPCFYDGNELEGLRSGDARFVDIIHTNPGMFGTSKRAGDADFFVQGRIPFKPGCESLDPISCSHQRAVDYWTETVYPSNGNDFLAKRCKRYSELLLGNYCKNTNTVMGYAAKATDLGLFYVGANPEEPYGQNANLQSYTNSDTKCGSCAS

SEQ ID NO: 27253 - DNA, 3378 bp, DROSOPHILA
atgaaagttaaggaaagcattcgattgaagagaacttaacaacgctgagcttttaaatctgagtaaaaaattaacaattgaaaggattgtgtaaataggagcgggagctccttaccccaaagttgagctacttatttgctttcagtgtaggctgagcggaaagaaccagatgatgatgacgatgatgctatggaaactgggtgacgttgttgtcgtcgtcggcgggttgctgttttccttgccgctccgataaagcgaaatccaagtaaatgcgatacgggcgtgtcatgacttcagggaggcgttgtttagtgggtggcaatgggtggccatggttagctatgggtggcttggggctgttgggggtgcaagactgccgccgttgtcaacgtcttcgtctttggcatttcgggccgtctttgtctgcttctgctgttgcgctcctctgcccctcagctcctccattcagtgtcctcttttccattcgtttttttttctttttttttggctttgtagtgctcaagtggcatcgttgaaaggcagggcagttaaggtggagagttggagccaggggggagtcggtggagcggggatggaacaaaggtccattgtgaaaagttttcgctacttgcagcggcaaatgcaaaaactgttaacaatagaaataatacaagaagaaacgggcaaagaaaacgccgagcaaggtggggggttaagggggtggtgggttggattattgcagggagaaggacgtgggacgaaggacgaacaggaagcaggcataaccagaacggagacttggccggagtcaaaagttgagcaacagcaacaacgttgactaaaaattaaacaataaacaatggcggagcgactatagattacttcctgttttggctgccattttgtgggggtgctgcgaaaataaaggggataaaatggagccaggaagggcgctttttttattttttttattaatttatttattaaggcatacggggaagtcttgaatcccctttgtgtccttcttatctattaattcagcccatttgggctcgccggctaactatagttagctttttcaaatttacagtaatttaactacaattacataacaatcacatataacaaataggatttaagataagcgtcagcttctgcggacccttgtcaaaggagatcgggtaatgagatccctcggttgccttctattgagcctccttggtgggcgagatctgtttaaagcgctggccagccgatttctgtggcgctccagcctgtcatggtatctgctcgagtgcttgtttatttcgtcaaataccgttgcgagtttcaggtctctgtgcagggtggtgtttcgaacaaaccactcgcagccggtgatgagtcttgctaccttattttgaatagcctggatccttttgatgtggctgtcgcaggctaagccccagatttggcacccatacttccagtttggtgctaggatctgtttgtaaattgtcagcttgttggatagcgacaatttactgcgcgaagaaagtagccagtagtgcttcgccaccttagcacgtaggcgcgttctgatgtcggtcacatgcttggaaaatgtgagtctgcgatccagaagcactccaaggtactttgctgcgttcggctgtggtacggggacttcctcgatgtagacgggcggtggcgttctccgctttaaagtgaagcagacgttgttggatttactgctattgatgccaatattccatcgtcttacccattccgagaaccggtatgcaaagtcctggataccatcggcttgcgtcgtgctcgcatcgggacctgtaggtgacgcacacgtcatcggcaaatgtggccaacatagatttcccgtaaaggcttacatctggctgcggcatgtcgtggctatacaggcagtagagcagggggccgaggacactaccttgtggaacaccagctgccacgttgagctcggtggaaattgctgaatgaaagcgcacagcgaacctccttccttccaggtacgatttcagcaacccaaaatatggagcaggcagcgtctgcttgattttcagttggagtccaatgtgccacactcgatcaaacgcttctcgaatgtccaagaagaggctgttacaatattccttactgtcgtaggcagtcagaatttgctcgacgactcgatggagctgctcgacccccttaaaaaagggggttaagtgtgagcttggctaggggaaattctcttctgttctccttttttttcgttattttctcgttttttttttgtgtttttgctgtcccaactgactgacggcctgtttaggtgtggctagttgcccgcttaagtggttttcccaccagcccaccatttctccaccatattttccacgccgacccctttggaaaaatcccccccccccccaccaaaggccatgcacagttgtgtatgcaaatcaagttgtctgcgtcgggctgaaagctaaactgattagtgtcaacttgctggcagtcatcaagtggctactggagaaagtcgctggattattgtgggtggtgcagcggtggatgcagggttgtcgccaacacagagagttgctcggttgcaaccccttttcccagcgctttctaagctgttttttgcggttcctgctggctgtcaagtgtcgtaagcgtttgatccttgatcttgtgcgctaaaaaatagaaatgaaatgctaatgctgccaaggatatataaatgtagatacacatggattagatggctacaaagcccaatttccggtagatcttttcaacatatcattatgaaaaatgagatattaaacgttagaaacgatttttttcgaaatacttgaatttgtgaaaattcagcttgcaaaattatctcacatttctgaatctttctcgtttgccatatattttccgtctgctatccgtttttttttttcacttcaagttgccaagacttatgggtagagatacatcctgaatatgtgccacatatatatatctgtttattttccgcatgtgcttgtgccacatgcattcgaatgcagatatagtgtatatataaattaaaaaggcgccagtccgaatgttttcacaggcagttgtcgttgtccttgttgtgattttctggtcttatcaacggggccattgcctggactatagcaccaccggaattgttattgttggtggtgctggtgctgccgctcttatcgccatccgtttgctcagagggcaaaaaaggagaaaaatccgctttagaaaaaaaaaaaaggaggaggaatttacagcgtacaagttgcacataaaccaaaattaatacccatataagttacaaacagtttgagtacgaggtgtacgagt

SEQ ID NO: 27254 - DNA, 1243 bp, DROSOPHILA
atggtgggctgctcacacttaacccccttttttaagggggtcgagcagctccatcgagtcgtcgagcaaattctgactgcctacgacagtaaggaatattgtaacagcctcttcttggacattcgagaagcgtttgatcgagtgtggcacattggactccaactgaaaatcaagcagacgctgcctgctccatattttgggttgctgaaatcgtacctggaaggaaggaggttcgctgtgcgctttcattcagcaatttccaccgagctcaacgtggcagctggtgttccacaaggtagtgtcctcggccccctgctctactgcctgtatagccacgacatgccgcagccagatgtaagcctttacgggaaatctatgttggccacatttgccgatgacgtgtgcgtcacctacaggtcccgatgcgagcacgacgcaagccgatggtatccaggactttgcataccggttctcggaatgggtaagacgatggaatattggcatcaatagcagtaaatccaacaacgtctgcttcactttaaagcggagaacgccaccgcccgtctacatcgaggaagtccccgtaccacagccgaacgcagcaaagtaccttggagtgcttctggatcgcagactcacattttccaagcatgtgaccgacatcagaacgcgcctacgtgctaaggtggcgaagcactactggctactttcttcgcgcagtaaattgtcgctatccaacaagctgacaatttacaaacagatcctagcaccaaactggaagtatgggtgccaaatctggggcttagcctgcgacagccacatcaaaaggatccaggctattcaaaataaggtagcaagactcatcaccggctgcgagtggtttgttcgaaacaccaccctgcacagagacctgaaactcgcaacggtatttgacgaaataaacaagcactcgagcagataccatgacaggctggagcgccacagaaatcggctggccagcgctttaaacagatctcgcccaccaaggaggctcaatagaaggcaaccgagggatctcattacccgatctcctttgacaagggtccgcagaagctgacgcttatcttaaatcctatttgttatatgtgattgttatgtaattgtagttaaattactgtaaatttgaaaaagctaactatagttagccggcgagcccaaatgggctgaattaatagataagaaggacacaaaggggattcaagac

SEQ ID NO: 27255 - protein, 169 aa, DROSOPHILA
MVGCSHLTPFFKGVEQLHRVVEQILTAYDSKEYCNSLFLDIREAFDRVWHIGLQLKIKQTLPAPYFGLLKSYLEGRRFAVRFHSAISTELNVAAGVPQGSVLGPLLYCLYSHDMPQPDVSLYGKSMLATFADDVCVTYRSRCEHDASRWYPGLCIPVLGMGKTMEYWHQ

SEQ ID NO: 27256 - DNA, 2159 bp, DROSOPHILA
aaaaaatgctaaagataaaaacgtcaacttggcttaaaacagacaccgaaccgaaattttgattatttcccacgtttctagcaaggtcactaaagttccgatatttcaaattgttccgtacccagatgaacataattatattctaaccgagcaaatattcgtttagttctacatatttgataaccaaatattccattaagataccactaaggtaatattcgacaaatatattaattatagctataattatacagctatttccgaattatatgtattacaacttttgtcatcgtgataattagtttgactctgtatttagcatataagcttaaaaatattctaatcattcagtaaaataaaattatatttattttacatatgagtattgcaattattgaattatatatatgttggagtttaaagattgcgtgtttcttggagtgtaaatatttcgcataaacttgaattatttcatcattttattttttgcatctttgcactatggttgtttctcttcgccgttacaataccgatggagcggggcgacaacgatgcgtagcctgtctagctgcacgacgatgagtcgcgacgttgtcgccgagtgtggttcgaggttattgcggggcacttagaaaaacgagcagatcagtatgcttgagttttcgcctgcgaaagcatagaaacgcgctacgctctaatgaagacgagcatacttcgacatatacatatacatatttacataatggttcctcacgttggttccacgtcccattaccgacgaagaaagcttggacggtccaccgtcgacgctgtcaacagagtggtcgaagtagcggcccaagcaatcgagggcaccagatggaagggggctagcaaagagtactgcctcatggtcacactagacatcaagaacgccttcaacacaccgaggtgggaccggatcctagaagcactaattggcttcagcgtcccagcctacctagtcaggattatccgcagctactttttagatcggatcctactgtgcgagtcgtcggaaggggtcttcaggcaccaggtcaccggtggagtcacgcaaggctcggttctcggcccgcttctgtggaacaccatgtatgacgggatacttcgcctaccgctggacgttgctcgttgttgataagcatccaggcaaggcggaggagaagtgtaaacagaacatcagggccattaaacattggctcagctcaatggggctagagctggcgccggagaagacggagttctattcatgctgcagggtgatgcggattggcaagcggtcaacagcttcgccgcagcgataaccaccgagctcagaagagccaagtgagccaggagggtccacgagtcagcaaatgcttcgtccccgcgaagcaatgcttcacggccataccgcggggggtactggatttgccctccttactgttacattgttaatcagttattcttaatcttaaatgttcaataaacgaattgataaaaagtgatggttcctcacacgttttaaaatattaaatataaatttttttagcctgatttgttattattatttttataattacattaaaaaacgtaaaagatcaacaaatgcatttaattttttattttcaaatattctttgtgtgtgaaatggtgttcataaaaaagaaaacacaaaaacacgacctttttctttggtgttccctttcacccttaattaattaattttaagacaataattttttagacaatctgtcttcaacccatacaaattgtatgaatacaaaaaattacctgcgggcgatcaatgcgtgtgcgtcagttcactagaagcgttattgcacagcaggcactcgggtattcttttgcaagtaacagaaaacacccgtaatgtaaacgacagggcagtagaagtaagatttttatcgcaagagcttactcttaagctgagattaaaagaataaagacgtgaacaatatttcaacgatttttttattcttagcattgtcgttatgaactgaattgagtaagttcgattcgctaaaacataaagattttactttataagtacaaaacattcttgtgtataatctgttggagcacgtatatatgtgcatgtttaatcataacttaatatccaggataaagagtgtcgagaa

SEQ ID NO: 27257 - DNA, 417 bp, DROSOPHILA
atggttcctcacgttggttccacgtcccattaccgacgaagaaagcttggacggtccaccgtcgacgctgtcaacagagtggtcgaagtagcggcccaagcaatcgagggcaccagatggaagggggctagcaaagagtactgcctcatggtcacactagacatcaagaacgccttcaacacaccgaggtgggaccggatcctagaagcactaattggcttcagcgtcccagcctacctagtcaggattatccgcagctactttttagatcggatcctactgtgcgagtcgtcggaaggggtcttcaggcaccaggtcaccggtggagtcacgcaaggctcggttctcggcccgcttctgtggaacaccatgtatgacgggatacttcgcctaccgctggacgttgctcgttgttga

SEQ ID NO: 27258 - protein, 138 aa, DROSOPHILA
MVPHVGSTSHYRRRKLGRSTVDAVNRVVEVAAQAIEGTRWKGASKEYCLMVTLDIKNAFNTPRWDRILEALIGFSVPAYLVRIIRSYFLDRILLCESSEGVFRHQVTGGVTQGSVLGPLLWNTMYDGILRLPLDVARC

SEQ ID NO: 27259 - DNA, 3601 bp, DROSOPHILA
agttcgatggcgcccagattattgtacatgcgcgcggtcagtgctttgaggaattccgacagcagttcggcgactcggagcgcgcctttggctacatacgcatccagatgggtgacgagatgtccaagcgcaaaaagttcatcttcctgacgtggatcgggcaggaggtgggcgtcatccagagggccaagatgtccacggacaaggcgctgatcaaggatgtcctcaacgtgagtagccaatagctagagatgccagagcccagaggcagaaatagatcctctcatctctaatctcttgcagaattttgccgtggaacttcaggcgggagtggaggccgagctggacattgagctcttccgtgaagcactgaaccgtgccggcggcgccaactacggaacgggcatccgggataactaagcggcctccaagttactttacatatacatttttttttgcaactcttaactgcttaccaaactgctcctttctctttaattattatgaattaattttatgaaatttaaaaactgtacattttatgaaatattatacaagcaattgtaacattactgggtcctcttatttatcgtataatcataatccatagtgtcattcaaaaaaggtaaaagaaaagttttcaataccaaatttcaagagcggatgcaaaatcattatcaatgccatacatttaattgtgtatatagtgggactgatgaattactttgatgataagacaaaaattttagccacctaatactgaatactgaagtggacagatatgccagaatttgcattagaaaattcaagtttctatagtaaagaaatgttctcgtttaaactagtctggttttctgaacatacgctggatggatcgattcgaatttaataagcgcgaaatgaaaatggactacgttgttgaactaaatactacggagatgatgaaaatgatgagaaaaattatctagttgctttagttcccgggctctgcctctcgcttcctagcggaccctgaagagtaccgagtgaagtgcatcgatgtccacctccacgccagacgagtttgtggtcacggtgcgagagctacggccgagaacgttgaacaatactgcttggtatctttaaagcatatcactcacctggctttgtgcaccgagcgacgggaggagtgcggattaaccagcacacagtgcatgggctggtcatcgaactgacgatggtgataggtatctacggccttctcggcatgttccagtgacttgtaaataacttcggcggtgccgggacgcaccacacgagcgtcgtacactgggccgatgtcgctaaaaagctcgcgaatatccgcagtagtcacgttagtatgcagattgctcaccagcaggcggtatccatcctttgtgttcgacgtacgcagcgacaatggggatggcgaacggcgcttgttcttcgatggagcagctgcatcaccatcactatcagtaccgctatcgctatcactaccaccaccgccaccaacagcctttctccggttctcgttggcgtagatgccatgagaaatgtgaggatctctcttaccgacaaacagacgagaccgcagcgattctgggagtttacttgtgcttgctgtgtcgcggtggcggcgctcgagaggctccttggtggtatttgagcgtccaactacgagtcggttggtcagcgaaggacgctcaatgcgattgcgggccgcctcgtaaatggagaatgcattgttatctattttgttatttagtggggccatggacatctccacgtcgtcgccgcggttcaggtcgagcccaccaattgagtagcgtggcgacgcttgcttcatttgccctaagtgcagtgtgcgagatatttcctctgaaagtagaagagtgctttttaggaacggcttggcagagaaaggcactaactaaccatcctcgaggtcctgcatattatcaagatcaatatagcgtcgtggagcaaagggtttgcccggcttatgggatctggggtcaaaggttcgacgcaagccggacaacatgtggttacccagttcaacgaccccgtcgtccgagtcccatttcgcctgaatggtgccgtccgcatggtttgacatgctaaggcggtgaccaaactgaccgatgtgcactccctttccgcgtgcgcgatgtgatggctcaaacgactcttcttcgtcatcaataagtattgggcccgccgaacgggccttctttcgctccagcaacagttggcgggcatcgatgcccgagtcgcgcacgctcttgttgatcagatcccgggcatcggctatcttggcccgtgtcttcgcggcgatcgtgtttctggcatcgaaggtgcgctttgccggcgtatcagagtgagatcctcgggcacccgatggcttgaaaaaaggcttgttcagcagctggcgcggcttggagaagttcgcattgctgcaatggaaaacgcattgagtgacattctattttttcggctgtcctgtaaatgtacttacaactttctgtcgaggggacgatagccgcgttgcccgcgcttccgctctataatctcgtccagactcaaatcgatgtccatggctcacagtatacgcttttcacaccttttcctaagctatgtgtgaagtaaaaacaaccagattcaaattatcctgactattcgaactacgttcgtaaaaaaaaaataggactggcgtttcactggtgacacttggggtggcaaactatcgtccagcactatcgatagcaactatcgcttaaaaacatctatgttattctggatataaaatgtaaaaaagaaacagcaatatactaacacttatacaaatatacgattaatactattaaactacttgttcatttacaaaaacaatttttgcatgtcttaacattagtttgtagaagattgaaaattctcagaactgtcaatgatatattaagctacataatacgttttatccactgacattacgagtcactaattcacagtgtgccccttcgcacaaccgagaacaatcgcgcttaggtgctagccgacgtctggtctggtaacactgatacctgcgcaacaacaaaaacaacaccacatactaaaacaaaaacctccgtgtgctcttcagtccttgaacgctcaccgggactgccattgtatgacttcgatgaacagaatttggcttcacactctcttccttcagtgtaggccatgagtgcgcctcttttcaccctttagtcgctttttacgacaagccgggaacgctcaggtagtattcttcactcgccaccacacaggacacctgttcgggtttagccaccttctctgttggccatctcgtctgatcggacacgtttaatcattttaatgattagactgtgtcccagctcccatgcctcgctctttgccaatatagctgcgaacaagccactagggctgaacggagcacctgacttcgtctttagctgctccctcttcatcgcaaacctggagcagtgcattagcacatgctcttctgttttctcacaaatgacgcagaacaatcgacgtagataggcccgaatgcagccatggtccgtgtgaaact

SEQ ID NO: 27260 - DNA, 1426 bp, DROSOPHILA
atggacatcgatttgagtctggacgagattatagagcggaagcgcgggcaacgcggctatcgtcccctcgacagaaagttcaatgcgaacttctccaagccgcgccagctgctgaacaagccttttttcaagccatcgggtgcccgaggatctcactctgatacgccggcaaagcgcaccttcgatgccagaaacacgatcgccgcgaagacacgggccaagatagccgatgcccgggatctgatcaacaagagcgtgcgcgactcgggcatcgatgcccgccaactgttgctggagcgaaagaaggcccgttcggcgggcccaatacttattgatgacgaagaagagtcgtttgagccatcacatcgcgcacgcggaaagggagtgcacatcggtcagtttggtcaccgccttagcatgtcaaaccatgcggacggcaccattcaggcgaaatgggactcggacgacggggtcgttgaactgggtaaccacatgttgtccggcttgcgtcgaacctttgaccccagatcccataagccgggcaaaccctttgctccacgacgctatattgatcttgataatatgcaggacctcgaggatgaggaaatatctcgcacactgcacttagggcaaatgaagcaagcgtcgccacgctactcaattggtgggctcgacctgaaccgcggcgacgacgtggagatgtccatggccccactaaataacaaaatagataacaatgcattctccatttacgaggcggcccgcaatcgcattgagcgtccttcgctgaccaaccgactcgtagttggacgctcaaataccaccaaggagcctctcgagcgccgccaccgcgacacagcaagcacaagtaaactcccagaatcgctgcggtctcgtctgtttgtcggtaagagagatcctcacatttctcatggcatctacgccaacgagaaccggagaaaggctgttggtggcggtggtggtagtgatagcgatagcggtactgatagtgatggtgatgcagctgctccatcgaagaacaagcgccgttcgccatccccattgtcgctgcgtacgtcgaacacaaaggatggataccgcctgctggtgagcaatctgcatactaacgtgactactgcggatattcgcgagctttttagcgacatcggcccagtgtacgacgctcgtgtggtgcgtcccggcaccgccgaagttatttacaagtcactggaacatgccgagaaggccgtagatacctatcaccatcgtcagttcgatgaccagcccatgcactgtgtgctggttaatccgcactcctcccgtcgctcggtgcacaaagccagctctcgcaccgtgaccacaaactcgtctggcgtggaggtggacatcgatgcacttcactcggtactcttcagggtccgctagg

SEQ ID NO: 27261 - protein, 474 aa, DROSOPHILA
MDIDLSLDEIIERKRGQRGYRPLDRKFNANFSKPRQLLNKPFFKPSGARGSHSDTPAKRTFDARNTIAAKTRAKIADARDLINKSVRDSGIDARQLLLERKKARSAGPILIDDEEESFEPSHRARGKGVHIGQFGHRLSMSNHADGTIQAKWDSDDGVVELGNHMLSGLRRTFDPRSHKPGKPFAPRRYIDLDNMQDLEDEEISRTLHLGQMKQASPRYSIGGLDLNRGDDVEMSMAPLNNKIDNNAFSIYEAARNRIERPSLTNRLVVGRSNTTKEPLERRHRDTASTSKLPESLRSRLFVGKRDPHISHGIYANENRRKAVGGGGGSDSDSGTDSDGDAAAPSKNKRRSPSPLSLRTSNTKDGYRLLVSNLHTNVTTADIRELFSDIGPVYDARVVRPGTAEVIYKSLEHAEKAVDTYHHRQFDDQPMHCVLVNPHSSRRSVHKASSRTVTTNSSGVEVDIDALHSVLFRVR

SEQ ID NO: 27262 - DNA, 1889 bp, DROSOPHILA
cgatcagtgcgaccgggcgtacaacaccaaacgcagcctgcagagccatcgccgcctaaagcacagcgaagccaacggcggaagtctggacaaatccgccagtgaacgcaatagcaagaagcggaaaggtccgccgaaggtgtacaaatgcaacgaggaagcctgcaaccagacatttcgcaccgaacgcgatctgcgcggccatcgctggaagcacacgggaatcttctgcgacatttgcggcaaacccttcacccagtcgggcaacatgatgcgccaccgccagcgacacagtggcatcaagccgcacaagtgtccggaatgcgacgcgaccttttacacgcaaaaggagctctcctcgcacagtatctgccatactggtcgcatgccctgcatctgcgaggtgtgcggacgaccttgccgagatcgaggcgttctcacggcgcatatgcgtcgccatacgggcgaaaggccggccaaatgcgaggtgtgcggcaaggcattctatagctttcatgacctcaatgtccatgctgtatcgcataccaatttgcggcccttcgtctgcgacgtttgcggctccacgtttcaacggaagaaggcgctgcgggtgcacaagctgctccactctgagcagcgcaagtacgcgtgcaaattgtgcggcaagacgttcgcccagtccggcggtctaaatgcccacatgcgcagccatgatccggcgagagttaagggagctgtgaagccgctgccgcaatcggtcaccatcgaggtgatcgagggcaagagtccgcccaccaccaccatcaccatggccatcgacctcaatgtggaggagcagctggtaaagcaaaccgagactgcacccaccacttggcgcctggccaactgagtagctagctaggattaatataaggttagatgtagttcatctataagttccaaattgcgccataataaatgagagaaatcagaagattggaaatgaattaataatcgtaagaaaccagaaggcagatgcataaaacgattgatttgcggtacaaaagtgtcctttattggggtttcctaaacggagagggttccaagctgtcagcgatccaagtccagatgagtctgggctctaatccttgccagcgtgtgcattctacccgggattcttagctctaaacatgtagttcgtatcgctatggactaagttaagtattgggataaaataatacatacagcctttgttgtttttttttttttttttccaaacgaaattgatgatcataaacggaggcttttgcgttaaaggttaaaaaaatatattcccgccccttcgttgttttcaaaaaaggtacatattttatattctatgcgctggtcggttcactcattactagtttttcgaagcgataaactgaagaattaaaacctagcataattctagatgcaatattaagtaaactagtttaaaatagggctgacatttctgccaaatggacgtactcagttacaaatatagttaaaatcaatcaaattgacgagaatgttttgaaaactaaagattaattaagcactgaaaatgcattgataaggtatcacgggtaaacccaagaccaactaagttttccaattatagacctatgtatttacgtgatctgcattgacttttgttcactagaaccaatagtaagtaatagtatagcactagaaatacaaatagagaataagagatagttctaggatactaggctaatatcgattagtatttgaatatcatcaagattgcttaatgtgatgcttgctagacggtgactattagcggtctctcgtatactatatatatataggtctatataaaatatatatacgtgtgtgtcagctatcgggtattgcatattgtt

SEQ ID NO: 27263 - DNA, 621 bp, DROSOPHILA
atgatgcgccaccgccagcgacacagtggcatcaagccgcacaagtgtccggaatgcgacgcgaccttttacacgcaaaaggagctctcctcgcacagtatctgccatactggtcgcatgccctgcatctgcgaggtgtgcggacgaccttgccgagatcgaggcgttctcacggcgcatatgcgtcgccatacgggcgaaaggccggccaaatgcgaggtgtgcggcaaggcattctatagctttcatgacctcaatgtccatgctgtatcgcataccaatttgcggcccttcgtctgcgacgtttgcggctccacgtttcaacggaagaaggcgctgcgggtgcacaagctgctccactctgagcagcgcaagtacgcgtgcaaattgtgcggcaagacgttcgcccagtccggcggtctaaatgcccacatgcgcagccatgatccggcgagagttaagggagctgtgaagccgctgccgcaatcggtcaccatcgaggtgatcgagggcaagagtccgcccaccaccaccatcaccatggccatcgacctcaatgtggaggagcagctggtaaagcaaaccgagactgcacccaccacttggcgcctggccaactga

SEQ ID NO: 27264 - protein, 205 aa, DROSOPHILA
MRHRQRHSGIKPHKCPECDATFYTQKELSSHSICHTGRMPCICEVCGRPCRDRGVLTAHMRRHTGERPAKCEVCGKAFYSFHDLNVHAVSHTNLRPFVCDVCGSTFQRKKALRVHKLLHSEQRKYACKLCGKTFAQSGGLNAHMRSHDPARVKGAVKPLPQSVTIEVIEGKSPPTTTITMAIDLNVEEQLVKQTETAPTTWRLAN

SEQ ID NO: 27265 - DNA, 4417 bp, DROSOPHILA
aactcactggctgtgtaatctttcgaagctcctacagccgaaaagtatgcattaccggcgttcgcagagatcggcctcggaattagggttaaattccagctcaactcatatcttcggagagcccaggtagcccgccgtagaatcacgtgattcaccgagacccatccacttcgacatttaaacgactcacaatgattctcaaaaacgaacgcagtgccccatgatgtttccagaagctcatattatcgaaatctatattttatgacaccgtgacagtgcctgcattagtggctcgcaaccctttttaaacgacacacaatgattctcaaaaacgaacgcagtgcccctcctccattcattttccaaaagctcattatatcgaaatctatgttatgacaccgcgacagtgcctccattattggctcacaacctttttgaaacattttccgaatgattttcctatgacctctaagatacgaacgtgcacacattcaaaatcggggagctttaggttttcaagattttgagatttttgaacttttgaaaaagtctatctacatactcgtagttatttttagagatatactacagaggtttactaaaggctagttactagtttgcaagaacagtatccctagtagatcacatagcagcagatcaagtatatatcatccattaagcatacaacactgtaatctcttccgatctgtgcgggaagtgatgccatcgtgggttcatctgatcatccgaccgatcgcattcccgccacgcgatcgactgatgctgcccgttccgaagccaagtttggatatacggtgaatagtgatgtatgtacatacatacgtccggagcacttggcttgcactttgtgcccaagttcgcctcgccgtcgacgtcgctgccgggttcatcgcttacaccttgttaaagtcgaccgcagcgcggcgatttattcgttttgtgcaaccgcatcggaagatacgcgcgtgcacctgctccaccttttacacctggccaagcttccgccacctaacccagttccacctggcccagcccacagctatccgggcatcaattagcgcccgctgcggaggttgacctctggcggattctttggccagtcatcgggatcgaatcgaatcgaatcgaatcgaatcggatcggatcggatcggagttgattagacaacggaccccggtcttatcgagtgcttatcgctcccccttcccttgacattgaataggccttcaaatagtctgcattcgggcccagaccatcagttgcctccaggccctcggtgagtcctcacgcagctcattctgaccaaccaatcaccaaccatacggagtcgatgagtcccccggtgatctatgcaagccaaagggcaaggtcactgaaaattcccgcacatcctaaagctgatagcattttttttgtttttctcactgtgcaactaacaactaagaagtagagaacccctataccattctcactttatagtttagcagtaaaagcaatgcatttaaggaagctataactatttctagttcatttagttccctttgataaagttttgacagttgaaaaaagttacttagtgaaaaaaacaagtagaaattcctggatatccacagagccacagagtaatagtcttaagtggaattcaaagccagagtaagcctaaccagatccgcctttcatatgtgcccacagatcacaccgccctggatctcataatcaagtcactcaagtcgcctacaatggtctgcgagggaacccactttgacggcaagattccgcacacgttcgtcatctttggggcgtcgggcgatctggccaagaagaagatctaccccacgctctggtggctctaccgcgatgacctgctgcccaagccgaccaagttctgcggctatgcccgttccatgctgaccgtcgatagcatcaaggagcagtgtctgccgtacatgaaggtgcgttcgggatttggtcataggccatttgcatcgcattaacccaacccattgccacacaggtccagccgcacgagcagaagaagtacgaggagttctgggccctcaatgagtacgtgtccggcagatatgacggacgcactggcttcgagctgcttaaccagcagctggagattatggagaacaagaacaaggccaaccgcatcttctatctggccctgccgcccagcgtcttcgaggaggtgactgtcaacatcaagcagatctgcatgtcggtctggtgagtataagatcaagatcaagatccagatgcatttaatttgaaacccgatacttatgtacacctataacccgttcgcttgcagcggttggaaccgcgtgattatcgagaagcctttcggccgggatgacgcctcctcgcaggcgctgagcgaccatctggccggtctgttccaggaggatcagctgtaccgcatcgatcactacctgggcaaggagatggtgcagaacctgatgaccatacgcttcggcaacaagatcctcagctcgacgtggaaccgcgagaacatcgcctccgtgctgatcacgttcaaggagcccttcggcacgcagggtcgtggcggctacttcgacgagttcggcatcatacgcgacgtgatgcagaaccatctgctgcagatcctctcgctggtggccatggagaagccggtgagctgccacccggacgacattcgtgacgagaaggtcaaggtgctgaagagcatcgaggccctgacgctggatgacatggtgctgggccagtacctgggcaatccgcagggtacaaacgatgatgcgcgcacgggctacgtggaggaccccaccgttagcaacgattcgaacacgcccacctacgccctcggcgtgctcaagatcaacaacgagcgctggcagggagtgcccttcatcctgcgctgcggcaaggcgctgaacgagcgcaaggcggaggtgcgtatccagtaccaggacgtgcccggcgacatcttcgagggcaatacgaagcgcaacgagctggtcatccgcgtccagccgggcgaggccctgtactttaagatgatgaccaagagccccggcatcacgttcgacatcgaggagacggagctggacctcacctacgagcaccgctacaaggactcctacctgccggacgcgtacgagcgtctcatcctcgacgtcttctgcggctcccagatgcacttcgtccgctcggacgagctgcgcgaggcgtggcgcatatttacgcccattctgcaccagatcgagaaggagcacattcggccaatcacctaccagtacggatcgcgcggtcccaaggaggcggaccgcaagtgcgaggagaacaatttcaagtactccggctcctacaagtggcacggcggcaaggcggccacgtccaatcactgagcgtttggagcacaccaatccccgggctgggttcgcaggatactcctctctgtccgcacgtacatgtacatacatacatatatatgtatatatacatatatgcattctttggttatttgtaattcggtctgtacaagatttttttttattaaatatacaaaatagtgtttagctggagcagaacgatcttctaactcataatcccggctagttcgatgtgtatgtggtgatgccgatcgcatgcgtgtcgatgtacataaatagatccttcataggatggcagatgggtggcaaacgtaaccctacggttgtaatactaactaaataatgagtatgcttctggtcagtgggcttcggtgctgagccgggctagttactagcggctcctctcgaatatagatttacaggcgaactacaacaagagcgggcagcaatcttcccgagagatttcagcgcacgggtggcggcttgatgtacccatcgccgcagggcgcgcctattgcgctcatggacacatactgattggttacgtacgcatcggcctggggcacgggctgtggtctgggcacctcctgcagctctatctccggccacctcgtgggctcctcttccgcaaatgtcacggttttgcgcactgtgccgtagaacttctccggcggaacattggcgggatagaacaggcgtacatcgccaagtggatttgctgtgggctcttcgctcatcactggcagttcaacccggatgtccgccatttggcgcagcttctgaatggccaagacgagcgacccaagcaccagcagagcgatggtgccctccacgtaccgcaagatctttggcttctcgggcacctcgctgtcaccggaccaccagcgcatcccggtggtcaggccgtcgctgtagttggccgccacagccatccggatcacgccctggattccggagaaattgtacgccgtctcgcgggcgtaggtcgtctcgatggaggaactatcgtcgcaggc

SEQ ID NO: 27266 - DNA, 1854 bp, DROSOPHILA
ccttttacacctggccaagcttccgccacctaacccagttccacctggcccagcccacagctatccgggcatcaattagcgcccgctgcggaggttgacctctggcggattctttggccagtcatcgggatcgaatcgaatcgaatcgaatcgaatcggatcggatcggatcggagttgattagacaacggaccccggtcttatcgagtgcttatcgctcccccttcccttgacattgaataggccttcaaatagtctgcattcgggcccagaccatcagttgcctccaggccctcgatcacaccgccctggatctcataatcaagtcactcaagtcgcctacaatggtctgcgagggaacccactttgacggcaagattccgcacacgttcgtcatctttggggcgtcgggcgatctggccaagaagaagatctaccccacgctctggtggctctaccgcgatgacctgctgcccaagccgaccaagttctgcggctatgcccgttccatgctgaccgtcgatagcatcaaggagcagtgtctgccgtacatgaaggtccagccgcacgagcagaagaagtacgaggagttctgggccctcaatgagtacgtgtccggcagatatgacggacgcactggcttcgagctgcttaaccagcagctggagattatggagaacaagaacaaggccaaccgcatcttctatctggccctgccgcccagcgtcttcgaggaggtgactgtcaacatcaagcagatctgcatgtcggtctgcggttggaaccgcgtgattatcgagaagcctttcggccgggatgacgcctcctcgcaggcgctgagcgaccatctggccggtctgttccaggaggatcagctgtaccgcatcgatcactacctgggcaaggagatggtgcagaacctgatgaccatacgcttcggcaacaagatcctcagctcgacgtggaaccgcgagaacatcgcctccgtgctgatcacgttcaaggagcccttcggcacgcagggtcgtggcggctacttcgacgagttcggcatcatacgcgacgtgatgcagaaccatctgctgcagatcctctcgctggtggccatggagaagccggtgagctgccacccggacgacattcgtgacgagaaggtcaaggtgctgaagagcatcgaggccctgacgctggatgacatggtgctgggccagtacctgggcaatccgcagggtacaaacgatgatgcgcgcacgggctacgtggaggaccccaccgttagcaacgattcgaacacgcccacctacgccctcggcgtgctcaagatcaacaacgagcgctggcagggagtgcccttcatcctgcgctgcggcaaggcgctgaacgagcgcaaggcggaggtgcgtatccagtaccaggacgtgcccggcgacatcttcgagggcaatacgaagcgcaacgagctggtcatccgcgtccagccgggcgaggccctgtactttaagatgatgaccaagagccccggcatcacgttcgacatcgaggagacggagctggacctcacctacgagcaccgctacaaggactcctacctgccggacgcgtacgagcgtctcatcctcgacgtcttctgcggctcccagatgcacttcgtccgctcggacgagctgcgcgaggcgtggcgcatatttacgcccattctgcaccagatcgagaaggagcacattcggccaatcacctaccagtacggatcgcgcggtcccaaggaggcggaccgcaagtgcgaggagaacaatttcaagtactccggctcctacaagtggcacggcggcaaggcggccacgtccaatcactgag

SEQ ID NO: 27267 - protein, 517 aa, DROSOPHILA
HTALDLIIKSLKSPTMVCEGTHFDGKIPHTFVIFGASGDLAKKKIYPTLWWLYRDDLLPKPTKFCGYARSMLTVDSIKEQCLPYMKVQPHEQKKYEEFWALNEYVSGRYDGRTGFELLNQQLEIMENKNKANRIFYLALPPSVFEEVTVNIKQICMSVCGWNRVIIEKPFGRDDASSQALSDHLAGLFQEDQLYRIDHYLGKEMVQNLMTIRFGNKILSSTWNRENIASVLITFKEPFGTQGRGGYFDEFGIIRDVMQNHLLQILSLVAMEKPVSCHPDDIRDEKVKVLKSIEALTLDDMVLGQYLGNPQGTNDDARTGYVEDPTVSNDSNTPTYALGVLKINNERWQGVPFILRCGKALNERKAEVRIQYQDVPGDIFEGNTKRNELVIRVQPGEALYFKMMTKSPGITFDIEETELDLTYEHRYKDSYLPDAYERLILDVFCGSQMHFVRSDELREAWRIFTPILHQIEKEHIRPITYQYGSRGPKEADRKCEENNFKYSGSYKWHGGKAATSNH

SEQ ID NO: 27268 - DNA, 3377 bp, DROSOPHILA
catcaaaaatgtaattttcctagagatctgataatgcggtatttatgattagaatatagtgaatcattagcaaattttctagaatttgcgacacgccaaggctttctttaagtctatctctaattatactatatcttgcagtagtttagctatatataaacgtactacgcgagtgtaccgatgtctccgttctggattaagatacccttactgagcgatggactccggttgttgatatgagggtagggtacggctgatcagctcaacgactgagtacactatcactgctggtgagtaagcgggtgatgaagcccgagtcaacagagactgcagcggcgctgcttttccgcgaatcatattttgcattggcattttcttgggtaatcagcagacacacacacagaaataacacccccgcccacgttaccgttaagcggttaagaaattaacagctgagaggttcgggaacccgctgaaaacgtaaaactccagctgataatggatggtttttttcggactgtataatatcaagcttaattgaattataaacaataaacataatgccgcacacaggccagaaattggcaccccgaggcgctggaaatacgcagctcattttctcgaggcatcattagagtttgtttatacaatggcgctcaagatattagaaacgcaaacgaaaatgtgcgggcaaaggttctatttttaaaatgtttctaaatttgtttacttttaacgcgccggaaagggttgtttttaaaattagatagctgctgtaaacctttacaacaaaatattccatattttgtacgaagtttgatgtcaagaggttagttatttaatttatattgtataatcttaagcagttttcaaaatagtgtgattgaatactaccattttggacgctattgcacgcctcaacataagcaaacaaattgagtacagtgaaaccataaagtgggtttgctgtaactgaaaattctgtgctgcagaccttttgatcaacggtttgggtgttcttggaactgtcgtatccattataagtggtttcaaatgaacgctctagagatgggcacactacagagtgtcgtgtcacgaactcctgagggagaacttctatattttagctttactagtttaaaatccagtaaaatttatttgtctgagcaaatcattctatttatatttaataatataagcaaacatacttttcaactattcatcccctaaatgtttaaaaaataattaatccaaaaatctaataagtcatacattatgatggactgtaaataaaaattattatgctgacactacaacagcgcatctctagcataggcaaaatcaacaacaacaaggagctggaaagacaagtgcgtcattgtttttttggtcatcgtcggtagtttatgttgctgttgttgcacattgttttgtgcttgatccggcttatcgtccgtgcacataaaaaagcaaaaacaagcacatatgcgcataaaaaacatgcacacacgaaatacggggcaagtaaatttgattaaacgcaacagttggcggaaatttaatacacgaacggctccctaaagtaaacattaaacgaaaaattaattaagcgtaaatttagaccagggcaaaagaaaaaaacacgttcccacgccaaaagcaaacataaacagaaagaaactgggtgacggagagggtggtggggagagagacagagagagagagagggaaaaacgcagaggaagccatcgtaaattcattcacattttgcaatttctgctgcggttttcaacttgtttgcattccaatcaactggaatactggaattgcaatccctcggcttaataatgaattaaatcataccacaaacaacaacgccaaacaaacccacacacactgaggcaggcaccaatacaggcttagcgtaattgtaaaaaaatgccacttccattatccatcgtttttttttatcattttcgtgagtcaatcgatggacaaagattgcggtatttctcttccggcttcaagtttaccgttagccaattgcgactctcttttctttgcacatttcactaatcagtggacatttctgatttgattggatcagaattttcattttgatttcgttttgagctggggtttccaggaaaattccttagcacttgcacacacgcacacacgctcaggttttcgaaagcctacgtttttccattttcggaaacttactgctcgccaaatgcgcttggtgggcggcgacttaattagccagccctcgtagaaagtgcgatccattattttgcagcgctcgacgcaatttacttcgatttatttcactccactccgcgcacaccaactagaggtgggcctcacgcttgcgatagatcttccgaggcaatatcgaataagtattcgataggcttaagctaagtctaagatatatcgaaataaaagatgcgaacgcttatattcggcggaaagttattattatttatatatttgtttggtgtaagccccattgcttcaaaacttgaacttagtgtaatataccgtttgcttcaaattgttttagattagtgtgaccgtagttgacattacccaacactggcactatttataattttgagttgtaaaaattaagtatttacaatcttgtaaaaaacaaaacaaaaccttttttggttgccatatgaaacgtgttcaatctagtattttaaaaataagtccacaaatagcccatataaaatatgtatacatatttcaaaaaacacaagtatttctttgtttgaaaacaagaatttgcagataacataagtatttacctaataaatcagcataataaatccaaacaaaagctaataactaaaatcttaaaaactttaaatgcaaacgaagtatagttttacaaatacgttttattctgccgtgtcaagcgtatgcctagaacatacagattatccatgtagaatagcaatttcttccacgacgccgcacagcagagcacgaccactacccagatctcaggcggaacctgcgccacgccggaatcctgctgcagccagagcttacttgtccttgctgtcgcccttgccaccacggatcctaccggtacgacgggcagcgatgagaccgaccttgcgaccggcggatgtgcctcgcttgacggtggaggccttaccaatgtgctgatggttaccaccaccgtgaggatgctccacggggttcatggccacaccacgcaccttaggccagctgttgcgcttcaccttgtacttgtggtaggcacgaccggccttcaggatgggcttgtcgatacgaccgccgccggcgacgatgccaaccatggcgcggttggccgagggcacgaccttcttggcgcc

SEQ ID NO: 27269 - DNA, 728 bp, DROSOPHILA
cgcaagcgtgaggcccacctctagttggtgtgcgcggagtggagtgaaataaatcgaagtaaattgcgtcgagcgctgcaaaataatggatcgcactttctacgagggctggctaattaagtcgccgcccaccaagcgcatttggcgagcaggagccgttcgtgtattaaatttccgccaactgttgcgtttaatcaaatttacttgccccgtatttcgtgtgtgcatgttttttatgcgcatatgtgcttgtttttgcttttttatgtgcacggacgataagccggatcaagcacaaaacaatgtgcaacaacagcaacataaactaccgacgatgaccaaaaaaacaatgacgcacttgtctttccagctccttgttgttgttgattttgcctatgctagagatgcgctgttgtagtgtcagcataataatttttatttacagtccatcataatgtatgacttattagatttttggattaattattttttaaacatttaggggatgaatagttgaaaagtatgtttgcttatattattaaatataaatagaatgatttgctcagacaaataaattttactggattttaaactagtaaagctaaaatatagaagttctccctcaggagttcgtgacacgacactctgtagtgtgcccatctctagagcgttcatttgaaaccacttataatggatacgacagttccaagaacacccaaaccgttgat

SEQ ID NO: 27270 - protein, 110 aa, DROSOPHILA
MDRTFYEGWLIKSPPTKRIWRAGAVRVLNFRQLLRLIKFTCPVFRVCMFFMRICACFCFFMCTDDKPDQAQNNVQQQQHKLPTMTKKTMTHLSFQLLVVVDFAYARDALL

SEQ ID NO: 27271 - DNA, 1835 bp, DROSOPHILA
atcaggatcgatgtattcccgccaccgccggcgacatatgcacgttcggaccaacctgttggctacccggtccactgcccataccgcccataagagtcacatgcttcctatagttggtgaactgctccaggtattgtttcacggtgtccattggctcaaagatgtcgttgtgcttggcatgcagctgctgttgccccattgccgtcattattgtctgtggagcgaaataggagggaaagtccttattcacagcaatgccgaggaatccctgcagcatttcgcgtatcatttcccagcagtaggccagaatcacgcatgacttgtactcgatttcgatgaggatgcccttgaagtgctccatcatggtgacggaaccgagtttgataacaaagtcaccatactcgaaacgagcgccacgggactcgattttggtctgctttttggaggtgaaggtgttggtcatcttgagcatgagcagatcgaagatattgtcggcgacaatggccacttgtttgccggtgccattgtcgatgatcgagaacgtggaggcgggatactcggagttgtgcaggacgtggactgcgcgtccaggtgctccattgtgcggctgtggcgtcgagatgaacgtttcgcagtccaccagaaattgaccggcatgtgtggcgcccagggcgagcagacgcttgctcagctgatcgattatgtgggcacccgatttgccttcgggtaagggatacggttgaaggatagttactcccatagtttatgcaataatgtcagctttttagttttattaattttgtttacaagtcttgcaagctaaaagcgtccagtgtgaccagtgctgactttttagtcatgagaaaagttagacaaataaaaataccaaaccggcatacaattttcgtcagcaataaaataggacaacactggccacgtcgcgtgcggatttgtttataattttcggcaatgcagtttcactttaaagtcgcggacgctgaaagggacagggataatgtggctgcgaccagcaatgctgccgccaatccgcacgcagccctgcagccgcaacagcccgttgccctggtggagcccaaggatgcacaacatgagatacgattgcagttggttgaccacttttcagaggcacttcatgaaataaatagaaacccattgatacatccataacttgcaggaatatcgtggccaccttctcggtgaactgtgaactggacctcaaggcaatcaactcgcgtacgaggaactcggagtactcgcccaagcgctttcgtggcgtcatcatgcgaatgcactcgcccaggtgcacagcgctaatctttcgaacgggcaaggtcatctgcacgggtgcacgaaacgagattgaggcggacattggatcgcgaaagttcgcacgcatcctgcagaagctgggattccccgtaaagttcatggaatacaagctgcagaatattgtggccaccgttgatctgcgcttccccatccgcctggagaacctcaaccacgtgcacgggcagtttagttcctacgaaccggagatgtttccaggcctaatctatcgcatggtcaagccgcgcatcgttctcctgatcttcgtcaacggaaaggttgtatttacgggcgccaagtcgcgcaaggacattatggactgcctggaggcgatatcacctattttactaagttttcgcaagacgtagttgtttctacacatccaaatgtttttgtttagcttagttatattccataactacaatatttttaatatatttaccttaacttttttagtataaaatgtgaaatgaaacaacttaattaat

SEQ ID NO: 27272 - DNA, 835 bp, DROSOPHILA
cactggacgcttttagcttgcaagacttgtaaacaaaattaataaaactaaaaagctgacattattgcataaactatgggagtaactatccttcaaccgtatcccttacccgaaggcaaatcgggtgcccacataatcgatcagctgagcaagcgtctgctcgccctgggcgccacacatgccggtcaatttctggtggactgcgaaacgttcatctcgacgccacagccgcacaatggagcacctggacgcgcagtccacgtcctgcacaactccgagtatcccgcctccacgttctcgatcatcgacaatggcaccggcaaacaagtggccattgtcgccgacaatatcttcgatctgctcatgctcaagatgaccaacaccttcacctccaaaaagcagaccaaaatcgagtcccgtggcgctcgtttcgagtatggtgactttgttatcaaactcggttccgtcaccatgatggagcacttcaagggcatcctcatcgaaatcgagtacaagtcatgcgtgattctggcctactgctgggaaatgatacgcgaaatgctgcagggattcctcggcattgctgtgaataaggactttccctcctatttcgctccacagacaataatgacggcaatggggcaacagcagctgcatgccaagcacaacgacatctttgagccaatggacaccgtgaaacaatacctggagcagttcaccaactataggaagcatgtgactcttatgggcggtatgggcagtggaccgggtagccaacaggttggtccgaacgtgcatatgtcgccggcggtggcgggaatacatcgatcctgat

SEQ ID NO: 27273 - protein, 252 aa, DROSOPHILA
MGVTILQPYPLPEGKSGAHIIDQLSKRLLALGATHAGQFLVDCETFISTPQPHNGAPGRAVHVLHNSEYPASTFSIIDNGTGKQVAIVADNIFDLLMLKMTNTFTSKKQTKIESRGARFEYGDFVIKLGSVTMMEHFKGILIEIEYKSCVILAYCWEMIREMLQGFLGIAVNKDFPSYFAPQTIMTAMGQQQLHAKHNDIFEPMDTVKQYLEQFTNYRKHVTLMGGMGSGPGSQQVGPNVHMSPAVAGIHRS

SEQ ID NO: 27274 - DNA, 3459 bp, DROSOPHILA
caaggatgtcgttatcgctgttgttgattacacttcacgcgctgctaagctgacattcatttcgaaacgccagtctcaactggatgtgctgctccttttgcttttgcttttgctcctgcccctactcccacatcagttcttactagttttccaaacgaattatgtgcgtgcctgcatttggagaatgcgctccaggcacgcaactcagttgtagctccagttgcactcgcagttgcatccacgggcacaggtaatccaattatgcatgcgaggagcagctgtggaccccactcaagcgataaggtggcacgatggatatgcagatgggaaatgggaaatgggcgggcgaaaagtcaagcatcctaagcactttaagttcgcctttcccctttgtgtgtgtttagtaccaaaagttaaccaagcttaactaagcgaggacggcacaaggatgggtttgcgagcattggcagggccaaaggttgagtatccttggaaaaactgcgaactagaaatctgagagtccattatgaggattgtggtcttagtgtgcaggaattgaacgagttcgtaatgcggctaattgaaaggttcaagggcagaaaaggactgaacaataaacaaaatcacttccgctcactagtagtcaaagaataaattaataaccagctctattataccatatggcatcaattttaaaccgaaatcaaaaattttaataaataacgatgtatttaaattaaatcggacgctagaaaattaaccttatcagtcactctaaacattataatgactctaatccaaggatactatatttagatgcagtgttcaaaggcattctcaaactataacataactccaaactgcgaatgaaaagttgctttaaactaaaaaggagttccagatttttcacattcactagtcttgatggagttccatttgcttggaaagttcagatatgattttatgaagagatttccaactcaaattgaataccatcaaactacttgaaagtgaattccgaaacatccccatatgctgcatgttatggcgatcaactcgaggttgtttctacgagacgcgcggcaaacaactgtaaacgattcgattagcaggtgcaagagatgacttggaaggcacctgtcacctttggaaggcgttccgccagaactggcaccgcccccgccgccacccgccgagttggatcccctggccgccgcaccactggcttgtccgcccactgctccgtcgcactgatccgcactccgtgaccttgcgccggccatcctttcccgatcctcgcgcggcgatcgcgcaaataggccgccaccgcttgcgccgctcttgcccgccggactcctcgtccttggtgaatcgtatacacccgcatagttctccagaggcggcgagtaacccctcccactgccatccgctggcgccgtgttaggggtcttcggatgaagcttgatgaccggctcgcgggcctcgaagaatgcatcgaagttgttctggcgcagattctcgctactgaatacgggattctcgacgtgcacatgcacatcctcgcgcagtctgttgctctctctcgtgtccgaggagctggagcggcccaatcgtcccagcggaaggtggagcttgggccgcagacgcgactttccggtgggcgatttgctgccggatgcgctggccgacgatctttccggcggcagatccatgggcgacattggtcgaccccatcccggtccgaagtgggcgtgcgtcggatccggcgtgggtggttccagaaagatgctggggctgcgtgagcggagatccccatagtgttctagtgctcctcctgctgccgaatcctgatcgatagctgcgctgctgcgctggaatggtgctcgtcctggtccagtggcactgttcccctgcatctggctggcatcattataatcattatacatggacgcagtaggcggccgctgggggttcctccgtaggctgctcctcttcgtggagccctgatgcgaaagattggagttattagagtgagttaacgaggcgcgcgatgtgcggcgtgtgggcgtgggcggcagactttgagattgacactgaaaagtcggtggcggtactacctcctcgaagtcaaagaagttagagggaacaggtgatcccgggtaggtgaacggcggtgaggctggcggagatcctgggtagaaagaggctagtgctgccggagcggttgctggctggatggcaatgggcggagtgatggcctcgaagtggacggcggcgttagttgggactttgttggtgtggtggccggcgaggttactggtgttggtggctctggctggatactcgatgggcacgagcggctcgggcaggcagtcgagtgagggtcgtggtttcacacgtggcgcaaagaaaccataggtcatcaagatgagctcatcggcgggatatattacgtacattcctcactgtccccatgtggcatggtggcacagcgctaagtggatctcagctgttggctttgttgggattgtctcttcgtttctgagggattcttggggataactctaatcagggttaggtgggttcggtctagttgggtcttattcaagttcctgtctttttagggttctcagttagcagtgctgtcagctgtctgtcttttttgggttgtctaactaaagtgctttaagttaccaaaacaatatagagagtatctaggttcgtttacaactagggcttaacgtactttctgctagtcgggtatatcacaaagtgagttcaagtttagttcaattctcggggacgtgctgtcatttggatcgctgcatgttgtcgatacttaaagacgatgctaaaacgagaagaatgaacaaaacaagtcaatgattaattagtcgtaattactgaatgcgctgcattttagaacacgaaacaaaaaagtttgaccacaaaaaccaaacagagctcagcttgtgcctcattaaaaatattcctttctgctgttcgctcattcatgcgagtctttttgctcattaaattgttccgtttccctggaagaacagaagttaccactcgagggccagaattcgggtcaaacttttggcactccttctctctaagttggtaaacaaagtttgaccgggggcaaatttctggccaggtttgcacggccaaggacaaggcccaaagattttgggggccaggtggcaaattgtcagggtgtcaattgtacaataggcacctattttttgactaatgtgggatatgactaatattgcccttattaacaaactttctttgttttattaaaagttcattaaatgtaaaactacataagttatactgtagctttttcctttaagtcattaattagaagcaaaggaacttgaaagctataatccatttccgtgtaataacactactttagtttatcttgaagtaaaacaatcgctcactgtt

SEQ ID NO: 27275 - DNA, 1350 bp, DROSOPHILA
atgtacgtaatatatcccgccgatgagctcatcttgatgacctatggtttctttgcgccacgtgtgaaaccacgaccctcactcgactgcctgcccgagccgctcgtgcccatcgagtatccagccagagccaccaacaccagtaacctcgccggccaccacaccaacaaagtcccaactaacgccgccgtccacttcgaggccatcactccgcccattgccatccagccagcaaccgctccggcagcactagcctctttctacccaggatctccgccagcctcaccgccgttcacctacccgggatcacctgttccctctaacttctttgacttcgaggaggtagtaccgccaccgacttttcagtgtcaatctcaaagtctgccgcccacgcccacacgccgcacatcgcgcgcctcgttaactcactctaataactccaatctttcgcatcagggctccacgaagaggagcagcctacggaggaacccccagcggccgcctactgcgtccatgtataatgattataatgatgccagccagatgcaggggaacagtgccactggaccaggacgagcaccattccagcgcagcagcgcagctatcgatcaggattcggcagcaggaggagcactagaacactatggggatctccgctcacgcagccccagcatctttctggaaccacccacgccggatccgacgcacgcccacttcggaccgggatggggtcgaccaatgtcgcccatggatctgccgccggaaagatcgtcggccagcgcatccggcagcaaatcgcccaccggaaagtcgcgtctgcggcccaagctccaccttccgctgggacgattgggccgctccagctcctcggacacgagagagagcaacagactgcgcgaggatgtgcatgtgcacgtcgagaatcccgtattcagtagcgagaatctgcgccagaacaacttcgatgcattcttcgaggcccgcgagccggtcatcaagcttcatccgaagacccctaacacggcgccagcggatggcagtgggaggggttactcgccgcctctggagaactatgcgggtgtatacgattcaccaaggacgaggagtccggcgggcaagagcggcgcaagcggtggcggcctatttgcgcgatcgccgcgcgaggatcgggaaaggatggccggcgcaaggtcacggagtgcggatcagtgcgacggagcagtgggcggacaagccagtggtgcggcggccaggggatccaactcggcgggtggcggcgggggcggtgccagttctggcggaacgccttccaaagcatatggggatgtttcggaattcactttcaagtag

SEQ ID NO: 27276 - protein, 449 aa, DROSOPHILA
MYVIYPADELILMTYGFFAPRVKPRPSLDCLPEPLVPIEYPARATNTSNLAGHHTNKVPTNAAVHFEAITPPIAIQPATAPAALASFYPGSPPASPPFTYPGSPVPSNFFDFEEVVPPPTFQCQSQSLPPTPTRRTSRASLTHSNNSNLSHQGSTKRSSLRRNPQRPPTASMYNDYNDASQMQGNSATGPGRAPFQRSSAAIDQDSAAGGALEHYGDLRSRSPSIFLEPPTPDPTHAHFGPGWGRPMSPMDLPPERSSASASGSKSPTGKSRLRPKLHLPLGRLGRSSSSDTRESNRLREDVHVHVENPVFSSENLRQNNFDAFFEAREPVIKLHPKTPNTAPADGSGRGYSPPLENYAGVYDSPRTRSPAGKSGASGGGLFARSPREDRERMAGARSRSADQCDGAVGGQASGAAARGSNSAGGGGGGASSGGTPSKAYGDVSEFTFK

SEQ ID NO: 27277 - DNA, 5730 bp, DROSOPHILA
tgtccaaacaatcgcagccacaaaattatctagaggcagaggagcaggtggccaccacatccggcacttggccgccgcgattctcaacatttgcttcgggttgtgcaactctctcgattcgtcgtaaattttagcctaatcgaatctaattgaatacataaatacggaaataaatcaatttaattacaatacagccaacaacagtcatcgcaaatagtttacacgcacacaagcactcgaaccattattattacagatataaatttgtttaagccttggtaaggtattgagaaaacctcaagagttgcgggttcatatgctaattaaattaattgtcggcacaagtaggaccacttaaggttctttagctatacatatttttggaagttctattatcatatcttaactgagctttaaaaaatcgctggtaaacatgattgtacaagaagttgaaattcctggaaatggtttggtaattgcatacatatgtacgtacatatatgtacatagcttacaatttaaacgatagaaaagtacaaagtacagcactgcaaatatcatgatcggcaacatatcagaaaaccgttagaggtgatggttctctttcgttatctaagttcccctcctctcgcgctgtcttcatcttgtactttcgcgcttgccgctttggcttagcgctctgtccttttcgctctgcaattgagtcgctcattgtcatgcgcgcatcgacgccgaactttgctaaaaaaaaaaaaatataccatgatcgttcgaaatcgttaccagaaaaaacgtcttttaattttgcaaaaataagttaataaaagggcccaacagcccacttttcaatcgccatcggaaatagagcagttgggaataaaatctgcgtgagacttatctatgtggttgcccagtcaccagagcgaatacccctaagtaactaaatacatacatatctatctacagatcagtcgtgttggtcggtgaggtgattgcgagcttacagcgcttccggataaaagtcccgataggcgaatccctcaatgtactccggccggtggcaggcgaacagatggtggggtaactccttgcgggcgtacttctccagtgccttgcgcgtattttcctggagcacggcctcgtcaaatttgacccgctgcaccgtggtcttccgaaggatggtctgcaccaactgcgaccacacgcagccggactcctcttcacccaatccggagccgttttcggcaagctttcctttttgaatttgtgtcgactgcttctcttcctggctcggctccggctgctgtgcaggcgccgccatctgggctttggtttgagtgtagactgtggacgcatctgcggcctgagagtcggtagtggcctctttccttttgggtggcggaatgtcctgcatgagcgtctgcaatcgatcaactgtctccgccattcgtttccgaaagtccactattcgacgggcgtagctgaagagggctcgctcctccgccaactttaatggccttttacgtgcttcctcacttagttctccgtcttccaaaagtgggtgaatgcgaacaccggcctccgaagtgccactgaggtagattcggatagcaaattcctgcatggccgaagtattgaccatggctatggcataggcattacgtgcttttagaataacttctcttatatgagccaactggggcgaggaggtattggacactcttgtttcgagatcttgtagatccatatgctccaagtgagccgacttatccaggctgtccaacacctctgtcaaatggctaggtatccggtcaccgtccgccggaaaggttagcaaacctaatccttgaatcactcggatgttggccacatattgctgctgcagttcgtacagctgccaaagggtcctcattcgagactcatactctttctgggcgcctgtgcccaatacactactcatattagtatcgtacagttgcaagccccgtataaaggctacatccatggtatagttgcccatgaaggtctttacatagttaagagcctcggaggcgcttgcgaaactctcccgtcgctgagcaaagaattcatccaaatcgctgactgtcaactggtttcgtgccaccacgtttctgtgcaggctctcgtttagctcccgctcctcgcgtatctgctcgaagttgcttactaacagatcgccggcgggctgttgaaattcgtcgaacacctcaatatctacggccatggtagtgcttgtgccggattgctcgcgttcctgctctttttcagagtcctgcgcctgcacactctcatcctctttattaaagaactcgttgttctctgggtgacactgcggcacccactgttcctgaacagctacctgccgctttttgctcctctctaatatcgcccgtggactaaaccgctgtagatccagagaggtgtagatgtcctcgttgtgggcgtggcaacagtggagggctgacatgtccatgggatgagcctctgtgttgaagatgtacgcaccggcctgtaccacgcatacatcatcctcggttgacagcagctcgcctccggacccatcgttgtgcaggaagttttcctcgtcaaacagcagataaaggtacttgcttgtttccgccaggaagaatgactccatgcgattctccttttcgtgggtgacaacattgcgaatctggaaaataatgcaagtatatattaattaattttaagttcttaaaaagcttgttcacagaacttctcaccgttgcatatccgcatttggttttggcactgaactccaaggtctccagcatgtgctcaccaaactccagaagatactcgtttcctgtggctcgatagagatacatagctgactcgattagctccggtcgcagggggtacacctcccgattcggcgatgcctctccagcagcaatgttataaaactctggcagaaagccgtacttcttccagaccccaatgtaccgtgatatggtgcgcaaggccggctccgtgtcgccaataatgctcaggatgccgggccaaaacgcctccagggactgaaagacgggaagggtgacgcggcctttgttcatgcctacccacacgtaccagtcctccttccgcatgtacttatcaatggccgcgcgagcctcatggaataactccaagagttctgggcgattgagcaggacagatgccttaactaggtattcaaaaagggaatccactcctgctccgataccagagtcgagggcggtccaacgaccgctctgcacgtcgatgtgattgccaaaaagtccaatgggcgagcgatatgcccatagagcatgtaccgccttcatagcaacatcctcgtagatggttttcccggtcaaccggctaagggtaccaaattcgatgaggaatgtccccacgcccgccgtacaggttatagaggtctcgcccttgggcacgccatagcgcaggttcaccgtgccataaggcatacccgtgttcgtgacgaaggctggcaataatcgtcgggccacatcctccgccagtcgcagcagaggtcccttgcagggccatcctggctctagctctacgccagcacgcttggagagcagatgcgcggacagcagcccgcccacgatgcggatgtttgtctcgaacacggacacgttgatgtccctgtcaaaatccatcttctcctcgagcagtcttgccgcgcggcggaattccgtgaagttgcccatggtggccagcgtgtccagagcgtcgatcagtgtcaaggagtagctgccccaggtgtcgtggccatcgcaggtcagcggacgcagttcatcgtagttggaggcgtggcgcaggtaaccatcgtaggcgtgctggaacatgcgccgcacatcctccctgcagattcattgccggttaggattagtatgtccgagtttagccctagcaatgacccacctcagttccaactttcttgccttggaatactgcttctggccgctgacaccggtggacagcaggacgaggaggaccgcgcagatgagggtgcccggatagccgttgtttcggggtttttgctgcatcgtgggacagtcaatcaatcagggccgctaattcaattatgggcatggtcagtgttccatagccagcgtggatgtgggatgtgtggaagtcaaatgcggctacgttgacgcaaaatcacaacaagggctgattcggcggtggcatcgaccgccgaatgccctactaattccgttcggtgagtgtttttttatagagcgcttagagtagcaaacgggggaaagaacacaagccaaagagcttttttaaggtaacaaccaaacactataggctagcaaacactgtattctccgccaattctgaagtacgttaattttacccaacaaaatccctagcaataggatatgtcattccgtagggtgcaatcagctgttgctgatcgaataactatcgaaagggtggtcagatcgaatttgcatggtggtcattgcttgttaaaggaatacaacagctcagaatagccgtaaaatcagcgcggcaatattaaagtcgggttggaaaaattaaatggcaatttctttaagaattcaaaaagtttgtgatgacaaatataccgattgtttgtcactgctttgcgcggcacacgttcctttatacttttattcgcgtcgagttggcagcacataccagttttttttgtggccattcaaaagtgtgtgttcgtacgggtaaaaagtgatttaaattcaaaatattcagcgaaacgaccgcctccaatagaagcaactgtaccctatggtaagtaactgccctctgcacccgtttcacacccggacatcctccggatgagctgaccaagaaatccgcagcctttgttacgcttccgactgcgaattgcagttctggcgatgggcagcgatgtgtttcggttttgaatcattctccgcgtaaaaaaaactcagaaagagggtcgactataacctcgcggagtaactgcatcacggcccgtgtgccttttgtactccgcgtaaggcgatcgtttaaatgcaatcgcgtatgcttaattgtccgttgggcgaaaagtaacaacattgtgggtctatacatgcgggattgcctctggctgaccagaaaccacattgaaaccatcccgttgaccgtagatataagcgtgtgccatttgggatctggaaatcgtgtttccacccagttgtttgcatatttataaacaattaaagaaaaatattaaattttttggtcagggctgtcgcccctcgcatggcatcgatagaagagcgtccggagctgcggttgcaaccctatccgctcacgcaaatctatcgaaaaattttactccacggtcgattttcgttgcttttttttcacactcgtgtaaaaaaaaaggaaatagctaagtaaatcgaaagtacagtgcagtgttttgatcccgtggagtgcatgttccagcggaaagtgtgtgcaacaaatatgagcagttcgcaaaagtggcgagcaaaagcaataacaaagtagcaacagcaacgcaacgtgtgtgtgttgtaagcaatctgtacagcggaaaggtgttggtgtgttggtgtgctcggggggtggtgtgcgtttcgcccgtcccgtgtccataaattagaatcaaatcgaatcgaaatcgacattgaagtccgctgctccgccaccgcgatgtccgtcgaccag

SEQ ID NO: 27278 - DNA, 3002 bp, DROSOPHILA
cttttgaatggccacaaaaaaaactgcggccctgattgattgactgtcccacgatgcagcaaaaaccccgaaacaacggctatccgggcaccctcatctgcgcggtcctcctcgtcctgctgtccaccggtgtcagcggccagaagcagtattccaaggcaagaaagttggaactgagggaggatgtgcggcgcatgttccagcacgcctacgatggttacctgcgccacgcctccaactacgatgaactgcgtccgctgacctgcgatggccacgacacctggggcagctactccttgacactgatcgacgctctggacacgctggccaccatgggcaacttcacggaattccgccgcgcggcaagactgctcgaggagaagatggattttgacagggacatcaacgtgtccgtgttcgagacaaacatccgcatcgtgggcgggctgctgtccgcgcatctgctctccaagcgtgctggcgtagagctagagccaggatggccctgcaagggacctctgctgcgactggcggaggatgtggcccgacgattattgccagccttcgtcacgaacacgggtatgccttatggcacggtgaacctgcgctatggcgtgcccaagggcgagacctctataacctgtacggcgggcgtggggacattcctcatcgaatttggtacccttagccggttgaccgggaaaaccatctacgaggatgttgctatgaaggcggtacatgctctatgggcatatcgctcgcccattggactttttggcaatcacatcgacgtgcagagcggtcgttggaccgccctcgactctggtatcggagcaggagtggattccctttttgaatacctagttaaggcatctgtcctgctcaatcgcccagaactcttggagttattccatgaggctcgcgcggccattgataagtacatgcggaaggaggactggtacgtgtgggtaggcatgaacaaaggccgcgtcacccttcccgtctttcagtccctggaggcgttttggcccggcatcctgagcattattggcgacacggagccggccttgcgcaccatatcacggtacattggggtctggaagaagtacggctttctgccagagttttataacattgctgctggagaggcatcgccgaatcgggaggtgtaccccctgcgaccggagctaatcgagtcagctatgtatctctatcgagccacaggaaacgagtatcttctggagtttggtgagcacatgctggagaccttggagttcagtgccaaaaccaaatgcggatatgcaacgattcgcaatgttgtcacccacgaaaaggagaatcgcatggagtcattcttcctggcggaaacaagcaagtacctttatctgctgtttgacgaggaaaacttcctgcacaacgatgggtccggaggcgagctgctgtcaaccgaggatgatgtatgcgtggtacaggccggtgcgtacatcttcaacacagaggctcatcccatggacatgtcagccctccactgttgccacgcccacaacgaggacatctacacctctctggatctacagcggtttagtccacgggcgatattagagaggagcaaaaagcggcaggtagctgttcaggaacagtgggtgccgcagtgtcacccagagaacaacgagttctttaataaagaggatgagagtgtgcaggcgcaggactctgaaaaagagcaggaacgcgagcaatccggcacaagcactaccatggccgtagatattgaggtgttcgacgaatttcaacagcccgccggcgatctgttagtaagcaacttcgagcagatacgcgaggagcgggagctaaacgagagcctgcacagaaacgtggtggcacgaaaccagttgacagtcagcgatttggatgaattctttgctcagcgacgggagagtttcgcaagcgcctccgaggctcttaactatgtaaagaccttcatgggcaactataccatggatgtagcctttatacggggcttgcaactgtacgatactaatatgagtagtgtattgggcacaggcgcccagaaagagtatgagtctcgaatgaggaccctttggcagctgtacgaactgcagcagcaatatgtggccaacatccgagtgattcaaggattaggtttgctaacctttccggcggacggtgaccggatacctagccatttgacagaggtgttggacagcctggataagtcggctcacttggagcatatggatctacaagatctcgaaacaagagtgtccaatacctcctcgccccagttggctcatataagagaagttattctaaaagcacgtaatgcctatgccatagccatggtcaatacttcggccatgcaggaatttgctatccgaatctacctcagtggcacttcggaggccggtgttcgcattcacccacttttggaagacggagaactaagtgaggaagcacgtaaaaggccattaaagttggcggaggagcgagccctcttcagctacgcccgtcgaatagtggactttcggaaacgaatggcggagacagttgatcgattgcagacgctcatgcaggacattccgccacccaaaaggaaagaggccactaccgactctcaggccgcagatgcgtccacagtctacactcaaaccaaagcccagatggcggcgcctgcacagcagccggagccgagccaggaagagaagcagtcgacacaaattcaaaaaggaaagcttgccgaaaacggctccggattgggtgaagaggagtccggctgcgtgtggtcgcagttggtgcagaccatccttcggaagaccacggtgcagcgggtcaaatttgacgaggccgtgctccaggaaaatacgcgcaaggcactggagaagtacgcccgcaaggagttaccccaccatctgttcgcctgccaccggccggagtacattgagggattcgcctatcgggacttttatccggaagcgctgtaa

SEQ ID NO: 27279 - protein, 982 aa, DROSOPHILA; identical to SEQ ID NO: 7368

SEQ ID NO: 27280 - DNA, 3247 bp, DROSOPHILA
ggctgctgcacttgcttccggctcgagttaaccgaatcttcactgccagttcatcactactatatccgtggctgggcttctggagacggagcaccgaacaaccgcaacccaacttccacacagccagacgcgcactgagttctgaacggcgagttctttgtcagcatccgacgccatcgggctttcgctttccggggagcggagtttcgggggcgggcgaatcaataagctggcgccttgcgtctgtgtagccgtctactgtctgcttctggtctaatattgcagcgcgaatcgttcggaaatggagcagcttttggccgtgggtcctttcggtttcctttgtttcgctgcggccaacacacacgcacatacacacacacacacactcactcactcgctcactcgctcgcttatgtggcggctgaaatggtggacgaacgccaagggggcggatgctggcgaggtcaggagccaatatccaccatatactggggtacatttttgttattaccatatatcaaccgccgatacaacggccgaaagaatgtcaacaaaaccgaacagtgcgtcacaacaagcaatttgttttcggggtgttggctgtgtaaccccttggccactttgctgccgcataacgtggcacaattaggacctcgaaattatttgggcactcactccattaatctggcatgcataattgcgataatgagagcgagccatttgcctggggaaaagggactgcataaaatggcaaattcacatagaaatatatttgcatatttaaaaatatatttttagctagtactatacgtaacccaagtttattgggaagaataaaaataagaatttcgttttgtgtacgttgatagtcggtaatagtcgataatcgaatccagttatttgcttggcttactttcctttatcgcatttcaagttcaattattgtgaattctacaattctcaatatcttggcactgaaattccagactctgcacgtgtgtcaggttagtactttcttataaaagtattgcaaagctaaatgcacgtacgacttttttctcttcgggccttttagcaacttgatgcgttcacgttcacaatgtttgctcagcgccaaggcgtcgatttcccgagaacagctgttggccagaaactgattaattggccccagcagctcactctggctaagagctaaagaagacaatagttaattactggttgccccttttaatgggcagcgtatggacttacccatattaacgaagcaaagttgcgacgattccgtttgggaattcacggggggtgcaacagtggccacgaaaatgggtactttgattggggcattcaaggagttgaatgtctcaatgtaataactgatttgtatagggtccagctgatctgagtgactcataataggggctgtcagaggcaggcgaagattgccattaagttccgaactctcggacaacacttgtgtcacattcttggttttggcacttggttgctgactagtgtagctgatttttttacacaagcgcgtaaggaagtcctggactccatctttggaacagatttcatagcttacactttgacccggaacaaaaacacttcgcggcaatgtaagtcccatgttcgcagtctccatatattggggcttgagatcggcgagttccacacactttcgtatcaccaatcgctgctgaaagcatttgttatgtgttccccgtctttcgagaacaaccttgagcacatactccacattgccgaaaggaagtctacaggtggctggcagattttcaggcagctgaaaattgaagtcacccaatcgaaaggtaccattctctagctgaagtacttcgtttaactttttcgtttcatttatgtgcaccttgctgccgttgtaatccactttggggcactccaggtttccggtgctatcattgtgttcgatttccggcggacctcgaagtgactcccgccagtggaccgtcgagactccgtggagagtgacacttacgcctgccgaatggggaacaacaacacgatcagcatatcagattgcccatctatttgcagcactctcccctatctaatcactaaaccaactcatttgcctaatggcatcttaccctctaatttgaaactttttttcccgtcgactgtcacagtgagtgatcccgaaatttgctcgccgttgtaataaatggcagcggcacgcgataagttaaattcgcaatttattggcattttcagtggtttggagtggcttttttatatatgtgtgcttttctgaaaattcgcattcacgcgactgagactctagttgtgacctcgccaacgaacggcaaacaagtgactgtgacaacttgaggtttcatccgaagccgttggaagtctgaaaaactgtttccacacgagtcgtctgaatgagaaatggctgctgttttactgctaatttggcccgaagtctgttttggccgcagcgataacaatatataaatttagctttatggtccagctaagccgactcagattttttgctgattataccgtgtacaggatgtaaatgtgtctacagcttttgtggtatacgtaatatattttgcttgttttgctttattgaatcggattaaatcgaattgaagacagttaagacttagaaatagacttatatgatttttggttagactggcgcttaaataagaggaagtacaaagtatatagtgagacaacacaatctaatttgtatagaaactagagcaagagacacttgtatatatataattagttcgacaatatctcatttagacacctaaagattatgatgatgtgatgattttaaataataaaaaactaaacacaatttggctaatctttgcttgtaaatttctcatagatacacagaaaaagtcaatacaatattcaatattggaaaatgttagtttcgcgcttaatttcccctctccgtttggtaaaattgtgcagattttgttaaaattacgagctaaatgatttcatctaacttctcactacattgttcacatacatttagccagcgaccactgtatcaagtatcaatctgcttacaattagcaatacttaaaaaataattgtataaggttagttaaaaaggggaaaacgagaatgagaagagagaaaatttaaatgtaaatatagggactatagaagaaagggaggataaaatagttaaataaatcaaattcattttggcctaaatagctttctt

SEQ ID NO: 27281 - DNA, 1077 bp, DROSOPHILA
atgccaataaattgcgaatttaacttatcgcgtgccgctgccatttattacaacggcgagcaaatttcgggatcactcactgtgacagtcgacgggaaaaaaagtttcaaattagagggcgtaagtgtcactctccacggagtctcgacggtccactggcgggagtcacttcgaggtccgccggaaatcgaacacaatgatagcaccggaaacctggagtgccccaaagtggattacaacggcagcaaggtgcacataaatgaaacgaaaaagttaaacgaagtacttcagctagagaatggtacctttcgattgggtgacttcaattttcagctgcctgaaaatctgccagccacctgtagacttcctttcggcaatgtggagtatgtgctcaaggttgttctcgaaagacggggaacacataacaaatgctttcagcagcgattggtgatacgaaagtgtgtggaactcgccgatctcaagccccaatatatggagactgcgaacatgggacttacattgccgcgaagtgtttttgttccgggtcaaagtgtaagctatgaaatctgttccaaagatggagtccaggacttccttacgcgcttgtgtaaaaaaatcagctacactagtcagcaaccaagtgccaaaaccaagaatgtgacacaagtgttgtccgagagttcggaacttaatggcaatcttcgcctgcctctgacagcccctattatgagtcactcagatcagctggaccctatacaaatcagttattacattgagacattcaactccttgaatgccccaatcaaagtacccattttcgtggccactgttgcaccccccgtgaattcccaaacggaatcgtcgcaactttgcttcgttaatatggctcttagccagagtgagctgctggggccaattaatcagtttctggccaacagctgttctcgggaaatcgacgccttggcgctgagcaaacattgtgaacgtgaacgcatcaagttgctaaaaggcccgaagagaaaaaagtcgtacgtgcatttagctttgcaatacttttataagaaagtactaacctga

SEQ ID NO: 27282 - protein, 358 aa, DROSOPHILA
MPINCEFNLSRAAAIYYNGEQISGSLTVTVDGKKSFKLEGVSVTLHGVSTVHWRESLRGPPEIEHNDSTGNLECPKVDYNGSKVHINETKKLNEVLQLENGTFRLGDFNFQLPENLPATCRLPFGNVEYVLKVVLERRGTHNKCFQQRLVIRKCVELADLKPQYMETANMGLTLPRSVFVPGQSVSYEICSKDGVQDFLTRLCKKISYTSQQPSAKTKNVTQVLSESSELNGNLRLPLTAPIMSHSDQLDPIQISYYIETFNSLNAPIKVPIFVATVAPPVNSQTESSQLCFVNMALSQSELLGPINQFLANSCSREIDALALSKHCERERIKLLKGPKRKKSYVHLALQYFYKKVLT

SEQ ID NO: 27283 - DNA, 2925 bp, DROSOPHILA
ccaaagattccccatagccagctttttatgtgctcccttcactttgaccgcaagttcatatcctcctctaagaaccgaacgctcctcgtcggcgaggcagtgccgtttccgtacgaggaaagcagtagcaagccggaggaggagccccaacaagtggcttccacttcgcatgagagctactatataaacctgagcgacgatgagctcagcatcaacaatgtggacactacctcagttactacaagtaagtactataaatccaccgggccttcgaaatagagcgggttggattcatcatgtcggtgttgcatcttaatgctttattaacttctttaacattattttcagttgacgcagtccacgatagtccaccgcagaagcgcccgaaggaatcttccattgtcattgctctaaaggaagctgtgaaaatggaacccaatccgaatgcaggccgagttagagcagaacccgacaatatagatactactgaagtgtctgtgttcaacttcaagggacaggagtacgtacaaatgtctatggagtattacttgcaggaaaagcggaaaatggctaaacttttgcaagactataaaaatgctttaagaagcattaagaaacatatttcccaccttgacctttaactttatcaatgtaatacatgttgttcttctgtcaatttactgaacgttatcttagtttaaaagcacctgacgaattgggaaacaaacctaataatttattttattatacttggagaataaatactgataaatattaattaatttgttacactttaaatttcagcatttaatttctttcgtttaaaccttaaataccgcaaacaaatctaaattatactcagtattatctattggaaatatttttaaagtatttagttaaaatgtttacttttacaagcgcattaagatggtgtttgcctagatacttttagcttatgcgataccttagcatttgtaaataaaatgaaatgggtcctcaactaatcgctgagctccggggtatcttcaatatcgctgtctacatcaatgtcgtcgctcagatcctcgtcatgatcctgcagttcttcaggcacgcccaaaagaagacgtttgcgctgcagcagtgctgcccagctgagacgagtctcacaaagcggacactctcctccaactgggatgtaatgacctggctcgtcgcccagaaggtaattggccaggcacaccatatggcatgtcagccgacacatttgatttgtgcatcccaggcgggatttctccggttgctccatttcctgcatacaaaggtggcactcggaagcccacgccacaggtggaggaggtactgcatcatcaggtctcctacgttgtgaggcactaatggaaaccttgccactcacaatttccatgtgtttaggcagtgccttgctgaatggcctctcgtaatccgtttctagccagcgaacggtgagcggtaatctattccaagggccaacccccagcatattactaaggatcctaaagttgtagtcaaagaacgtctccctgggcagttttcgttttaattcagggtacattttaagcctagttgaaagcgacggctgttgccaagcccattcaaactggagtgccactgtattattcgggaatccgtgcacgatcattaccatcagccacggccctttgcgactggttttcctcgcgccaccgaaatcacaaccaagattgtgttggcgtatccgccgtttggggttcacggtgaagcccacgtagcattttccccggtagcgaggatccaagctctgactgcatagcaaatagacgccgtagaagtggcccttcagcgcgacggattcctcctgttgagaagctgtgtcctgtgggtctgtgaattcaccaacagatagattaatgaaacttgctttgtgtctgcaaccaaaaaccaacgacaaaggaggcgacaccctaactaaagcaatgagatgaggttttcaagattttctaaaataaaaaaagaaataaaattattttagaattttagtttggctaaaatagctaagaaaataaggtgtgttaagtggtagctgtttctcagccaaaaaggaagataataaatggaatgcaaaataacttgttccaggttcttatactattttattggtaaacttttagttgccagcgctagtttaactctagttttatgttggcccccgatgccacgccattgatttgctgctgctgctggggatttccaggctgtgcttggacaggctgtagggcagaagacgtctgttgactatccgccgtggaagctgacccgttcacgttgggggtaggtgctgctgattcgcctcccgttgctgcctccatgccgttcgcctgctgttgttgctgctgaagctgctgttgttgctgctgggcggccgtaacgttttcgatcagtttgatgcgcttgcgagtgtagtgctgccactgcagaatggcctggtcgtctatgaacttgcagcactgcgagttgacgatctcccggcggaagtgttcgtactgcagcagatcgaggaagtagaggcacattgggtacatgaggtatttcgcatagtccggctccttccagtactgcagatacttcaggtagttgatgaacgactggtccttgaaaaatccacgctgtgcaaggactggcacaaggcgttgtaattgtttatttagatatacgcgcaagatggtgaataagtgaatattaggtaggtcgaggtaatattattcttacagtttagatagttggggttcgacaggcactgcacgaactccagctcgatctgccagcgtcgcttctgcagctcctccgactcgatagcagctacggaagaaattggagagcattagtccctgagaaattagcaccacttttggtagatctctgaggatt

SEQ ID NO: 27284 - DNA, 925 bp, DROSOPHILA
acacaaagcaagtttcattaatctatctgttggtgaattcacagacccacaggacacagcttctcaacaggaggaatccgtcgcgctgaagggccacttctacggcgtctatttgctatgcagtcagagcttggatcctcgctaccggggaaaatgctacgtgggcttcaccgtgaaccccaaacggcggatacgccaacacaatcttggttgtgatttcggtggcgcgaggaaaaccagtcgcaaagggccgtggctgatggtaatgatcgtgcacggattcccgaataatacagtggcactccagtttgaatgggcttggcaacagccgtcgctttcaactaggcttaaaatgtaccctgaattaaaacgaaaactgcccagggagacgttctttgactacaactttaggatccttagtaatatgctgggggttggcccttggaatagattaccgctcaccgttcgctggctagaaacggattacgagaggccattcagcaaggcactgcctaaacacatggaaattgtgagtggcaaggtttccattagtgcctcacaacgtaggagacctgatgatgcagtacctcctccacctgtggcgtgggcttccgagtgccacctttgtatgcaggaaatggagcaaccggagaaatcccgcctgggatgcacaaatcaaatgtgtcggctgacatgccatatggtgtgcctggccaattaccttctgggcgacgagccaggtcattacatcccagttggaggagagtgtccgctttgtgagactcgtctcagctgggcagcactgctgcagcgcaaacgtcttcttttgggcgtgcctgaagaactgcaggatcatgacgaggatctgagcgacgacattgatgtagacagcgatattgaagataccccggagctcagcgattag

SEQ ID NO: 27285 - protein, 221 aa, DROSOPHILA
MVMIVHGFPNNTVALQFEWAWQQPSLSTRLKMYPELKRKLPRETFFDYNFRILSNMLGVGPWNRLPLTVRWLETDYERPFSKALPKHMEIVSGKVSISASQRRRPDDAVPPPPVAWASECHLCMQEMEQPEKSRLGCTNQMCRLTCHMVCLANYLLGDEPGHYIPVGGECPLCETRLSWAALLQRKRLLLGVPEELQDHDEDLSDDIDVDSDIEDTPELSD

SEQ ID NO: 27286 - DNA, 17741 bp, DROSOPHILA
cccctgcactgcccaaaaaaatgtttccccctttttgtaaatcgttttgaagaagtctctcagtgcaaggaattaagttgcttagcacatataaataaaggaataattaataaaaatatatttaataattgaaaaccaaagatttttgtaacaatttttttttattatactatcaaatatgtagaaaattctttaccgtgtagttaacccactaaagcccccttcacaaatatgcagcatcttctgttattgttgttcatggaaatgccgcgaaagttttcccgcgctctttgacccctccgtggccacccacgcccatcaccctaattaatttaacgcaattcgctcaaaaattacacaagaaaagttgataaaacgaaacgagaatgaaaatgatatgcagggcggaaaatggcgcatttggattcctgggaccagccgcttgatttatggcgtgcatctggttaattttaattttatgttctgcccataaaaattacccgtatggaaatttgtcattttagatttaaacgtaattgggttttcggggggtgcaggtaacaagctatgagagaagggtccttttccggtttataatttcggttcgatttttcaaatgatacccattaatgttttgagtctccagtagctctaaacctttaccgctcctctgtattagttgctctaaaactgtaaactccagatcgttcaattctctgttcttctacatctctctcctttactgaaaaactatatgacaagtcaacttttcaagccttttagttcagcatttgttcttaaatttatagagtaaaacactaactaacaagttaaaaactcacagtttaattaacttattttatgaaatagaagtaaaatgcacttagaaaagtacggtcatattgctgagctcgaattcgaactgtccgcggagtaggaccgtgcagcagtaacagtaaaatcccaaccgcccccattcgccagttatttttcgtgttagaccaacggccacactccgatgttctcaccttagtgccattccaattttgtattttaataaactagttacgattaaacaattgcgctggctgcaaattgtttgtgcgatccgagcgattagagtgttccaaaaaaccacgcgggtttctgtcaacaaaagtggtttcaaacggtttttcgtgtgtcacgcccaaaaatcaacggcgaaaaattctagtgcgtgtcaaaaaaccaaatacagtgcaataacaacaacaaagggcagctaagggtgaagcaaacgctcaaacaaaaaggcacaacaacatggaggttagtagtgttgcaattgttgctgccgctcaagtgtctaaattgtttttcattgatgtttttttttttgtgggctgtttgccttgaatgatttcatttcattaatttagtttttgtttgcctctctcttctgccgattacgtcagttttggctctctttcgagttcgttctggagtttgcgctctcttctcgctctctttcggcattcaacttcactcccttgctccgtcccgccgactgtttattgattccccgtaccattaataaattcatacatttaatagctcttattatgtcatcgctttcttttttttaacctttgttttgtgtctcgatttcggcatatttagcatttttatataatttcaagctaaattcccttatcgcgctgaaacagctgttttcaattcgtttaccgctatgtcgagccttatctctcccatatcgagttactcacttcccagcaatgacgctatagatatcgaccatccaccaccactcgagattgttaatccctcgcaaacctgtgacagattatcattctcccaaatctttactaatattattattaatataataatgcgatataatacaggatgttatggacacagcgccaattttctgaggccgccctgcgaatttgtgatttccctaatttggttttcctctcgaaatgcgtgggataatccctgctcttttctgcccccaattaaaccgaccaaaccgcttggaacccttccaccaccttcccgcacttaggaactatataaaccggaagaaaatccgaggggcgtcaaattcgcatttaacatcgctgagctgagtaattaatcgcctttcctctgctttgccgtggacggatggacagccatcaaagcagacatgaaaagctattttcccatccgcggaataggggcacaagtacaaaaaaaaaaacagataaaccaaaacggcaaagtcggccaacataaaattgctcatttccgtcgtttaattgacgccaaacgcatgaaaattgacgaaagacaaaaccatcagtagccgctgagcaaaaaagattaaactcgtttgtccgtcgagaaatccaaaacaaagtgcctatctacagtgcgtttcggcagtgtaaaaagggcgagggccactttagttgtgaaaccaagctaaaataaaatgagatttcttacaaatggatgtttttatttcattgacattgaatgtatgaaataataattatggcaacctcattataaaagtaaacatatcagttcccccttttggttacttgcatccgttgttatgatgagccgcttatcaaataataatttatatttacaatgtgtttggcaatcaagaaacttactgtatgcttataaatagccaactgaaatatgacacattgaacacatgacagcataaaagttaagtgctttgctaatattcagatttgctacccaagcgcaatcgacctgctctgttcatttagcacctcactgttccaatataaataaatctatataaatatatatttctcgatttatatatgtatttgagtgctcggcgaaagttgataatatcgtcggctaatgccgtgacacgattaaagctcttaaaaatatccagcccctgaagtgtcagacaaagtttttggcaaagttgttgcccacttagatttcggttgttaacaaggggaaaaacaagcttgtgggttttccgctggcttaaaagttctacgagttccatggaagtgggagtggaagtgcagctgccggaagaccaagccgccaagagaccgccggcccacttttattacccgcgcattcaccagtcgcattttcataaatttccacttactcatctgagagacaggatgtctgtagtctaaggtctgtagtccggagtacgcagcccggagtttggagtccctcggatctgcaaccttataacacggtccgttaaccgtttctggcttggatgggcattacttcatcattcgggctggaagtttgcataattttcatttattaccgcaaccgcttttttatattttatgcgcccttgtgtgcgagcagctctccaatctgccatcaaagtatatatgtatgcatattatgattccctgggaagtgactgacaaggcaacgacctgcccaccactccaatttatcttacaaatttaatctcttcacataattttctctgcgtggctttcatgtaattaccccggcccgtctcctcgattttgtcctgtattgttacttgtcttctgggaaagtttccagctgccattttatctgctcacaataaacataaatctgacactgcctttttgtttacggccaaagtttccccttttcacttaataatgcattttgttctctcgctttttaattgcaggtgagttcgattcggaaagcagatgggctctatatgttatataatgtgtggtaaagtatgtgggcataaggatctattgtacaatctatatatttgcatatggaacgaagtaaatgaatcatatctgggatatcatatcgatagagtaggtttatttacatcgaaaacaagtagcatgtaaccacgagcttccatagatttcatcaggccatattaggagcgtgatggtggtctcaacaaaacaaataaatcaaaatgtattaagatgcgtgcatgcatctacttgccatgattaatttcaaatgcggctcactgccgatttatgaatagataatctctggcatgtgtgggaaattcgtgtcttacataaggccataaatttcatcagcaattttaatttggcagttttcattacatgctgactaactgactgggttatttctatgtatacaaaagcctgcattccacgcccacttaaatgcgggatttgcagcggtggcggttttaatcgcccagaaatagcgtgctttctggcgacaaagatggttgcatgcgatggttgccacactttgtggctatccgttttttttttttcttatccggaaaattacctcacggtggaaattctgattcaggggtcagcgaacccgctgcacttgcaactgtttgtttaaacaattcccagggagtgtgtaaacaaaagatgattgtgcttagatgcacatactcgtacacccaaagtcaaagaccccgacgacccatgaaaaagcagaaggagcgagaaagggaaaatgtacatgaattttgaattaatttacatagatcttaatttgactgccacttaactttcactggctgacacccatgacagtttgtcgcattacccagcccagaaactgcctggtggggagggagggggtcctattacttacaatattcccgggcaaaaacatttgccggaacgtgacccagagcaaaggcacttttaaattcaaagtcaaatgtaaactacataaatttgcgtactgttcgggggggattgtgaagtctcaagagtgaggaccataatttattatgattttctgttgacttggctgactggctggcttacttgggcatcttattgatgactgggctcagtctccaactgagaatgcgacgcacgtttctcattttgtccaaatgcgtctgctgctcaaatttcacttttcccccctgcaacttttagcgacatctgtgcattatgtgcggattcaattcaattcggatcgggaaagttgcctgcactgcagccgagttgccaagtttccgagttttccatgttttccatggccgtgccaactgtcagtttctgccagcaccccggtgattccttgctttacgcccctcataaccgctttgatatcggagattctggttgcaacgatgcggcagagaccgaggcttataccctgtacttaggcagaacaagggtatgctcggtgatgctgctgcccaatatacaagtaccatctcaacataaaggcattgcgtgtgaatggaattgatacaatgtattatgtctagattaagacactactaaggcactacaagctcaaaccttttttatagaagagtaactccaattcgaatcgattcgactgtcttgagttcacttgttttaaatgcattgagacggaactatcgacgtctcagttttcagcaattgaaacgcccgactgcagccagaaccagaatcagtatgtagatatagcccgaccagaatcggattccctttcgcactgaccaactgggtctcaactttcaggaggtcgacctcctggtccggccaaacctctttcctcctcacaagctggctgctgttggcatgcaaattgcataaaatattgccatataaaaagcatattcgtgttcactgaatatgcaattgactggctctggggattggcttagacgcaaaaacttctttaccatcttaccaagctgccaaagttcccgggcatatttcactttggggagcagcaggaaaatgcaataaagcattttcaccccgcaaaaaaaaggtttggcaatacatttatgggttcataaagcgtaccatatatcaatggctaaggaaatgcaatgaacttcgatggcgcaggggagaaaggtggactatatgtgttgggattacttacaagaaatctagtcccgtcaaagacacaataatactaaatgatatcgctaaataaatgccttgagatacaaaaatgcatctgacttcactgttttcctctgctgcaagtggcaagtggcaagtggcatttcccccagatacgcattttcactcgacactcgacgctcattttcgtttggacgcctcttttcacctacggtttctggttttccacgcgcctaattatcggattcggatggccataaaagctagcctggtcgcaaatgtaattaacgtttcttgctcgaaatttccggctacgagctcctcctcctcgcgaactgcaatttccctggccgtttccctcgcttcctacgcgaatttccaccatttcgagttggtcattagccggtccatttttatttctgtacctgctttcgtgggacgtgtgcgcgaccaacttttcatgcacttctgtttgaatttccacagtttttccgctccgcgggcaatgtgtaattttcgatgtaaacgtgaccaccgccgtttgtcgcttctggaaaactgtatttcgctgttgtttgccgcttaattaaatcgcctaagcaccttgaccgatttcgcattcggtgaccacgaccgcccatccgtcagataccaaaaacatttgtgcaaatcaccgaaaaacatgtttcccatttcgcccgctgttcacggtctcagttttgtaggtcacacatggccagaaggattcgttgtggccttaagccggatttattcctgtttcgattcggtttcgggttctagctgtattctattgacaatgtaggagatgtagctatttttgaataagctagaagtaggtactggtggccaacaattaaacattgagcataaaaatcactaattcattttgtgtttgtataaaattccacaatataaaagttatgatgcgtttcaagagctcaagtgtatgtgaggctgtttttgacagaaccttaataccattttgcgagctgagcaactgccttccattaaataaagcctttcatgctaccatatgtcatgataagcactagctttgaaattgcataaaatgagacgacagagggcttcaggcaatgggcgtagaacctggagaggagctcttcacgtaagttggtttatttgaaactaacgttccacaggcccgttgcaattaatgagcctgccactccatttagctgagatctcgagactcgcagtttatgcgcatcgcaacttctaatttgctctcggaacccaaaaccctgacagacgcacgccagttaacagtttttgatgcttaatgtgtcgacgacgagtatctgacagatacatttcggttcccgtctagtttaccgtgcggatctgcatggtgggctggatttcggtatcgagaacaggtagcgtttgaggtactctattttaacaggaagcattaccccaagtaacagctccgatagtttatacgtcgtcatttaaaccggcattatttggaacttgaaggtttgccgtgaacagtaaccatgaaatattgaaagtataaccacccagtcataaactcaccaagagccatgaatattgcttgactggatcataacttccacttgagttaagagtactccccacttcgactagataaaatatgtgcttagtttcttgttttggctcgaatttatttgcttggatctctagcgtttcggagtgtctccggagtgccgtgaactcaattattttcgcaattactttttatgattccacaatttacagttgctccacctccagaggcctaacttctcgattggattggcatcgagtggagttgcgatgccgctgtgtcactgagggagtttgttctctgttcccaattgaaatgtcaacaattggctgcaagttgaggcgttagaagctgacataatcgcccccgctaaagagaccaaaacgagaagcaccaccatggaagtgggtcagtggctggcatttagcatttagccgtagccatcagatggtcgtacaatatcggggagcgtcatcttggccatttctgggtttgttttgctagtacttgctggtcgcgagatggtacactatggcagcttagctgtacctattgtggtcgaaaccggttgccagttaaaagcgctaagtaaacggcgaccaaagaggagtttaagccccggttttatggccattgtattgtccgtcgcggttccttggcactcttttgccctcgagggaaaaccagttttcaatcggtttgttttcttggctcttgatttgcccgcactaaatactaactacgatattcccccacttctcggtcacgcttagccagaacatccattccgccccccatgtttccagtactcttacaattgtcgtatgcaaatcactcggtttggctgcctttcctccatgtctaatgtcgatttcgtggcttttcgacgacttccgctcggcttgtttatgggccacaatttgttgacttatttatttgaaatctggcggagttgcacaacaatttcccaccgagaagtcgtttaagtgcagacaccaccgcggagaagtcttgccacagttgactgcccccgttcccccgcccactgcactgaaacaaaataacgttaatctacaaatcatacattctaatttttacaatattgcaacgttatttagagttgaaatatcggaaagcatttgctgaaccacaaatcaatatgattatgaataaaataatcattgaaattgagatttagagagcaaatgcaattaatggtcttagtttttgtcagtgtgcctaatttacattggcaaccctttgggccaactggctgagtgactcgacttaagttggcctgaaccgaactgagcgcctgactcactgactgactaactgactgaatgactgactgactggatgactgagtggctgactggctgagcgattgcagcctgtctttatgctggttcgaagcaaatgttgcacgactctcgcttggctttcgatgtggttgccgttgtctcgccttaattcggtggtcttgtggtgcggtggtctggtgtttcggcgtgtctctcttgccagtcagtcggtggtggaacgcagacccagtcccaagtcgcaaagtctccagccgaaagctgcaagtcgcctcagtgcattcataattggatttgccatattgcgcgcttcatattccgtgtttcgtattccgtatcgatcggacacctcctacgagctgcaaagataatagtccagaatggagagtgccctgccggtggccgagtttcagcagataaagctgcgtccggtgccaaaggtcaaacgccgagcccctcagccgccagtgagccttcgcctgaagcataaaaatgtgcgaaaagtagctttaagtgtcgcaaaaccccattttaccagacctgcaaagcattagtgaactttcgctctcatcggaaaagcgggaaactgaaaagtgaactgtgcaaaagtgaaaacaatggcttttagtcgaagcaaaagaagagcagaaacgtgggaagatttccctgcgattaggaagctaactaatctgatccgcacttgagatcttcggtggggaaaagaaactctataggcttctgaagcatttaattacattttaagtatatattttataagataatgtaatcctatttaatatttcattggaaaacttattagaaattcttctttcctgcttttccctaaaaatatttatattgtcctcttttcagacttctgccaccacaaagacaaccacgctcaccacccccgccaaactgtatggcaaggatctgagtgagtacgatgatgtggatgtggagagcctgctggcccagctctcccccgaggagataaccatactggccaaagaagtggatcccgatgtaagtaccctttttgtattggcgttgtatcctgataatttgaacattcctgtttctgcaggacaacttcctgccgccagaccagcgcaatagctatgagtgcaccaaggaagccaccgggcctctcaatcgcaagcagctgatcgagcacatcaataagcaggccatcgagaccccggatcagccggagttcgagccgttcgttcagggcaaggttcgtggaaagaagtgggtcccaccgccaagggatgcccgcgacatcgaggccgaagaacaaatcgccattgacatgggcgaggagtacgaacacgcccttaacgatgccacgcaggaggagatcatcgatctggccgccatcctcggcttccactcgatgatgaatcaggaccagtaccacgcctccttgctcaacaagggtcagcccgtgggcctgggatgggatggcattacgaaatccactcagcagaagctcttccctatggatccgcccaacaacacagatgtggaggaatccatcaagcgggtcaaggacgatgactccaagctgattgacctcaacttgaacaacattaaggttttgccctgaatgtttaatatgttcctgtatcctcattaacttattttcccttccctgtagaacatctcggacgagaaactcgagcaactgtttgccgcactgcctcagaacgaacatttggaagtcctctcgctaacaaatgtgggcctcaccgacaagacagccctcctgttagccgcggccatagagaagagcaaaaccctgagagtattaaatgtcgagaccaactttatcagtccgcccgtgattgttaagttggtgcaagccctgctcaagtgccacaccatcgaggagtttagggcctccaatcaggtgagtgggtccttcgattcatcgaaagtatagtagttgcaacatgatcttactttttaatttatcttcaccagcggtctgcggttctgggcaacaagatcgagatggaaatcaccgacctggtggagaagaactcgtcgctgctgcgccttggcttgcacctggagttcaacgacgcccgccaccgagtggccgctcacctgcagcgcaacatcgacagaagtaagttgaccctagggattgacagatgacccgggcggttactttcactcccggcgatctgcaggcgatcagcgttggtttcgcatatagttccactactgctcccttcgataggattaggtatatttcttattgactgagttgcctcactcgcgcgtttaggtgaattgcaacaaggtatgttagccagcggaatcaccaacatcgctttgccatcatccagcaatcaatcgtcactccatcacgaccattcagactcaaaggcggccaaggatatttcacccactaggttgaagagcctggctgccttcgagcagttcatcaaggcgcgcacctggaccgatccttcagatactgtaacccataacttgccacctgcagggcgtctagtgcgcaatctacaggcggaggcatctgcatccacatccggaagtggagccgagaagaagatttaatgagcgaccccacttggtaaccgagctctacgttctgttgttgcgtcttcccagccccactttagtctatcttattatctatttttctattgtgtctggtaaccaggtaatccgttcttggccttcattagcctcatcgtcactccagatctccagtcttaaccccatcgtcttacattctcatatcgtatcaccagccttcgttgcgttatcgttcacgtttcgttatcaagttatcgttcgtttcacctgtcgttatcgttctgggttaggggcacttcgtaagatattttaaaatctgattaagatggttgtcataggtaaattaatagcactgaagaattaaaagaatttctcatttaaaggcctgtcatactttaaaacctcctctatttagtgctaatattttaatataaatacatatttaattgtaagagggttcagtacgtatatcattcttccatatccacccgatgctaacccatgtgttacccctatagattagagccgggatctcgaaaggttgagatcgatccccctatgtaatattccgtgccaacccttgtttctctctcgtctccaaactcttgtaattaccatagattgtaaagtgacttccgccaagaagaacattaaccaattatccatttgtctgttgtaaatttgcaacactcctctcaaactcgaaacacccaaaatcgacacttcgacagtcttccgcgttcagaaactaaagcccaatctacccaagttgatcctgccgggcaacatggagattgagcgggatctggtcgcctataaccgatcggccacgccttctccgtcgccatctccgcagcctccagtggattatgaagtggaagaggacccggataacatggttatccggggtggcggcgatgccttcgatccggatgtcgatcccgacaacatggtggtgccgggcagtcgctccgtgacaccgaactacgacgatgagggtgtctatcaagcgcacacgtgagtgagaagtcgagcagccactgcagccgcaccgtcggagccactgaatgccacagaacacgactgaaaaccacagaaatccactgaatccacagctaccacaagttcgagcccatgtacagacagtcattcgatccactagcgcctttcccttttctgactcattggttatgtaatcctcgatgttgtcgttgtcgttgcccgaaaagtacactgaaacacctggactctggatgcagtccatcgatcttgctgaccaagaatttgtacataccccaaaatgaaaaccgcgctttaaaaagcccagcagaatagccatcggtattcattccttaacaaaatagcttatgaactatagcgaaagtattcttacatttattttccttttcgtttatgagtcttagcttcagattaaatgtaaaattatgtaaacgttaagcacaatgtgagctattttgtttagaaaaataccccatcgatggtacattttggtgatacttttgtactgtgcagaaaccggaaactgattccagcacagcccacttgtttatatctgtttccatgtcgtcgttgtcagccgctttatccattcgcagttgatccgtgtaaataatcccgtcacgatcctctctcattcagatcagatgcgtgctattaacccacacccgtgcacatccacatacacactctcatcgcaacactgtctgttttgttactatgtatctttctatatcccaaaaaacagacgaacccagagatatcagccaaagacgattcagaattcagttctcgagacagtccagaaacattattattacttctctttccttttgtgactcgtctatatcaccttttgcttatgtgttctgttctctctccctttttctgtttctcgttttcagtaagaaaagatcttgagttgcgactgcagttcagatttttcaataatctgcatagaaagtcgacaagaattcaataagcagaccagaaatcaagcaactaaaccatttttaaagcgttttgtaatctaaacccaaagaaccgaagaaaaacaagcacataacaacgaaagaacgtgtataatataatatatatatataacaagaagaaggaagcaggagcacaagtttaagctaaagataaagcagcccacgagcttgccaaaaaatctatatctatatactctagagactttaactaagcaaagcaaactgaaaccaaagaaacgaagtgaaatatcaaactaaaaacatataccacatatatcgataaagatcgcagatcgagcagactcgtgatccatggatatagcctaatacccatgtgccacgagtcatgttttaggtcgaggcctcttctaaaacccagcagaaaccgtttaggcgtcacgtgtataattttctctaacgcttaacacaggtatctatgaacacggattgtcctctcacgacttctgctaactcgcaagaattgccaaataaccaagccccaagtagcaaccagcattctgctatatatattgcctcgatatatatggtctataactagcttcagcagtttttcgattagagtgggacaccacactgcacttggctaaacaaagatctttttatactcttgcagacaataatcagaaaggtccagaaggtccgtgtatctgaaagtttataaaacttaggaaattatataaaaaaaagctgacatatcttgttagatcttccaacacataattataatttcaaaattacaaaaaaaaaaaaatatgagttacattgtatctgcaagagtatttatagcttcggttcttcgaagctggactttttcttttgattgcgcacatacccctagtcgatcagtcataaacactagcatccgtttatgttattgcctcattgtgtaaatgatttgttaattgtataagtttaaccatcctctgcatgtcttgcatgtcatcccctagccaatccatttgcatgttttgtgtaatcgaatcagcacactctccacacttcagacaacttttgcagtgggctaaattggcggctctaatgaagttctcttcgtataggaattaaactgcgatgtatgatctaagtgagtccccagatccgagtcaaagtaaagcgatagtagcagaaacccataacaaacctagatttgagacacttttatgattcagtaagaaccgccaactaacagcagaaaataaagcagcaccaccgacaagaagagccatgaaaaactacaaaaatatgaaacacgatgcagaatatctcgaacagacgaaaagttggtacccatctgtctaagtaattgttgtttgatctgcagccaaatgaaataccaactaatcccgattaataaccccgaaagcttccagctaattgaaagttaaaagttagtcttaaggacctctgcccgaataaagcccagaaaacttgggccaacttgaatgttgtacctgcaacttgattgactgtttgacgttcgaaactaacccaaaactaaatcgttgttgaatccttctctatattttatcactctttgttgccaccacttgactaatgccaatttatttgtttcttctctttcgtcccgcccacgcacacacacacacacactctcgttatcctgtatctgtgtttccagtacgtgtgaaacgcctgaaccagcgtaaataaaaagacaaatacgaaatatatagcagcaaccaaccaacaacaacatgccaccacccaagaacaacaatcaagcagaaagccatctatatgtgtgcgtgtttctttgtccgactcttgatttgataattaccaattaacaagcaaaacccagcaagaaaatcaaaccaaaccaacaacaccaccagcaaaccagaacaacagcaacatgagcaaccacggcaaccagaacaacagatctatgtctatgtccaaaactcccccaccaaccgacctctgtactctgctccccgacaaccaatccaaccaaccagctgtgaactaacaccgaagaatgatgtgcgacatgaagtacgtaaagtatcttatgggtaatagatgtaattgtagatagaagtagtatggatttcacaatttaaatgctatgtaatatatttacttttgttcaatttgaattctgttatattaagttttgtgcgatcttaaactatttcctactccttggagagtattgattcgatattatatttagaaaatgatagtgaagcatcagtagatatgccactgttaaagtgacatatacatatgatttcaccacatcaagtgaagcatcataagttagcaccttgaatcgcctggtgaccccatcagcaaaatagcgtaaattttaacgctccaagccgagatcggaacgaaaatataccctaaataggctggtcaatatttacggaagaggaaatctgattagcaactatgtatgtgattaggttagccttaagccaacaagggcaactttttttctgtggacactgtattataactatgcaactgttgtgcgtcatgcttcgttttgagagaacagtctttgtaaaggaaaatttctaatccgatttttcgaatattttccagttggacgtcagcgtcgcatgggccatctgaccaggaactacaccgttggcgtctggcagtaggattcatccgactgggacttgggagtctacacattttacaccgaaagaaatcaatagcctatcaatagtgttgtcacatgcttgttgttgctctcacgcagagaattgtttcatattgttttgttcagtgtttgttgcgttcttcagattgatgatttcggttcgagttgtgtttgtgtttggatcaccacctaagcataatcatttgtttgttacgagttaggcgaatgttcattgtcacacacgcagatccaggattaactttctatctggcagctctaagtagttatttccttaagcaaatcttcacatttacgctgcagctatacacacgtttattttattttattttatttacctaccattctgtcccttgattatttgtagcccctagacggggcgatatttcacaatttttagttttagtcgtgtttatatccacacatgcacacatgatacaaacacatacacataacatacataatacttacacactatatatatatgatacatatatagccatggtctctgaaaacaatttactgctattgaattatgaaatgcttaaacataaatttaacttatggttaaacacacaaaacaaatgaaaaacatacaattgtataatgtaatgatatcttactttatatgacataatgcaatgcttttaaaatacaatttttaaaaatcatgtaaaaactttaaaattaaataaaaaaaaaactacaaaaaatattttacgatcgatttgtgtgattgatttgggtgggccttcatttacatagacaataaagactagtttttataattattcatttcaattgcttaaactacagtatagatttgctgttgaaatgctcgaatggcgaacttttcatacgcaatacgctacattggctaaaaatagtcagacttcctttcctccgtacaatctttgttagctttataagataggaagggattatacagtagcgactagataatagatcagccatcaaaaaaccaccttgctgcactgtatctcaacactttcgattattaggcgatctttcaaccccaagatcttaccaaaacacaactgggtgtagatgggtaactgtgaagatcaatacttaagctgtgaataagtagtgcacacttgattatcgattcgccacagatccacgctagattaatggaaaaatttcgattatcaataggggacacttgtgccagttggctgaccgacaattccaagataaacactgagaaggggcggatgcagggggctttgatcattgtcaagaccgatttgtcgtctttatggaaccgctgtggatccaactgaaagatacaacctgtatcccgcttccacacacgacacgcgtcgagatctgggcaaacagcctccggagataagagcgcgtgacgcagccccttggatcatcaggttccggcggcgtgtcgtccaacccatcagtgcacgcacagatctcgcccagaatgtccacgctggagaacgaggtgaccttccgcaaacaggcggaggttaatcagaatctggaggcgcagttcgacagctcctccacggacttcattctaattaccgaccatcgcacttcgaagagtaagagcctggagcagttggaggcctccaaggagtcgaaaaaccccgagtcctgctgctcccgatatgcccggaatatcttccggaagaagactctcctgaagcgtttgccctttctcacctggct

SEQ ID NO: 27287 - DNA, 2552 bp, DROSOPHILA
accaacggccacactccgatgttctcaccttagtgccattccaattttgtattttaataaactagttacgattaaacaattgcgctggctgcaaattgtttgtgcgatccgagcgattagagtgttccaaaaaaccacgcgggtttctgtcaacaaaagtggtttcaaacggtttttcgtgtgtcacgcccaaaaatcaacggcgaaaaattctagtgcgtgtcaaaaaaccaaatacagtgcaataacaacaacaaagggcagctaagggtgaagcaaacgctcaaacaaaaaggcacaacaacatggagacttctgccaccacaaagacaaccacgctcaccacccccgccaaactgtatggcaaggatctgagtgagtacgatgatgtggatgtggagagcctgctggcccagctctcccccgaggagataaccatactggccaaagaagtggatcccgatgacaacttcctgccgccagaccagcgcaatagctatgagtgcaccaaggaagccaccgggcctctcaatcgcaagcagctgatcgagcacatcaataagcaggccatcgagaccccggatcagccggagttcgagccgttcgttcagggcaaggttcgtggaaagaagtgggtcccaccgccaagggatgcccgcgacatcgaggccgaagaacaaatcgccattgacatgggcgaggagtacgaacacgcccttaacgatgccacgcaggaggagatcatcgatctggccgccatcctcggcttccactcgatgatgaatcaggaccagtaccacgcctccttgctcaacaagggtcagcccgtgggcctgggatgggatggcattacgaaatccactcagcagaagctcttccctatggatccgcccaacaacacagatgtggaggaatccatcaagcgggtcaaggacgatgactccaagctgattgacctcaacttgaacaacattaagaacatctcggacgagaaactcgagcaactgtttgccgcactgcctcagaacgaacatttggaagtcctctcgctaacaaatgtgggcctcaccgacaagacagccctcctgttagccgcggccatagagaagagcaaaaccctgagagtattaaatgtcgagaccaactttatcagtccgcccgtgattgttaagttggtgcaagccctgctcaagtgccacaccatcgaggagtttagggcctccaatcagcggtctgcggttctgggcaacaagatcgagatggaaatcaccgacctggtggagaagaactcgtcgctgctgcgccttggcttgcacctggagttcaacgacgcccgccaccgagtggccgctcacctgcagcgcaacatcgacagaatacgtgtgaaacgcctgaaccagcgtaaataaaaagacaaatacgaaatatatagcagcaaccaaccaacaacaacatgccaccacccaagaacaacaatcaagcagaaagccatctatatgtgtgcgtgtttctttgtccgactcttgatttgataattaccaattaacaagcaaaacccagcaagaaaatcaaaccaaaccaacaacaccaccagcaaaccagaacaacagcaacatgagcaaccacggcaaccagaacaacagatctatgtctatgtccaaaactcccccaccaaccgacctctgtactctgctccccgacaaccaatccaaccaaccagctgtgaactaacaccgaagaatgatgtgcgacatgaattggacgtcagcgtcgcatgggccatctgaccaggaactacaccgttggcgtctggcagtaggattcatccgactgggacttgggagtctacacattttacaccgaaagaaatcaatagcctatcaatagtgttgtcacatgcttgttgttgctctcacgcagagaattgtttcatattgttttgttcagtgtttgttgcgttcttcagattgatgatttcggttcgagttgtgtttgtgtttggatcaccacctaagcataatcatttgtttgttacgagttaggcgaatgttcattgtcacacacgcagatccaggattaactttctatctggcagctctaagtagttatttccttaagcaaatcttcacatttacgctgcagctatacacacgtttattttattttattttatttacctaccattctgtcccttgattatttgtagcccctagacggggcgatatttcacaatttttagttttagtcgtgtttatatccacacatgcacacatgatacaaacacatacacataacatacataatacttacacactatatatatatgatacatatatagccatggtctctgaaaacaatttactgctattgaattatgaaatgcttaaacataaatttaacttatggttaaacacacaaaacaaatgaaaaacatacaattgtataatgtaatgatatcttactttatatgacataatgcaatgcttttaaaatacaatttttaaaaatcatgtaaaaactttaaaattaaataaaaaaaaaactacaaaaaa

SEQ ID NO: 27288 - protein, 367 aa, DROSOPHILA
METSATTKTTTLTTPAKLYGKDLSEYDDVDVESLLAQLSPEEITILAKEVDPDDNFLPPDQRNSYECTKEATGPLNRKQLIEHINKQAIETPDQPEFEPFVQGKVRGKKWVPPPRDARDIEAEEQIAIDMGEEYEHALNDATQEEIIDLAAILGFHSMMNQDQYHASLLNKGQPVGLGWDGITKSTQQKLFPMDPPNNTDVEESIKRVKDDDSKLIDLNLNNIKNISDEKLEQLFAALPQNEHLEVLSLTNVGLTDKTALLLAAAIEKSKTLRVLNVETNFISPPVIVKLVQALLKCHTIEEFRASNQRSAVLGNKIEMEITDLVEKNSSLLRLGLHLEFNDARHRVAAHLQRNIDRIRVKRLNQRK

SEQ ID NO: 27289 - DNA, 3505 bp, DROSOPHILA
agtgggcttgtctaaagtaacacagttttgaaatgcaaacattattgtggacaaaattatttattttttctacgataatatgggaagaaatttacatttcatacactcatggtaagtattgacaatatgattataaatgtaaccactgcttactttcggattgaaatcactgcgtgattaagatctgaaattcacaatattttgatattattttattttaagtttctattttttagcataagaaacactggcagtctatggtggcttaaatctatgttgatttagtgtactatgtaaaatcttcaagatgtatccaataacgtttatatatcgtgtcaacaatgataaggtaactaaaagtagtatttgttttaaattttagatttgaaagttatctcgctcttactcgaatatgttgctcttatcctgtgcgaattccgggctttttcttaataccataccatagttgtttattaacaacaagtttatacactgttattaagttcccaaagtcgttgatgccccacggaatcacatttctaagaggtcacattaatgacattttatttttaatctcttaacacaaagattgagtcgcgacaaatgcgaaaatgtccaagctgagttttattacataatatagaattaatattgattacatacaaaattttgaatgactggactatgggaatacccaaaaactaacttgaaatcaaacgattggttgataagtcattaaaaattgcagttataatgaaactaaaacttaaaaacttttcaaattaacaaattccaaactgaataccctactcccagaaatgaaataatacgactaaattctataatgtgaggtactctttagtcgctagatgagcttacacctttgctttaaattgtatgttttgaattaaaatattaaaagcgcgttatcagttattctaacctccgccaatgaaaatatcatcgcgacaactgaaaaatttgtttgaaacacacgcgacaaattatttcagcgcatagtagtgagtattattcccaaattcattggagcacattgttaaaaattagcatttagtgtaataaaaagttatactaaatattagttaaaacatatatggatttgttgttaagaaaccacgagtataactccacctgttgaattgataagaacttaattttttttaggatccctaccggaagagaggttcagagatcggcgacattcaactaaaggccacctctgaaactttttctccaaaaatggttgtggatttcgtagccggactcctgggcggtaagtttacctccccaactatacaaaaaaaaagcaccttatcaaatagatacctatttgaaacccaggagctgctggtgttcttgtcggccatcccttcgataccgtgaaggtccacctgcaaaccgatgatcctcgcaatcccaagtacaaaggcacattccactgcttccggacgatagtgcaaagagacaaattcataggattatatcgtggtatcagcagtcccatgggaggaatcggattggtgaacgccatcgttttcggggtctacggaaacgtgcaacgcttgtccaatgaccccaattcgctgacgtcacacttcttcgctggctccatcgctggtgtcgcccagggtttcgtgtgtgcgcccatggagttggccaaaacgcgactccaattgtccacgcaggttgatagcggcatcaagttcactggacccattcactgcctcaagtacatagtaaaaacggagggtatcagaggtgccttcaagggattaacagccaccattctaagggatattccaggtgagtacgatgtacatcgatgatgataacgacatttaggctaacattccatttcgtttgcttgaccaggctttgccagctactttgtgtccttcgagtaccttatgcgtcaagtggagacacccggcgttgcgtacactctaatggccggcggatgtgctggcatgtcgtcctggttggcgtgctaccccatcgacgtggtgaagacccacatgcaggccgatgccctgggcgcgaatgccaaatacaatggcttcatcgactgtgccatgaagggctttaggaacgagggaccgcagtacttctttcgcggtctaaactccaccttgatccgggcttttccgatgaacgccgcctgcttctttgtggtgtcctgggtactggacatctgcaatgccaagggcggcatggattccgtaatgcattccgatcagccactgactctcgtcaacctagacaacaagagccaagcggacttggaggcgacggcgccaacggttgaggaagtggtgcgcaaaataatcacggacaatgccatgtcccatcagtatgtgtccacgccaaaggatgtcgttcacagccattacacgagtagcacaatcaacattcccaaagaatctaaagcacgtttagcatccgattgtaatttaaaataaagtataaattgtttagtacctttataaatgcgcttgttgaaggtaacagctatttgaattattcataatttaagtttatttcaacgtagtgatattacaattaaatacaatatattagtctatgtgaatgcttttaagaaccgcaggacatgcaggcgtccttattttcgagcgaacaaaccatatcggccattttccgttccctatcctcttcgtacttttgggggcttccctcggcggtgccattctggccattcatgctcactgcaccctgcttcttgttcacggtgaactgaatggcattcgcagctggcttggtgcgcagatagtacattccggttttgagaccagctttccaggaataaaaatgtatggaggtcagctttccatagtttggctcggccacatgtatgttgaacgactgactctgatctatgaacgcaccacgatcggcggccattttaatcgtggacttgaccgagatttcccacaccgtcttgtacagatcgcgcaccttcgggggtatggtctcaatgttttggatcgatcctctgctggatatgatctggttcttcatgtcgtcgtcccacaagtccagctcggttaggtcgcgcaacaaatgatggttgaccacctggaattcgccggacagaactcgccgggtgtatatgtttgtggtgtagggctcgaaggattcattattgcccattatctgagctgtagatgccgtgggcatgggagcaacaagcagagagttccggacaccgtgcatcctaatggactccttcaatttctgccagtcccacaggttcgttggcaccttgtcccacatgtcgtattgcaaaattcccttgcttaccgggctgccctcgtaggtttcgtatggaccttcggtctgggccagttcgcagctggcttccaaggcgccatagtaaatcgtttcgaatatctgctgattcaagagaccggcttcttcgctttcgtacgggaaacgcatgagaatcaaagcatcagcgaatccctga

SEQ ID NO: 27290 - DNA, 1205 bp, DROSOPHILA
caaattatttcagcgcatagtagatccctaccggaagagaggttcagagatcggcgacattcaactaaaggccacctctgaaactttttctccaaaaatggttgtggatttcgtagccggactcctgggcggagctgctggtgttcttgtcggccatcccttcgataccgtgaaggtccacctgcaaaccgatgatcctcgcaatcccaagtacaaaggcacattccactgcttccggacgatagtgcaaagagacaaattcataggattatatcgtggtatcagcagtcccatgggaggaatcggattggtgaacgccatcgttttcggggtctacggaaacgtgcaacgcttgtccaatgaccccaattcgctgacgtcacacttcttcgctggctccatcgctggtgtcgcccagggtttcgtgtgtgcgcccatggagttggccaaaacgcgactccaattgtccacgcaggttgatagcggcatcaagttcactggacccattcactgcctcaagtacatagtaaaaacggagggtatcagaggtgccttcaagggattaacagccaccattctaagggatattccaggctttgccagctactttgtgtccttcgagtaccttatgcgtcaagtggagacacccggcgttgcgtacactctaatggccggcggatgtgctggcatgtcgtcctggttggcgtgctaccccatcgacgtggtgaagacccacatgcaggccgatgccctgggcgcgaatgccaaatacaatggcttcatcgactgtgccatgaagggctttaggaacgagggaccgcagtacttctttcgcggtctaaactccaccttgatccgggcttttccgatgaacgccgcctgcttctttgtggtgtcctgggtactggacatctgcaatgccaagggcggcatggattccgtaatgcattccgatcagccactgactctcgtcaacctagacaacaagagccaagcggacttggaggcgacggcgccaacggttgaggaagtggtgcgcaaaataatcacggacaatgccatgtcccatcagtatgtgtccacgccaaaggatgtcgttcacagccattacacgagtagcacaatcaacattcccaaagaatctaaagcacgtttagcatccgattgtaatttaaaataaagtataaattgtttagtacctttat

SEQ ID NO: 27291 - protein, 360 aa, DROSOPHILA
MVVDFVAGLLGGAAGVLVGHPFDTVKVHLQTDDPRNPKYKGTFHCFRTIVQRDKFIGLYRGISSPMGGIGLVNAIVFGVYGNVQRLSNDPNSLTSHFFAGSIAGVAQGFVCAPMELAKTRLQLSTQVDSGIKFTGPIHCLKYIVKTEGIRGAFKGLTATILRDIPGFASYFVSFEYLMRQVETPGVAYTLMAGGCAGMSSWLACYPIDVVKTHMQADALGANAKYNGFIDCAMKGFRNEGPQYFFRGLNSTLIRAFPMNAACFFVVSWVLDICNAKGGMDSVMHSDQPLTLVNLDNKSQADLEATAPTVEEVVRKIITDNAMSHQYVSTPKDVVHSHYTSSTINIPKESKARLASDCNLK

SEQ ID NO: 27292 - DNA, 3587 bp, DROSOPHILA
gcaagtccagtgccgagcagcccattgtggacttcgatgcctgcctggagctggtcaagagcaaggtaatgccgctggtcaagcccaagccgttcacactcaagcagcacgcggtggccgcgttcagctactactttgagcgggccatcgagtcgggtctggtggatccactggctggcggcgagaccacggtggaagcttatcgcaagaaggcccaggagatctgtgccattcccaacgatgagcagcccttcatgtgcttcgaccttaccttcatctcgacgctgctgcgcgaaggatttggcctcaacgatggcaagaagattaaggtgagtcctggcgcacttaacacaaattgaactctctagtaactcgttttaaattgtgcagctttacaagaagatagatggccacgaaatctcctgggccctcggctgtgcatacaacgttctgactagcgacgagaaattcagtaattcctaatgctcctccattagtccgtagttgaagacataaattttaaacggattgttagctgaaattgtttatagagtgccttagacgtgcatcgagtatactacaatcacaacacaccgcacacaccgcacacaccacacacacacagaacacacactcggacattgtccacagcatatgtatgatgtggtcgattaatatttgtttgtgctctgcaagattcgtttcaattgcctctaattgagctaacccatacacggtgactacacttagcgtttagtttgtaattccaattttgtgtgattcgccatatttgtaatgcagttttttgccaacttcttaactaattagtccctacactcgtatcgtatcctcatgtacataaatttacacaatgatatgtatttacctaatatgtataacgacctagactactagccgcaaacatttcacacggtttttcacacatgcaaatgttagtttagttatctttgcaaataaatcaaatgttaactgatctgaattaaagtaaaatatttgtttattgctgattttcgttcgctatacaaaatattctatatttaataataatagaggggtaaatgcataacgaagaaaatgagtaaagaaagggtgttcctgctatggaattttggtctttttacaaataaaactaagaaacgctagcgtgggaatacgtcagaggtctgctgcactacacattggctacgcactggctgcatgtggaatcgatgaatcccctcatggcctcggcaatagttgcggcttgatgcccagccggtcgatgatgtactgcggcatgcagagcgttgggttgatggccttcaggccggaatgtcccagtagcgagagtccgccgatgccgaacagcgtgtggaatatgtccggcatgttgccagttctgtccgagaagccaccggtctccgtgtcctggcacgacagtatgaactgctgcagcttctccgagctgatccagtgcaggcggcccatgatggtgagcgaggcgagcacccaccacgaatagcatacatccggcagcttctcgggccgtccatttagcccaccggagggcagctgccgctcgcagagccaccagcccagtttgtccacgtcgagcagatgcaggcgatgggtcagcgagaagaagccgacgcagcagtagatgagccctgcgggttatatgtagattagtttttggataacatatatgagcaccagctttatggctagctatttttctagtatactttttgttcccagaagattaataagtttaaattgaaatgatattgactgtgagggcgaaagcatgacaggcgatgtggtgactcacccgcatgcgactcggcgcccggcttggaaccgaatccaccgtccgtctgattgcagcacgagagcacgaacttgaccgccttctccacgtcgatggtctgctccatgcggccgagcagcgttagggaggccaccgcacagaagctgaacctggtgtccacctcgccccacttgtcgccaaagaagctgccgtcgggctgctgcagtccgaccacgaatcggaccaccgcctcgcggtcgatctcctcgagggcgtcgtaggtgcagaggatctggatggccgacagggtgtacagcaggtggggatcgtggccctcgcagggtgcgaatccgcccgtgttcggacactgacaacgcttcacaaactcgatgatggacttgcgctccaatcgctccagctggcccataatgtccagggcagtggtgccccaatagatgcccgacatgcgcagaaactcggtcatgcagtactcgtagtcgtcctcctgcttcccatggttctcgatgtactccacatgcttccagaactgcagcttctggccgccgccatccgcatcaccaccaccgccgctgtcgccaccgccatttgagggctttacgaaggtcgtgaagtccatcgctgattgggctcaattgaatgagtatcgggtggctggcagatcctcttcggcgcgctgtttcgcttgattaactctattaattggcaggaatagtgctgcgagcaaacaaataactcagtgaatccaatcgagcacagctgattcatctgcgcgatggttggcaacgcggcagtggcttatcaaacagctgatcgacgcaggggcgtagtgtggaggggtttactataaccccatccaaaaataaaaattaaacgtacttaaatttcaaatagctagtttattttattcaaaacacatgcacactattgcaccagcaggctggactgcggatccggctcgtcgatgcttagggagactatgtgctggccgggaaccatgacgttgcccagcaggcgcggctcctggccctccaccaagtactcggcgcacatggacagcacgatgttggcgtcgcggtccgtgcagttgaagaatcccaccagcacgcgtccgtccgtaatcacgatccgaagaactcgacccagccacttctggagcttcctgcgtcccggcgtcaaactggcatcgttcatctggtgcggggcgttcgttgtgatgcggaagggctccggtggtgtgcatgcgggcgggggcatcacctgctggccagtgatgctcagttctgtcatggttatatcctctttgctcaatttaaacaaataaatgcaagaaattctcagctttttttgtgtttacactgcgcgtatgtgtgatatagtgtgcgtgtgtatgagtaatggccagggatgcaagcacgtgtaagtggttcggttcactggttcactttttgagctcataaattcgaaaatatacgaaacactcgtttgcttgtgtcaaagaaaatactttagatttaaaacacttaaaggaaatgattgcaaaatgaatgcacacaatgagccttctttttaacatcttcatacgaaaactagttctttttatatttgcatccctggtcgagctgagcttataaaggtaacgggcaccctagcccagtcagctgatttgcattttgcggcaaattttgtttcgcatttatccaaaaagctcgtaattcgtctcttgattttttcaaatatccaccatgtccggaaaggc

SEQ ID NO: 27293 - DNA, 1423 bp, DROSOPHILA
ctgtgctcgattggattcactgagttatttgtttgctcgcagcactattcctgccaattaatagagttaatcaagcgaaacagcgcgccgaagaggatctgccagccacccgatactcattcaattgagcccaatcagcgatggacttcacgaccttcgtaaagccctcaaatggcggtggcgacagcggcggtggtggtgatgcggatggcggcggccagaagctgcagttctggaagcatgtggagtacatcgagaaccatgggaagcaggaggacgactacgagtactgcatgaccgagtttctgcgcatgtcgggcatctattggggcaccactgccctggacattatgggccagctggagcgattggagcgcaagtccatcatcgagtttgtgaagcgttgtcagtgtccgaacacgggcggattcgcaccctgcgagggccacgatccccacctgctgtacaccctgtcggccatccagatcctctgcacctacgacgccctcgaggagatcgaccgcgaggcggtggtccgattcgtggtcggactgcagcagcccgacggcagcttctttggcgacaagtggggcgaggtggacaccaggttcagcttctgtgcggtggcctccctaacgctgctcggccgcatggagcagaccatcgacgtggagaaggcggtcaagttcgtgctctcgtgctgcaatcagacggacggtggattcggttccaagccgggcgccgagtcgcatgcggggctcatctactgctgcgtcggcttcttctcgctgacccatcgcctgcatctgctcgacgtggacaaactgggctggtggctctgcgagcggcagctgccctccggtgggctaaatggacggcccgagaagctgccggatgtatgctattcgtggtgggtgctcgcctcgctcaccatcatgggccgcctgcactggatcagctcggagaagctgcagcagttcatactgtcgtgccaggacacggagaccggtggcttctcggacagaactggcaacatgccggacatattccacacgctgttcggcatcggcggactctcgctactgggacattccggcctgaaggccatcaacccaacgctctgcatgccgcagtacatcatcgaccggctgggcatcaagccgcaactattgccgaggccatgaggggattcatcgattccacatgcagccagtgcgtagccaatgtgtagtgcagcagacctctgacgtattcccacgctagcgtttcttagttttatttgtaaaaagaccaaaattccatagcaggaacaccctttctttactcattttcttcgttatgcatttacccctctattattattaaatatagaatattttgtatagcgaacgaaaatcagcaataaacaaatattttactttaa

SEQ ID NO: 27294 - protein, 347 aa, DROSOPHILA
MDFTTFVKPSNGGGDSGGGGDADGGGQKLQFWKHVEYIENHGKQEDDYEYCMTEFLRMSGIYWGTTALDIMGQLERLERKSIIEFVKRCQCPNTGGFAPCEGHDPHLLYTLSAIQILCTYDALEEIDREAVVRFVVGLQQPDGSFFGDKWGEVDTRFSFCAVASLTLLGRMEQTIDVEKAVKFVLSCCNQTDGGFGSKPGAESHAGLIYCCVGFFSLTHRLHLLDVDKLGWWLCERQLPSGGLNGRPEKLPDVCYSWWVLASLTIMGRLHWISSEKLQQFILSCQDTETGGFSDRTGNMPDIFHTLFGIGGLSLLGHSGLKAINPTLCMPQYIIDRLGIKPQLLPRP

SEQ ID NO: 27295 - DNA, 3128 bp, DROSOPHILA
ccttgacccgctccacctcgctggcgtcgaagggcacctcctccaccttgtggaatccagagaacctgatgatcttgccggtcccctcgaccttcaggtgcttggcgaactgttgggccggcgaaagggccatctcctcctccgtcttgtagccgtagtacttggcccagtcgttgcgtccggtgtagaccatatagcaaacgaggccgaatgcctgccaggccagaacggcgtacccgatgctcaggcgccgcttccacagctccgcccggtgctccggtatgggattcgtgttgcgccgcacccagcggcgcagccacttcatctcgaacagtgccattgtgtgcttatgtgctgctataactaagttcgttatgtaaagatgcaaaatgtaaacaagcgactgcagctggcagccaaagttgccacactgttcaaatccaccaaatggttcgaaccaaggatgcaagaaactaattatttgaaaacaaaataaagttaagcttattttacaagccaaagcgaagtcacttctaatatgtgttttgcagatgcgataatgccctgtgcctcatttccacgtttttaattcaggaaaagtgcacgttaaagctaaatgaaaaccaagacgtatgagaatcattattgtagcgaaatctttggacgaaagcgcgagcgacttgaattcccgctgaccgcctcagacggtagccgaatttggcggcaagctagccaaggtggcagcactgaaatggtcacagaacgaaaatgcaacttcgatcggggcatataaaaccagtgcttccaatccgaaggcaaagcataaaagatcagaacatcagtagccgaagattggctgagtagcacggacagcgggcaagtcctttgaaacgttggtagtttgcaaccgggtttgccaacttcctttggagttcagtggtgctcaactatcgacacaactatcctcggctttcgcaaaactcagtaaaccggtaaacttccgttcatacagttcacaattctaaatttaaaatagatctaacgcagacacattgacattcgaaaattgggattgaaaactcaagatgccgactacaccacaggatcttgcccttgcccactctcttgctcaaagacctccgaccgatagcagtgaggccaaggagcaggaggccggcgaatcggacaacctgcccaacctgtgcactttgtcgctggacgaactgaaacagctggacagggatcccgagttcttcgaggacttcatcgaggagatgtccgtggtgcagtacctgaacgaggagctcgattcaatgatggaccaggtggagattatatcaagtgagtaggtcacggcccgaggctggcaaatctacctaacccttctgtattccaatccaggagagaacgagtgcaagggcattcatctggtagagctgaagcgccgactcagcgacgattttacagctttaaaaaacctaggcgagaaatgcgaccggctgaacaagaagtacttcaagaagtcggatgaatacgcgcctcagcatatcagggtgagttcccttaaaaagccaatggcgtgggagttaccattcccatccgtaacttgcattccatttcccctgaaggagcttcttcagattgcagcttccaatgccgatggcgactgcgatcgtcacgtggagcacttcctgaacggaaagaccgacgtgcagactttcctcaacacgtaccagtggtcgaagaagatcagtaccgagcgcaaggccaaagaggagcgcctgggcacccagctcagtgctctggagcgggccggtatctaggattgccgtgacactccctggccgtgccatccagagcacggtcctcccactcctcgcactcctcccacaccgccacgatccgcgtcgcaatagtagagaatatcaatgttagtaaatagagaagttaagccagagatggggcgacataatcatggcacacacggccacgcattcccagaacagaaagcaaaaccttgttgaagtaataagaaggtgcactagttgttcgtttcccaagatcgtttacttgggaagagggtcttgttattctatccgtaccccgaaacgaagcactatgtgcaacagaacgcagtccggaatcgcatgtattacctatttactttttttccttttggttaatcgtgagccccatccatatattctctccatatatacatatatattaaaaaaaaactatgctttaaatgatgccgtctctttctatttaagggaaaggtttttcaaaacaatggtttttggaatgatttttgttttgatttgaataaaatcgaaccgcaaaggataacacaaccttattagtttgaaataattttattatattgaagaataataatgcttaataacagatatataaaatttcttttttcaacagtggcttgtgctagtatcttaatttagtttgcataagctaaaagcaattaaacaaacataactacgttttctccattattattcatatgtacatatattactaagcattccaattgttaaaatcgaaaacaatcgaaagtttcgttctacatcattcgttcgaaatatgaatgatccggttatcatggtatttttttggtattttagctatatagttcgccgatttatcggccgtacctcttccccgatctcggccagaagcggactgggccagttggctgatagtgctcgttcggctgccccgctgtcgcccttcccctcctccaccgaggtcaagtaatctcgagtgataagcggcagtgaactctcgtctctgcttctccattccacaagaaactataaataacagactacccacaagagactagtgcaattgcagcaatggcccaaacggaagtgctggtgttcggctcggccatcattgactttataaggtaggtgggcagagaaggctcgatcccaaggagaatcttacaaatacaacaccttttccagctacacgacccgtctaccgaaagccggagaaacgctccatgggcatcgctttcagattggctacggcggcaagggcgccaatcagtgtgtggctgccgcgcgccagggatcccgaacagctctggtggccaaactggg

SEQ ID NO: 27296 - DNA, 993 bp, DROSOPHILA
ccgttcatacagttcacaattctaaatttaaaatagatctaacgcagacacattgacattcgaaaattgggattgaaaactcaagatgccgactacaccacaggatcttgcccttgcccactctcttgctcaaagacctccgaccgatagcagtgaggccaaggagcaggaggccggcgaatcggacaacctgcccaacctgtgcactttgtcgctggacgaactgaaacagctggacagggatcccgagttcttcgaggacttcatcgaggagatgtccgtggtgcagtacctgaacgaggagctcgattcaatgatggaccaggtggagattatatcaagagagaacgagtgcaagggcattcatctggtagagctgaagcgccgactcagcgacgattttacagctttaaaaaacctaggcgagaaatgcgaccggctgaacaagaagtacttcaagaagtcggatgaatacgcgcctcagcatatcagggagcttcttcagattgcagcttccaatgccgatggcgactgcgatcgtcacgtggagcacttcctgaacggaaagaccgacgtgcagactttcctcaacacgtaccagtggtcgaagaagatcagtaccgagcgcaaggccaaagaggagcgcctgggcacccagctcagtgctctggagcgggccggtatctaggattgccgtgacactccctggccgtgccatccagagcacggtcctcccactcctcgcactcctcccacaccgccacgatccgcgtcgcaatagtagagaatatcaatgttagtaaatagagaagttaagccagagatggggcgacataatcatggcacacacggccacgcattcccagaacagaaagcaaaaccttgttgaagtaataagaaggtgcactagttgttcgtttcccaagatcgtttacttgggaagagggtcttgttattctatccgtaccccgaaacgaagcactatgtgcaaca

SEQ ID NO: 27297 - protein, 200 aa, DROSOPHILA; identical to SEQ ID NO: 26283

SEQ ID NO: 27298 - DNA, 3864 bp, DROSOPHILA
tgctacagtgttcagaaattcgcaattgcaagtaagaatcgattggcaaattaatcgattttgtgatttactgattttggcattttgaatggggtcaagtcagcttgtttcccgcgatcggtctcactattttactgtcattgcaatttggaaattttaagggttctgattgcacttctcgctgacctcaaacaaatcaagtaaatattcttttttttttgctgttatatgtcacgttccatcgaagctgatggaagagcggcgtccttgaggtgtctaaccctgaactggaaatctccgttttgctatttattttgcagagaagacaatcaaaatgcttttcgatggcgaaaccggcaatgggcaaggtcagggccagaataccctgaatccattggggccaggccaggaggagcccgccctatgcgagcagtactatctgctgggcgatggttccatcattctgcgcaaccattccatcgacttgtcgaatccgcccctgaaatcgcgctgctgccagctcccaacactcatccacgacatatgcgtcaactgcgtgatggatctctgcgaggagtgtggctactcctgcggcgagtgcgccaagtttatttgccgcaactgcgtgactttattgtgagttaagtcccagaaggaagaagcatccccctagggaaacccgttagtttaaaaatcaatcgaccatcatcttatttccagtggtaatcgaattgaagaagaggaggatccgctgtgcgagcactgccagatgttcctcagctagggcatcaaacaatcaagcaaatgtcaaatgtattacgttttaaagaatatagagctatatagtatttaacattaggcaaaaatctttgatctattcttcgttagcgctgtgcgagtactgccagatgttcggcttcacacaaacaagcactcagcaaggtcacagtgcttgttaaattttaagttctgaagcagtacaaattttggacaactcaatcatttttatatttctatatttaaagagttggtatttcatataaatataaaaaaaaatttacaggtgtactcgttccttgtctctacctacaccttgcccctaaatttgtggtacttctcgtgatccttcaccaatccttcgtacatcctggcgccggcctcattgctggagcgtaggatgaagtgtccggcacggtgatcgcaaataccgatcagttcatggcacacgcgcactatgtggaccttgatctggggaaaatcgtattattagtcaaagtaagcccactataaaaatatatatactacgtggacgcatagaataaaaaaatggcaattattactccttaaagaatatagaaccatatacttcttaacacgaaacaaaaatcgttgatctattcttcggaatgctgcgaaacttgaattttgacttcgacttggccaatggcgttcccttaacgtaaaacacaccttttcgaacagcgtcgtgggcctttcggttgctaccatttggcgaatggtgaagataagcaggaagggtgcgactctcttcacggccagtgcctgcgtggcgcgcactgtggccattacagtagccagtttcagacccaagtccgccaaaccatccagctccgtttcacttatgtcctgtgtctgctttctttccgcccgatagccaacgacggcctggatgagatcctggcaaaggacactgagctgggctgctcggtctgacatcaggttactgtgttgttttaacagcacaatcaggttgtctgtgagtgcactatacagatccacaaattgttgccaactgccgccgtggctgatcaagtgcttgatgtctatatccaacatgctgctaagaaggcaatccagggactctcctgtgagagggaccgtacgattcccagccagattgcgctgggcctccaggagtcgaagggcatgaccagaatatgccaagtctttgggttccggtagacgcagtgcaacactcacactgatcacctcgaaatgctcattaagcatctaaagagaacattattaactatggaacgaggacaaggtgctggagaagactcaccgctcccttcacgctgctcaacgagcatttggcaaagagagccaaaagggttagcacattctggagcgccgtgtgctccgtttgcgacgcagggcgtgccatttgctccacttgtgaggaaagacggtgcaggagcagtaggaaatcctcgttagtcttatagccaatgatcagcttaatggccggctccagacaatccagtgctgaactggaaaatgtgtcgcccacctcaatgtctgtattcaattgcctccaatagctgcttagcacgaactctatctcatccggatccaaatgcaaacgttgacgatgggtgagcgccacattcagcaagcgtgtcgcattagcatcgcgatagttcaactaaaaatatagcaatattgttgtttggtttgttcaatacttataaacacgaaaagcacccaccgagtgaccaatgtatatcttacagatacgtcgaaatgttttcttctaacagcttttcaggctcctgagagcggcgaaccatctctgccagctgcttgatcacagaacctacaaactctgcatcccagtagtcttggctcttagtccgatccttgttatccttgcgaagttcaacgcactcctgatagcatctgatcaggctgccatagcattcgaatagaagcttgttgctggaccgcagggcatcctggagcagctcagagctgagaaccatgggcagacaatcttgaacagaaatgggcgacccccgcggaccacgaaagatgaagagggtccttggtatgtaaagcattgtcccacttgcaccaactcacctactcctacttcctgtaatggagcgggtggtagatcggagaggaagcgccgctcagagtgcagttatgtcgggcttgttgttgctcaatgcaaagatgagttcagtttaaaccgttaaacacgagaacaaaaaatggagcaaagcagcgaccacaaatttacggggataaccccacgaagagattggcaataaactgctacagtgttcagaaattcgcaattgcaagtaagaatcgattggcaaattaatcgattttgtgatttactgattttggcattttgaatggggtcaagtcagcttgtttcccgcgatcggtctcactattttactgtcattgcaatttggaaattttaagggttctgattgcacttctcgctgacctcaaacaaatcaagtaaatattcttttttttttgctgttatatgtcacgttccatcgaagctgatggaagagcggcgtccttgaggtgtctaaccctgaactggaaatctccgttttgctatttattttgcagagaagacaatcaaaatgcttttcgatggcgaaaccggcaatgggcaaggtcagggccagaataccctgaatccattggggccaggccaggaggagcccgccctatgcgagcagtactatctgctgggcgatggttccatcattctgcgcaaccattccatcgacttgtcgaatccgcccctgaaatcgcgctgctgccagctcccaacactcatccacgacatatgcgtcaactgcgtgatggatctctgcgaggagtgtggctactcctgcggcgagtgcgccaagtttatttgccgcaactgcgtgactttattgtgagttaagtcccagaaggaagaagcatccccctagggaaacccgttagtttaaaaatcaatcgaccatcatcttatttccagtggtaatcgaattgaagaagaggaggctccgctgtgcgagcactgccagatgttcctcagct

SEQ ID NO: 27299 - DNA, 1445 bp, DROSOPHILA
atgctttacataccaaggaccctcttcatctttcgtggtccgcgggggtcgcccatttctgttcaagattgtctgcccatggttctcagctctgagctgctccaggatgccctgcggtccagcaacaagcttctattcgaatgctatggcagcctgatcagatgctatcaggagtgcgttgaacttcgcaaggataacaaggatcggactaagagccaagactactgggatgcagagtttgtaggttctgtgatcaagcagctggcagagatgttgaactatcgcgatgctaatgcgacacgcttgctgaatgtggcgctcacccatcgtcaacgtttgcatttggatccggatgagatagagttcgtgctaagcagctattggaggcaattgaatacagacattgaggtgggcgacacattttccagttcagcactggattgtctggagccggccattaagctgatcattggctataagactaacgaggatttcctactgctcctgcaccgtctttcctcacaagtggagcaaatggcacgccctgcgtcgcaaacggagcacacggcgctccagaatgtgctaacccttttggctctctttgccaaatgctcgttgagcagcgtgaagggagcgatgcttaatgagcatttcgaggtgatcagtgtgagtgttgcactgcgtctaccggaacccaaagacttggcatattctggtcatgcccttcgactcctggaggcccagcgcaatctggctgggaatcgtacggtccctctcacaggagagtccctggattgccttcttagcagcatgttggatatagacatcaagcacttgatcagccacggcggcagttggcaacaatttgtggatctgtatagtgcactcacagacaacctgattgtgctgttaaaacaacacagtaacctgatgtcagaccgagcagcccagctcagtgtcctttgccaggatctcatccaggccgtcgttggctatcgggcggaaagaaagcagacacaggacataagtgaaacggagctggatggtttggcggacttgggtctgaaactggctactgtaatggccacagtgcgcgccacgcaggcactggccgtgaagagagtcgcacccttcctgcttatcttcaccattcgccaaatggtagcaaccgaaaggcccacgacgctgttcgaaaagatcaaggtccacatagtgcgcgtgtgccatgaactgatcggtatttgcgatcaccgtgccggacacttcatcctacgctccagcaatgaggccggcgccaggatgtacgaaggattggtgaaggatcacgagaagtaccacaaatttaggggcaaggtgtaggtagagacaaggaacgagtacacctgtaaatttttttttatatttatatgaaataccaactctttaaatatagaaatataaaaatg

SEQ ID NO: 27300 - protein, 452 aa, DROSOPHILA
MLYIPRTLFIFRGPRGSPISVQDCLPMVLSSELLQDALRSSNKLLFECYGSLIRCYQECVELRKDNKDRTKSQDYWDAEFVGSVIKQLAEMLNYRDANATRLLNVALTHRQRLHLDPDEIEFVLSSYWRQLNTDIEVGDTFSSSALDCLEPAIKLIIGYKTNEDFLLLLHRLSSQVEQMARPASQTEHTALQNVLTLLALFAKCSLSSVKGAMLNEHFEVISVSVALRLPEPKDLAYSGHALRLLEAQRNLAGNRTVPLTGESLDCLLSSMLDIDIKHLISHGGSWQQFVDLYSALTDNLIVLLKQHSNLMSDRAAQLSVLCQDLIQAVVGYRAERKQTQDISETELDGLADLGLKLATVMATVRATQALAVKRVAPFLLIFTIRQMVATERPTTLFEKIKVHIVRVCHELIGICDHRAGHFILRSSNEAGARMYEGLVKDHEKYHKFRGKV

SEQ ID NO: 27301 - DNA, 2187 bp, DROSOPHILA
ttcgcagagaagacaatcaaaatgcttttcgatggcgcagccggcaataggcagggtcagggccagaatgccctgaagccattggtacaaggccaggaggagcccgccctatgcgagcagtactatctgcttggcgatggttccatcgttctgcgcaaccttcgcaccgacttgtccaatccgcgcctggagagagtgaaatcgcgctgctgccagcgccaaacgctcatccacgacatatgcgtcaactgcgtgatggatctctgcgaggagtgtggctactcctgcggcgagtgctccaggttcatttgccgcagctgcgtgactttattgtgagttaagtccttaaaagaagcatcccccttgggaacaccttttatttgaaaatcaatcgaccatcatcttattttccagtggtaatcgagttgaagaagagaaggatcccctgtgcgagcactgccagatgttcttcagctaaggctttacacaatccagcacttataaagtcgcggtgcttgttaaattttaagttctgaagcagtacaaatttgggacgacacaatgtcaaatgtattaccaaccagctccgtttcacttatgtcctgtaactgctttctttccggccgatagcctggatgagatcctggcacaggagactgggctgggctgctcggtctgacatcaggttactgtgttcttttaacagcacaatcaggttgtctgtgagtgcattatacagatccacaaatagctgccaactgccgccgtggctgatcaagtacttgatgtctacatccaacatgctgccaagaaggcaatccagggactctcctgtgagagggaccgtacgattcccggccagattgcgctgggcctctaggagtcatagggcatgaccagaatatgccaagtctttgggttccggttgaaatggtcattaaggatctaaagagaacattattaactagggaaggagaataaggtactggggaagactcaccgctcccttcacgctgctcaacgagcatttggcaaagagccaaaagagttagcacattctggagcgccgtgtgctgcgtttgcgacgcagggcgtgccatttgctcctcttgtgaggaaagacggcgcaggagcagtaggaaatcctcgttagtcttaaagacaatgatcagatatgtcggaagcattcatctatccctagttcgtctaggcatggagtttttaaggtcagatgcagccccacaaaaggacgaacagtttgcgaattgtactcttcttacagcttttcaggcccctgagagcgtcgaatcttagtccgatccttattatccttgcgaaattcaacgcgccaagcattcgaatagaagcttggtgctggaccgcagggcatcctggagtagctcagagctgagaccatgggcagacaatcttgaacagaaatggccgacccccgcagaccacgaaagatgaagagggtccttggtatggaaagcattgtcccacttgcaccaactcacctactctccttcctgtaatggagcgggtgggagatcggagagacagcgccgctcagagtgcagttatgtcgggcttgttgttgctcaatgcaaagatgagttcagtttaaaccgttaaacacgagaacaaaaaatggagcaaagcagcgaccacaaatttacgaggataaccccacgaagagattggcaataaactgctacagtgttcagaaattcgcaattgcaagtaagaatcgattggaaactaatcgattttgtgatttactgattttggcattttgaatggggtcaagtcagcttgtttcccgcgatcggtctcactattttactgtcattgcaatttggaaattttaagggttctgattgcacttctcgctgacctcaaacaaatcaagtaaatattcttttttttttgctgttatatgtcacgttccatcgaagctgatggaagagcggcgtccttgaggtgtctaaccctgaactggaaatctccgttttgctatttattttgcagagaagacaatcaaaatgcttttcgatggcgaaaccggcaatgggcaaggtcagggccagaataccctgaatccattggggccaggccaggaggagcccgccctatgcgagcagtactatctgctgggcgatggttccatcattctgcgcaaccatt

SEQ ID NO: 27302 - DNA, 187 bp, DROSOPHILA
atgcttccgacatatctgatcattgtctttaagactaacgaggatttcctactgctcctgcgccgtctttcctcacaagaggagcaaatggcacgccctgcgtcgcaaacgcagcacacggcgctccagaatgtgctaactcttttggctctttgccaaatgctcgttgagcagcgtgaagggagcg

SEQ ID NO: 27303 - protein, 62 aa, DROSOPHILA
MLPTYLIIVFKTNEDFLLLLRRLSSQEEQMARPASQTQHTALQNVLTLLALCQMLVEQREGS

SEQ ID NO: 27304 - DNA, 3715 bp, DROSOPHILA
tcgaatttaatatatatctttcgaatgcaataaccaaatctatttcaatctatttcaaacttgataagatttgttacatatttttttaagttaaagtaacacctgaccgtccattatagcgagcggtcactgtattcaccgcttggtggatgcgcccacccatttgaatacagactgcattgtcttcttggtgaagccaaattcgattcgcttggcctcatgtttatttaatctgatcaattggcgcagcgtgtcacataaatttggacaattttaaaaatgcacaacatttgaaacatttgaatattgcgcttatatgtaagtttatctttctatttgctgttatttattttgtaagatcgcgaggaaaaaaaacacatttaagaggctagagttcggttttgttttttttttttgtatctgtccccttgtccgcggcgcagctttgtgatacggatacagacttgcattcttttttaaaaaagtctatctctaagtaaactgtaaacatttgtacctacatatgcattacattattgtgaatttcaaaaaaacatattgatgtcagcaaagaatctgtatttttcggtcaccgaaccgctgatatttaatggaaataaatcatatttctctaacgtggcttgttggctttcaaatacggggtctggaaataactaagaagttttgaattttttgtttggcgccaactgtaagcttaacagttgattaaaagtacagtgtgtacaccccattaccctactgttgtctggcaacgcgacgctaaataagtttagacatatggcacccctggaagaatatttgaatttgaataattcgcgcgcctgagagctgatgttcgtattttcacaagtggtaagtgcagtttactaaataggtaaaaatgatactttcaatataatttgattaggtttagagtttgtcctatttcggttggccattggctaacactaaaagatcgccgctgccttttacaacactgcacttgcaagccgggctttgttatcgcacaaattttatgtaaacaaaagaaaacttcgatctgctccatggtgagtattccaaactaatatcctatatgttttatatcaggtgatttctgcagatcagcttagcccccctgatcatcctagtcctcgcttgcctgggaaacacggccagcgagaagttgcccaacattctgctgatcctgtccgacgatcaggatgtggagctgcgcggtatgtttcccatggagcatacgatcgaaatgctgggtttcggtggcgccctgttccacaacgcctacacgccctcgcccatctgctgtccggcgaggacgagtctgctgacgggcatgtatgcgcacaatcacggcacccggaacaattccgtaagtggtggatgctacggaccacactggcggcgagcgctggagccccgggccttgccatacatcttgcagcagcacggatacaacaccttctttggcgggaagtacttgaatcagtactggggtgctggggatgtgccaaagggttggaaccacttctatggccttcacgggaactctagatactataactacacactgcgcgaaaatagcggcaacgtgcactacgagtccacctacctaaccgatctgctaagagatcgcgccgctgactttctaagaaatgctacacaatcctcggaaccgttcttcgcgatggtcgccccaccggcagcccatgaacccttcactccggcaccaagacatgagggtgtgttctcccatatcgaagccctgcgcacacccagcttcaatcaagttaagcagggtaaggttgttatcaaatgatatctatgccaccaatatacataagtaccctttttagataagcactggttggtgcgagcagcacgtcgtctgcccaacgaaaccatcaacaccatagacacgtatttccagaaacgctgggaaacgctgctggccgtggacgaactggtcgtcaccttgatgggagtgctaaacgatacgcaatcgttggagaacacctacattatctacacctcggataacggctaccatgtggggcagtttgcacagcccttcgataagagacagccctacgaaacggatattaacgtaccgctgctaatccggggacctggaatagcacctgagagccacattgacactgccgtcagtctagtggacttggcaccgactatattggcctgggccgacatcgacacaccatcctacatggatgggcaatcatttcacgagcttttgctcaacaaaaggcgaagggttccatttttcgagcgttccctgttgatcgagtactggggcgagggaactctggccacctttaatcctgaatgcccttggccagaaaaggatcgattggcgcagtgcacccccgcagcggattgccattgccaggatgcatggaacaacacctacgcctgcttaagaaatattcgccatcgcgaggatcgcatttactgcgaatttcgggataacgaggtaaagaagcatttgacatttgccattctatatatttcatgtgtttataaatatttcagaactttttggaggcatatgacctgcaactggatccctttcaaatgaccaacattgcctacgatctgctgcccattgaacgagctttgtattcgttgcgtctcaagaatctcacacagtgttcgggccactcgtgttttgtatagatatatgcatattactcctagccaaatagtaatccaaaaccaaattcaagtccgctgggcgcatatagatttcatattcagatatcatgtgatttatgttgctatatacatagtctcatattaatcgtatttttacagtctaaaggtacacttatttgaaaccgtttcagtactgaaaacataaataagttagttgattgcgctggttaaatgcgtgagattgcttacgtgctgagcgggacgtccccttccggacacgatggtatgaccattcctatcgattgtgacagtgcgtccgtccggacgcttccaaacggagacattattgtcccaaattcctgcctgatcgtcgcgggccacaaagttctcaccctggacgcgggcatcgttgatcccacggcggaaacgttgagcggagaagccaccgttaccgaaatcaacagtgcgatctggtcgctccacatggaactgtggactgcgtcgactgcgttgaatatagacgccgccattaccaatggttacggtgcgatctgggcgtgccacatgaagctgtggactgcgtcggccacgctgaatgtagaatcctccgtttccaacgtcaacagtgcgaccgggacgctctacgtgaaactgcggactgcgccgggcacgttgtgggattcccacgctcttagctccattgggccctaaatttttggcggaaaaattgggaccactgatggtgtgggaagctgaaattatgaatatagcattaggatcttcgagaatctgtatagagacttaaacttacctggtccaccagcgttctttcggttaacaaacgtgttgcccgcctcatcggtgtacacatgctcaccccgttgaggagcgttttggaactggccacccactcccggcacgctgtaggtgccttcattctggccccttatatagacctgattgcccggtgaaccgaagacatgcggcccattgcgaccgtcgtaggtgtgttgtggttccg

SEQ ID NO: 27305 - DNA, 1546 bp, DROSOPHILA
cacttgcaagccgggctttgttatcgcacaaattttatgtaaacaaaagaaaacttcgatctgctccatgatcagcttagcccccctgatcatcctagtcctcgcttgcctgggaaacacggccagcgagaagttgcccaacattctgctgatcctgtccgacgatcaggatgtggagctgcgcggtatgtttcccatggagcatacgatcgaaatgctgggtttcggtggcgccctgttccacaacgcctacacgccctcgcccatctgctgtccggcgaggacgagtctgctgacgggcatgtatgcgcacaatcacggcacccggaacaattccgtaagtggtggatgctacggaccacactggcggcgagcgctggagccccgggccttgccatacatcttgcagcagcacggatacaacaccttctttggcgggaagtacttgaatcagtactggggtgctggggatgtgccaaagggttggaaccacttctatggccttcacgggaactctagatactataactacacactgcgcgaaaatagcggcaacgtgcactacgagtccacctacctaaccgatctgctaagagatcgcgccgctgactttctaagaaatgctacacaatcctcggaaccgttcttcgcgatggtcgccccaccggcagcccatgaacccttcactccggcaccaagacatgagggtgtgttctcccatatcgaagccctgcgcacacccagcttcaatcaagttaagcaggataagcactggttggtgcgagcagcacgtcgtctgcccaacgaaaccatcaacaccatagacacgtatttccagaaacgctgggaaacgctgctggccgtggacgaactggtcgtcaccttgatgggagtgctaaacgatacgcaatcgttggagaacacctacattatctacacctcggataacggctaccatgtggggcagtttgcacagcccttcgataagagacagccctacgaaacggatattaacgtaccgctgctaatccggggacctggaatagcacctgagagccacattgacactgccgtcagtctagtggacttggcaccgactatattggcctgggccgacatcgacacaccatcctacatggatgggcaatcatttcacgagcttttgctcaacaaaaggcgaagggttccatttttcgagcgttccctgttgatcgagtactggggcgagggaactctggccacctttaatcctgaatgcccttggccagaaaaggatcgattggcgcagtgcacccccgcagcggattgccattgccaggatgcatggaacaacacctacgcctgcttaagaaatattcgccatcgcgaggatcgcatttactgcgaatttcgggataacgagaactttttggaggcatatgacctgcaactggatccctttcaaatgaccaacattgcctacgatctgctgcccattgaacgagctttgtattcgttgcgtctcaagaatctcacacagtgttcgggccactcgtgttttgtatag

SEQ ID NO: 27306 - protein, 13 aa, DROSOPHILA
HLQAGLCYRTNFM

SEQ ID NO: 27307 - DNA, 3331 bp, DROSOPHILA
tgccaaagggttggaaccacttctatggccttcacgggaactctagatactataactacacactgcgcgaaaatagcggcaacgtgcactacgagtccacctacctaaccgatctgctaagagatcgcgccgctgactttctaagaaatgctacacaatcctcggaaccgttcttcgcgatggtcgccccaccggcagcccatgaacccttcactccggcaccaagacatgagggtgtgttctcccatatcgaagccctgcgcacacccagcttcaatcaagttaagcagggtaaggttgttatcaaatgatatctatgccaccaatatacataagtaccctttttagataagcactggttggtgcgagcagcacgtcgtctgcccaacgaaaccatcaacaccatagacacgtatttccagaaacgctgggaaacgctgctggccgtggacgaactggtcgtcaccttgatgggagtgctaaacgatacgcaatcgttggagaacacctacattatctacacctcggataacggctaccatgtggggcagtttgcacagcccttcgataagagacagccctacgaaacggatattaacgtaccgctgctaatccggggacctggaatagcacctgagagccacattgacactgccgtcagtctagtggacttggcaccgactatattggcctgggccgacatcgacacaccatcctacatggatgggcaatcatttcacgagcttttgctcaacaaaaggcgaagggttccatttttcgagcgttccctgttgatcgagtactggggcgagggaactctggccacctttaatcctgaatgcccttggccagaaaaggatcgattggcgcagtgcacccccgcagcggattgccattgccaggatgcatggaacaacacctacgcctgcttaagaaatattcgccatcgcgaggatcgcatttactgcgaatttcgggataacgaggtaaagaagcatttgacatttgccattctatatatttcatgtgtttataaatatttcagaactttttggaggcatatgacctgcaactggatccctttcaaatgaccaacattgcctacgatctgctgcccattgaacgagctttgtattcgttgcgtctcaagaatctcacacagtgttcgggccactcgtgttttgtatagatatatgcatattactcctagccaaatagtaatccaaaaccaaattcaagtccgctgggcgcatatagatttcatattcagatatcatgtgatttatgttgctatatacatagtctcatattaatcgtatttttacagtctaaaggtacacttatttgaaaccgtttcagtactgaaaacataaataagttagttgattgcgctggttaaatgcgtgagattgcttacgtgctgagcgggacgtccccttccggacacgatggtatgaccattcctatcgattgtgacagtgcgtccgtccggacgcttccaaacggagacattattgtcccaaattcctgcctgatcgtcgcgggccacaaagttctcaccctggacgcgggcatcgttgatcccacggcggaaacgttgagcggagaagccaccgttaccgaaatcaacagtgcgatctggtcgctccacatggaactgtggactgcgtcgactgcgttgaatatagacgccgccattaccaatggttacggtgcgatctgggcgtgccacatgaagctgtggactgcgtcggccacgctgaatgtagaatcctccgtttccaacgtcaacagtgcgaccgggacgctctacgtgaaactgcggactgcgccgggcacgttgtgggattcccacgctcttagctccattgggccctaaatttttggcggaaaaattgggaccactgatggtgtgggaagctgaaattatgaatatagcattaggatcttcgagaatctgtatagagacttaaacttacctggtccaccagcgttctttcggttaacaaacgtgttgcccgcctcatcggtgtacacatgctcaccccgttgaggagcgttttggaactggccacccactcccggcacgctgtaggtgccttcattctggccccttatatagacctgattgcccggtgaaccgaagacatgcggcccattgcgaccgtcgtaggtgtgttgtggttccgcagctgcaaggattataataatgttatgtaaccgctttcgcgaaatattatattatatccagaggttactacttaccgacgcagataacgccacagatagccagtgcaatcaatccaaacgatttcattgtgatctgttccagagcccagcttcaactgagtgcaatcgaatggtttctagtatttatagccggcacatagccatcgaatctggttgctgagcttgtttacaccgatcgtcaagaatttcccaaaacgtcacaatctgatctgaaatgggtgtgcgttcgggaatttctgaacagattgcgccgccctgacccgcaataagccattaagcatccacatatgctagaaatccacccatcatcccgcggaatatgtgatcgcttatttggaaaagctgccataacttgttcagtactcgtataccatgcaacttatgtcactaaattatattataatatgacaagagtattaactgcataggtctctttatttagcacgtgcttatattgtttcgtcgacttgaatcaaactgtcgggttttcttagccgccagatagttgcatttaaagtggattgcatttgacacgagaatatattcctggaagtctctggttgctactatttggtggccaacaatggcagtaaatattggctaagtgaaactcttttaagatattgcaaccccattctctgctgtcacttggtataaaacaaaatatatttttgaaggcattcctttatctttggatttaagcaaaacttgagggctatatatcagctcgactaatttaagagtgttgtctaataatttcagcttttaagtgtttttcgctttaaaagctaatgctaatctaattatatgagttattacctccgactgatagtgtaaaggtactgcgtaattaaattaaattttatttttaattttggaaaatacattgtttattcgtacgttaatataatctcatgacataagtgacattctcatgaaatttcttggaatattcgaatttaatatatatctttcgaatgcaataaccaaatctatttcaatctatttcaaacttgataagatttgttacatatttttttaagttaaagtaacacctgaccgtccattatagcgagcggtc

SEQ ID NO: 27308 - DNA, 1143 bp, DROSOPHILA
tggaacagatcacaatgaaatcgtttggattgattgcactggctatctgtggcgttatctgcgtcgctgcggaaccacaacacacctacgacggtcgcaatgggccgcatgtcttcggttcaccgggcaatcaggtctatataaggggccagaatgaaggcacctacagcgtgccgggagtgggtggccagttccaaaacgctcctcaacggggtgagcatgtgtacaccgatgaggcgggcaacacgtttgttaaccgaaagaacgctggtggaccagcttcccacaccatcagtggtcccaatttttccgccaaaaatttagggcccaatggagctaagagcgtgggaatcccacaacgtgcccggcgcagtccgcagtttcacgtagagcgtcccggtcgcactgttgacgttggaaacggaggattctacattcagcgtggccgacgcagtccacagcttcatgtggcacgcccagatcgcaccgtaaccattggtaatggcggcgtctatattcaacgcagtcgacgcagtccacagttccatgtggagcgaccagatcgcactgttgatttcggtaacggtggcttctccgctcaacgtttccgccgtgggatcaacgatgcccgcgtccagggtgagaactttgtggcccgcgacgatcaggcaggaatttgggacaataatgtctccgtttggaagcgtccggacggacgcactgtcacaatcgataggaatggtcataccatcgtgtccggaaggggacgtcccgctcagcactactgaaacggtttcaaataagtgtacctttagactgtaaaaatacgattaatatgagactatgtatatagcaacataaatcacatgatatctgaatatgaaatctatatgcgcccagcggacttgaatttggttttggattactatttggctaggagtaatatgcatatatctatacaaaacacgagtggcccgaacactgtgtgagattcttgagacgcaacgaatacaaagctcgttcaatgggcagcagatcgtaggcaatgttggtcatttgaaagggatccagttgcaggtcatatgcctccaaaaagttctgaaatatttataaacacatgaaatatatagaatggcaaatgtc

SEQ ID NO: 27309 - protein, 5 aa, DROSOPHILA
WNRSQ

SEQ ID NO: 27310 - DNA, 2228 bp, DROSOPHILA
agttagaaaacaggattgctttacgggggaggcgtatgcaaattgaatttttaaatgaactttctgttgacgaacacgagtgtgcatttaagccgcttcgcatcacaaatgggccatcaaaagggcaaaacaaacacgactagctgcaaacaaaacgtttcaaatattcaaaactgccaaggcaaccgaaacgtgcactaaaaaaatctgccgcatcagttatgtggagtttcagttgacggcctgtgacacctgatgcccacgggtcgaaatggaaaataaacaaaagaaccatttctatcaccttacaatgagaataaaccttttcctagaaatattttcaacaaatgcaagcgagagattttcgctctctctgtatgcaattccatactttgttgattcatctgcaccaacaggctttgggtgacaattttggcgacacaaagcaaccgaaagggcatacaaaattagcttgcaacgttgcaaattgcaacgtatgtgctacaaagtccaacgcacaaaaataaagtaatgggaaaacaattgtcagggcgtaaaaccaaagtgcagttttgggaaagggacctcgacagaaaatcaccctaagctagaagtatgctacaggttacattgcctatttttcggcagtatacgtagaaatatctccttctttaaaagaaaatctatcagcatattgtacaattatatgaaccttaacaaaatatcaatattatgtatgttattaacaataaataactactattataatgtcctttacagtgtattccgccaccacgtgggacaatcatgtcccgacaaggagacaatgtaatgttttgtattttagctgggttttcgtgtgcgtgagttgaatagtttggtcgcatccacagagttttgtaagtttttagttggcaatgaaagttggacagacatatagacggatagagagagagagaaggaggaacagatacagacaatgggagtgacagaggcacacttacatttgcttgtggcacaccacgcacacccagtccgtggtgcgcgatgtgaattcgcgacaggctttgcacacgcgcaacttgcagacgcgacagggggcgccacggttggtgatgcgacccagttcggtggtgcagcgggcgcagtggcgactcgggtcgctcgtgtgtgcgttgtggttgttgtgttgttcgagctgttgttgttgttgttgactgggctgcatggttgtctgttgttgatgtggttgttgtgtggcatcgagtggctgcactccaccaacgaccttggccgcacccttgcgcctcaatgcatacaattcggcgcgcaagagcctgttgttgttgaaattcggttggagttgttgatgaaaatgttgttggagtcgttgttgttgttgtgcggtgtttgttgttgatatagaatatgatgttgaagttgtggttgtaattacagtgccggttgttgaggtagttgacatggttttggagttgttgttgaaattggagtggtttcaattatgggtttcgttgttgcgtgttgttgtttaaatcacagggggttgtagtggttttgtattgggtcggttttggtttttggttccgggttgataacataattacatgacagacgcatagacagttttgttagattgttggttaagaaacgaaaacacgttacaaaaagttaacatgacattttgcgacagtcaggcaaggagagagcaagagggaaagagagtgagagatagagatagagaaagcggcaagcgtgtatggtgggttttcgggtgtgagtgtgtgtgagtgcgtgatgtatgtgtaattaaatggaaagagacaaagaataaaaagagcacacaaaaacttgtcattagttgatttagtagcaatttaatcgattttcgaatttaattttggttaatttaggttagtttgattggttaggcaacattttcacgtgcgcaatgcatttgtaaattaattaatatgattagtcatgagacaataggtcaatttaatttgttgcagcaggatgtgcacaaagtttaagcataaaataaaccaaaaatatgaatgcagatacttttgtggctgtttgacatatggagtttgagttttatttgtatcgggaatatgcatacaagtcgcctaatcgtatcccgtataccatatcttcccccaacgaaacttacatataaggtaaacaatgtatttcaatttgat

SEQ ID NO: 27311 - DNA, 228 bp, DROSOPHILA
atgcagcccagtcaacaacaacaacaacagctcgaacaacacaacaaccacaacgcacacacgagcgacccgagtcgccactgcgcccgctgcaccaccgaactgggtcgcatcaccaaccgtggcgccccctgtcgcgtctgcaagttgcgcgtgtgcaaagcctgtcgcgaattcacatcgcgcaccacggactgggtgtgcgtggtgtgccacaagcaaatgtaa

SEQ ID NO: 27312 - protein, 75 aa, DROSOPHILA
MQPSQQQQQQLEQHNNHNAHTSDPSRHCARCTTELGRITNRGAPCRVCKLRVCKACREFTSRTTDWVCVVCHKQM

SEQ ID NO: 27313 - DNA, 5227 bp, DROSOPHILA
tcatcaaaattccaacccaccggatgttctccaattctccatttctccaatttgattaacaattttaaaaagcgagaacgagggagagagatgactaagagagagagagagagagagagagaacaataaatcatgtagtaaatgtggtgtaaagacaaaatgtattataataaaaaaatatatgcttttggcttaaacacgggtgacataagttagacataagaattattgcatttaattacacgatcaattcgaatcctattttaaaatattacataataaccgtataataagattaattaacaagaaaaagaactgcaacgattattccgtctgttccacgcaatcgcctccatgcctttcctctaggatttgtcttggctttctatttcatttcatttagtatcgatcgtattcaccttttgatatatattttttttacttttcggcagagaaagtgctgctaagtctgatgattttctgcggtttccaaatatcttaatacacatatacagacaataaaaaaaaattcgcgcttacaattaaacggaacaaaaacaagacaaacatataaagtacacactattacataagaacaaataataatccgcagttttgctgatcgatcgatcgttctaaggtttccgttcctctggattgcaaattggataattgggttatcgtcgtgtggtatttatatgtggtgagggcattccaaaaacttatgtttgatggtggtatttgtgtttacgttttctatcaacttgttaaactctaaagaacgacgagcatcgaagtctgtttaatgccagatcaaggccaaagcaatttctcgtcaaatttcgcattgcatgtgcacttactataaccatttaaattgcgcttgcatctatgcttttatctctgctatctgtattttatcggttttgtttgtttgtttgtttgtgtttctattctgtttgtttctattttgctcttccatccgttccattttttttttgttactgtggtctatatatctgctatgatctgttgcgatcgttgctccaatccgttttgttatcagctactgatggctaaactaagagtttttaaatcttgtttttctttctgcttacattagtgtatatatatatatatattatgtatatatttatatgtatctgcgtgtgtgcgctgatcatcacacgccatcatcgaatcactttctatcttaaaatccaattatcatttatcaattatgtatatatatatatagatatatatatatatatattgttgctttttgttccatcgccaactgaaggggtatggtgaaagtataagtgagtgtgtttgtttggggaaattgggtggcaggaaaatggattctcgaagcatttgtattaggctgttgtcagtgttagtgttagcggtagttccgtaggctggcggtccaaccgatattataattccatgtccctggcctcatcctcactgtagtcggacatgctcgactcgctgtcgctgctctcccgctcctgctgcgccgcccgcaacgcgtcctcggtggcatagcgctgcacatagtcggccaccttgcgatgatactcctccggctcgtgcaggtacaatgcggccgcatcccgattgagcggatcgaccggattgggatatgtgagcagctgcggcaagaacgattcaaatatgttcgatagatcgtacaacgccgtccaggcctgattgataacatccaggcacaccgtacccgaggattcgtcaatgttcggatggtagatcttgttcacaaaaccaatgctcggtgacttgaagggatagttgtcgggcaggtagacgcgcaccttccacacgccgccctcgtagggcgtctccgttggaccgaagaacttgacgtggaactcgttgaggcctcccaggatggtcacctcgtgctttgattcgatcagcttgatcacatcgttgtccatgcgtcgctttccggcactgggcgaggacattttgttggtttatttgggattgtagttgcctggcttttgatttgattggtttggtttgatttgatttggttttggagtggtcgtctcctcgttgtttttcactaaggctaaggcggtgttatctttgttatctataagttgtatgcttaatgttgttcctttgaaatattgctattgagttacatccgctatccgcttccggttgcccagctgctgctccgccagccacgaactgctccgcattcgtcaactctcactggcaccgtccagagcaaaacgggagctgcctgcaatggcaattaatggacacaaggataagcaaggatattcaaattagagataggtcaggtggtgtcatctatagcatagagacatcaacttaaggaagtattgggatgttacttgaatacctatttacaattttgctttctaagtttatagtttttcagacgttatggagttaaaaatatagataggatatttttaaggaataaatatattaaattttaaagtgttcctaacatttctaattttatccttttttataagatgttctctaaaaatgcacatttaattactggtaattttatcacgcaaaagtttaacttagccaattgggactgtggcgccaagtcaggggatatgatctggaggaggtcgagttaccttctgagttatctatgtcccgtatatatatttatattcatggttatgtaggtcaccagcgaatctcttgctctcgcacacatacatagagaacatgcacatgcatacttggcctaaatgaggaaactatgtcagcaatctgtgacgtcgtcgcccaaatccacccactaccactcccgctttctctctccagctctctcactctcattgccatttgcaaaaatcgccgtccttcgaaacggatttcagcggacttttgctgcatactttcgggataccgttatgctctattcccctcccctccacagactctttcatcctttctctcaccactcacttgctcttggcgatttcgtttcaatttcaattccgtttcccgtttcggtgggtgagggcttttgtgctagttggttggttgggtggctgttgttttcaaacaagctcagctgtttaatgttgttgctcaaaagtcacggagcactgccagagagagagagagagagagccagaaagagagtagaagaggggcagccccaccgcaatcttgaaatcaacaaatgtacagtggggatgtgagaaacatgagcagatcgatcagcaacgtaaatcaaacgaacgttacggaattatgaaaactgttacacaaatttcaggaaaaataaaattttcaaattataatatattctttctgaatatatcgctttaccccactgtgccccattctatggctctccctctctcttcaccactcttctacgctttgggatgagctaattctgctgttactgctgttactctcttgtactttgtcaagtgtttgtatgtgattgtatgtttctgtgtgtgtgtgtgtgtgtgtgtgcgctggctcccctatcgccccctatctctttttttccttatggccaccacatatcaaaaatctttccgtttctgtctttctgtcacggtttggcttcgttagtttaacaaattgtgaaattctctttcgatttctgtgtggagaagcattactgtgcctgttgtttttgctttttattggccttactgtacgcaataagcgaagtaatactgtctctcgtcgctgtcgctgttgttgcctttgcattgcattgcttttgtgcaagactcttgagtggaagtggaagtgtgcgtgtgtacttgtgatgccaccacatggaagatcaccaagcaaccaagtcagcagcagcaacatcaataataaacaaacaaaataataaaagtcagctgcaatttgatgcttttgttgttgtctcttggaggtggaattcttttcactctttatgaatgtcttcatttataatatcaccattggcatcaccgttaaataatcacacacttattaaatatttaaatttaaactttttgcaaatatacctatataagacggatttttgtgactttgttatttacttgcaactattgttgtggtttttggtgatgatgtttttagttgttgctggccctccgtctcccctatccacatatatcagcctacatatgtgtgtgttttcgttttcgctcgttttgttgtctacttcaactagttactgaaaattaactggcaacagagtttcgagcccccaaagcagaaagcagaaagcagcgcacgttggagctcacgagcatctgacggcgacagcgacgccagcataaagcagagagcgacaatcgggagagcaagcgcaaaagagagaaggttggtgggggctgacgggtggaagaagagggacgagggagagagagattgctgagtgcagtacacgggaaaaactaaactgcgattcaatttcaaattagaaatatatttgcgtatggcagctccaaacacttaatgagtacttaaataaaggcaatataattataaaaaagtaataaaatagttaccaaattcctcatataaacatattgaaaacggtgaaatagaaacaaaatgtagtctgccgaatatattgcatacttcaaggcaaaaccagatggtaaatggaataaatttgttagcttctttacgttaaatttttaacttcttatgtggctcttttttcttagtgtaatggacccccttcaaaggaaaatcataataacaaagcgatgagcaacaacaaattggacgaagagagcccctaaagtaaagcaaagcaaagcaaagaaaagctataatcaaggacagcgacagctgtgaaatgcagcaaaggcaaagcaaagccagaaaaacaagaagctagagaaagaaatgaaacgggaaatggtaataggagggggagtgggctgaaagggtagagagacgggagaggctaaaaagccgaagtggcgatgcccttcaaaattgcacacatgtcactgccttagtgtgtgcgtgtggagcctagcaacaaaatatatacaaatacacatgccaaaagcaaatgaaggaggagatttaacgaggtcaaatgcaacggttaagcgaaaggttcgaaagcaaactcaaaatcaaagtcaaaaattaggaagacgtcttagtggatttcgtttttcgtgtttttgcaacctccccccacaca

SEQ ID NO: 27314 - DNA, 1414 bp, DROSOPHILA
ttgaagtagacaacaaaacgagcgaaaacgaaaacacacacatatgtaggctgatatatgtggataggggagacggagggccagcaacaactaaaaacatcatcaccaaaaaccacaacaatagttgcaagcagctcccgttttgctctggacggtgccagtgagagttgacgaatgcggagcagttcgtggctggcggagcagcagctgggcaaccggaagcggatagcggatgtaactcaatagcaatatttcaaaggaacaacattaagcatacaacttatagataacaaagataacaccgccttagccttagtgaaaaacaacgaggagacgaccactccaaaaccaaatcaaatcaaaccaaaccaatcaaatcaaaagccaggcaactacaatcccaaataaaccaacaaaatgtcctcgcccagtgccggaaagcgacgcatggacaacgatgtgatcaagctgatcgaatcaaagcacgaggtgaccatcctgggaggcctcaacgagttccacgtcaagttcttcggtccaacggagacgccctacgagggcggcgtgtggaaggtgcgcgtctacctgcccgacaactatcccttcaagtcaccgagcattggttttgtgaacaagatctaccatccgaacattgacgaatcctcgggtacggtgtgcctggatgttatcaatcaggcctggacggcgttgtacgatctatcgaacatatttgaatcgttcttgccgcagctgctcacatatcccaatccggtcgatccgctcaatcgggatgcggccgcattgtacctgcacgagccggaggagtatcatcgcaaggtggccgactatgtgcagcgctatgccaccgaggacgcgttgcgggcggcgcagcaggagcgggagagcagcgacagcgagtcgagcatgtccgactacagtgaggatgaggccagggacatggaattataatatcggttggaccgccagcctacggaactaccgctaacactaacactgacaacagcctaatacaaatgcttcgagaatccattttcctgccacccaatttccccaaacaaacacactcacttatactttcaccataccccttcagttggcgatggaacaaaaagcaacaatatatatatatatatatctatatatatatatacataattgataaatgataattggattttaagatagaaagtgattcgatgatggcgtgtgatgatcagcgcacacacgcagatacatataaatatatacataatatatatatatatatacactaatgtaagcagaaagaaaaacaagatttaaaaactcttagtttagccatcagtagctgataacaaaacggattggagcaacgatcgcaacagatcatagcagatatatagaccacagtaac

SEQ ID NO: 27315 - protein, 183 aa, DROSOPHILA; identical to SEQ ID NO: 3759

SEQ ID NO: 27316 - DNA, 9030 bp, DROSOPHILA
ttaggggacgatactcttcaatttccccactgtgcgcggcgactgaggcagcggcagcggcggcggcagaggcgggcgaatgggcgcttaaggccaatcaacgcagcaaattttcaaacagttgacttttcgagcctgagctgcaacgacgacccacgacgaacggaggcccgacggacatataagaagagagcgagttgtgtgcgggagagagctgagaagaagcggaggaaaaataactgtttctcgctcaattcgcacgccagtgataaaaacaacataatctcgacaagattgcaaatcgcaagatgccaactctgggtctcctgttcgcctccatcggcattgccgtgctggcgatgggtgtgccgcattgcaggggctacaccatcaaggaggacgaatccttcctgcagcaaccgcactatgctagccaagagcagctggaggacctgtttgctggcctggagaaggcgtaccccaatcaggccaaagtccacttccttggtcgatctctagaaggacgaaatctgctcgccctgcaaatctcgcggaacacccggtcgcggaatctccttacacctccagtaaagtacatagccaatatgcatggagacgaaacggtgggcaggcagctccttgtttatatggcacaatatctgctcggtaatcacgaaagaatcagcgacctgggccagctggtcaacagcaccgatatctacttggtgcccacgatgaatccagatggctatgcgttgtcccaggtaaagaacgcaccgtcgcttcacctgttgtgttgttttgtccaactttcgggtaaaatcaataagtggaggagccgaagtgggagggccagtggatgggaacgaggctataagcctgagagaagacaatattgcagcagatgagagtggaaagcagttacaggatagagtttgctttattcccagccatttctgaaacccgataactaagctcatgcatatcaaacgtcagagttcataagtgttatctatacccaaacccgttcacacctccaacccttttttaaactttatacatacgcatgaaaaaggttgataaaatgttgggaagtaattaaaaagaatgctcaaatgaacacttgtttggtaagtcgcaaaaatgaccaaataggtatacatcttaccccaaactttgcaccttttaagccgtttcgttactccaaaacaaactctgctccccgaatgtttgcatattgcacacatacgcaccttttttaaactctgctcgttgtttgtttatcattttcatcttcaacgatgaaaatcgagcagtaagcatacgtacgtaattaatatattacttccccattcattttcattgtgctttatacatcacatggcatattcatctgtacagaaatggcccaaaaggaaaaaaaaactaagagtatgttgtaaaggatttttaaaaacgcgctatattctcttacacttggggaacttaagttattcttatgaacaattataaagttttaaatcacattttataaagaaacgaaaaacgtcaaactttatctgtagtacaagtaatctgtattctgtagaattcaaaaattcccattattcattccgtttaaagtgctaatgcaaatggcgatttctttgcggtacttaggcttccatttctgcacggattgtactttttatctgctttatcccacgtctatttgctagatttgttgcacattatggtgtgcggattttcattgattgattgttacgttgttctttacggagaaattgggtaaaaccattgcacaacattttttagcgaacttcgacgaacccttttcttcaccgcgattgtgttgtaatcattcagttgacacctgactgccatgctaaatggacaattccggtcagaactgacctgcatatcaatcagcccataacagagtgaaagagaaacttttaagtttagcgtaaaatcgtcattgatcaaaatcatcagcaaacgctttctgctgaaaatgaaatgatgatccaaataggtgcatatagcagcatttgagtatctgtaagctaattatctaaatgtatattgaatcttttaaagcttgctggccattaaaggtattatatgattttctgtgcaggaaggcaactgcgagtcgctgcccaactatgtgggtcgtggcaatgcggccaacatcgatttgaatcgcgatttccccgatcgcctggagcagagccatgtccaccagttgcgcgcccagtctcgtcagccggaaacagcagccctggtaaattggatcgttagcaaaccgtttgtgctctccgccaatttccatggcggagctgttgtggccagctatccctatgacaactccttgtaagtcctgcaaagggatgtttatccctgacttggagaaaaactaacaacttttcaactttgcagggctcacaatgagtgctgcgaggagagtttgactccggatgatcgggtcttcaagcagctggcccacacctattctgacaaccatccgattatgagaaagggcaacaattgcaacgatagcttctcgggaggtatcaccaacggagcccactggtatgagttgtccggtggaatgcaggactttaactatgcgtttagcaactgtttcgagctgaccatcgagttgtcgtgctgcaagtatccggcagcaagcactttgccccaggaatggcagcggaacaaggcatccctgctgcagctgctgcgccaggcacatatcggcatcaagggcctggtgaccgatgccagtggctttccaatagccgatgccaatgtctacgtggctggactagaggagaaacccatgcgcacttccaaacgtggcgaatactggaggcttttgaccccgggactctatagcgtgcacgcctccgcttttgggttggtcatctgcttatttctatcctggcatgcttgctaatgttgtaattattctataccccaatgcagttaccagaccagtgccccgcaacaggtccgggtgaccaacgataaccaggaggccttgcgcctggactttaagcttgcgcccgtcgagacgaactttgatggtattagcagtttttacagtccctattatttctagagagggatgcaacggaaatacctatatatatgcgcatatatattatattgggcagttccaaaatgctatacatatatccacatttagcgatgcatagtattctctgctctcctgccctctccgcactatccttgtactatatatgttatctccgccattcccgaatccagatatacaaccattttgcatgttcatttgctccctctcatttagaacctttatttgtttaccgcgagagctagcagaaaataaacaatgttggctgtcgtgtggatgaattggtttggttttgtctcgaatcttttgtacatacacttttttaatttatcttttaaaaacttctgtttcatttttatgtttttttcgcattttcatacgcttatatgccagcctatgttccttccacgccattacttcagacgcgcacatatttagtggatgcttgatttgtatatagagaacgtattaagaacaaacacgaagaaatagcaaaccaaataacgaaatgaaataaattaaggaaataagcgaattgtacttaggcaatatgcagaaattggcccacttatggtcatcgaatgacacattcccaatacgaatcggttatagctttatcaatattccccttatcttccgcacaccctaaaacatattgtcaagtattttagcaacgatgcaaaaaaactatgataaatccaaagcccactacatgaacctactgctaaatatactgtatactaaatagactgtatgcgcactctatggttagtcctatctggaatgattgttgagcatttatccaaaaacaaaagaacctacatttgatagtgaggcgaaattattatcaattccggtccgacgcgtgctcacgcatggcttttgatatatactatagacgagaacaggttacaatcaaatgaagaatattgcaatggcgagaaccttgcgaagtataaataaaatattaatgttcgcttgctgcgttttattttcattcattgctctttaattcggtctctaaatgaattttttgttttcgagcacattattggtgttttcaaaatctggtgcagtgttttattaatcactcgtttttgaaaaaaatgagattttatttgagatcattttcaattcattaatcatcgaattcaggacatattttttctttattctgatctttagcaattttactttctttttggtttcgcagtacgacttagtttttccatttttcttttgtttcaaaggccttatatgtagcctaacggtggagtcatggttagggacgttcaagaaactcccagtcacatctaaatgaaatttaaaatgtatctttcactaagtacctaaaaaaaaaaaaacaacaatttaaagcgtctgtgccaaatgtgaagatttcggaatggatttgtttatatatatatgtatgaccagcatacaaaagtcaagcagtttctttggtattttatcttaaataaatgtgaactatgaaattatggcaaaataaacgaacaaaattatgaatttgcttgtgcttctgattctgttgctaactctatctgctcccgtcgctagacgcttagacgcactgcatcatattctcaccggaacccgcatgatgcaccccattacaaaaactggcattgcactaaagacaaccttacccatttccgtttccgctcttcctatcccgcaggcaacttccggaaagtaaaggtcgagcgctctgagcctccacagaagctcaagaagcagttcaatgggttcttgaccccgactaaatacgaacaccacaactttacggcaatggagaggtgagagtttttcctaaaatgtacaaatatatttcaacggatcaaattgttcatctgcggaatgtgtcactcatgatcttcagaagttctaatttttcccttttattcgtaaattctttttcatttccagctatctgagggcgattagcagcagctatccttcccttacacgcctctacagcatcggtaaaagcgtccagggtcgtgatctttgggtgcttgagatttttgccacgccgggttctcatgtcccgggggttccggagttcaaatatgtggcaaacatgcatggcaacgaggtggtgggcaaggaattgcttctaatcctcaccaaatatatgctggaacgctatggcaatgatgacaggattaccaagctggtgaatggcacccgtatgcattttttgtacagcatgaaccccgatgggtatgagatctccatcgagggcgacagaaccggcggagttggaagagcgaatgcccatggaattgatttgaacagaaacttccccgatcaatatggcacggaccggttcaataaggtgacagagccagaggtggctgccgtcatgaactggacactgtcgctgccgtttgttttgtccgccaatctccatgggggctccttggtggccaactaccccttcgacgataacgaaaatgattttaatgatccgtttatgagactccgcaattctagtatcaatggccgcaagccaaatcccaccgaggataatgctcttttcaaacacctcgccgggatttattcaaacgcacaccccactatgtacctgggccagccatgtgagctcttccagaatgaattcttccctgatggcattacgaatggtgctcaatggtatagtgttactgggggaatgcaggactggaactatgtgcgggctggatgcctggagctaaccatcgaaatgggttgcgataagtttcccaaggccgccgagctttcgcgatactgggaggatcatcgcgagcctctgctacagtttatcgagcaagtgcattgcggcattcatggatttgtgcatagcaccattggtacgccgattgcgggagctgttgttcgtttggatggagccaatcattcgacctacagtcaagtcttcggtgactattggaagctagcgctgcctggtcgacacaatctcactgtgttgggggacaactatgcgccactacgaatggaagttgaagtacccgacgtccaccccttcgaaatgcgaatggatatcaccctcatgccagacgatccccagcattgggcatccgccaatgactttaggattattgaaaacgtagtcaacacaaggtatcacactaaccctcaagttcgcgcacgcctggcggagctggagaaccaaaatggacagattgccagctttggatatgccgattctgaatttggcacaatcttcaattacctcaaaatgacatctgatgtgagtgtgtgattatgtcgggaactcgtattagcttagctcccactcatttgattcttttgcagattggcgagcccgaggaacacaagtacaagctgttggtggtcagttccctatacgatacaacggctcctctgggaagggaaattttgctcaacctgatacgacacttggtcgaaggatttaagctgcaggacacgtctgtagtcgagttgcttaaacgaagtgttatctacttcctgccgcagactagcaagttccaaaatgtctttgacatgtacaacagcaagtgagtttgggtggactcgaaacattagtgcttagaatcttatttgttctctgttaatccacaacagcacctccatttgcgacccagtcctgggggatgagttagcagagcgcattcttggcccggagacagaccaggccaaggacgtattcctgcaatttttgcgtagcgaacgctttgatttgatgcttacctttggagcaggcaactccgacttgaactatccgaaaggggactcggtgctagtgaagtttgcccacagaatgcagcgaacggagttcaactactcgcccctgcagtgccctccatcggccacgagacagctccaccgggagaccaccgagagattgaccaatatgatgtaccgcatatacaatttgcccgtttacaccttgggcatttcctgctgccgcatgccgcaccaaaagaaaatcgcttccgtttggcgcaaaaacatcgataagattaagaactttttggctctagtgaaaaccggagtaagtggcttggtgcagaacgataaaggacaaccattgagggaggcctatgtccgattgttggagcacgatagaatcattaatgttaccaagaatgtggcgagattccagttgatgctgccccatggtctttatggcttggaggtaactgctcccaactacgagtcgcaaatgattaaggtggacgtagaagatggtcgagtcacggaattgggcattatacgcatgcatccattcacgttgattcgtggcgttgtcctggagctgccaaataacgataacagagccaccactagcattgcaggagtggtgctggatgagagcaaccacccagtgcggaacgccaaggtctcggtggtggggcagactcaattgagaaactttacaggcagcatgggacagtatcgtatatcggcggtacccttaggcaccatcactctaaaagtagaggcaccgcggcatctggaggccacccgacaaatgcacctgattcagggcggcttggccacagagaacgtggtctttcacctaaaagttaacgagcatgtctttggattgcctcgctttttgttcattttgtgcgccagcgttctgatcattgttggtgtcatcgtctgtgtgctatgtgcccagttttggttctatcgacgccatcggggggataagccttattataacttctcactgctgccgcagaggggtaaggagcagtttggccttgaggacgatgatgggggtgatgatggggaaacggagctctttcgatctcccatcaaacgtgagttgagccaaagggcacacttagtaaacaatcaaactaattattccttcattattcaggcggcatgaccatacagccgtactttgatgaggagcagctggagcggatcctgcacacggatgacgatgacgacgacggaccgcacatggagccagaacttgatgtggctgacgatagcgaagacgacatagtgatgttgcataacaacgggaacaagagacggcactagatgttctgatagatgttcccaatcaaacacaatctcgagtgacacaaccaccagggatcacctaatccccgatcgactttaaccacacacaacataactgtgattcaaaacgttttcaagagaaaccaacgctctccttttttgttatttttgtgtaatatctacccttaaaaggtgaaacactttatttttgagttttagtgttactgagcttgcacctagaatgcatcacaatcgtcagctttaaatagaaaatcctactacccactcggcaaatctctcgttcatgaccgtttatatagagatatacatttttatgttcagccaaaagaactgtatgcgtaaatgtaacttaaactaaagactgagagcctcataattctagcaaaaaaaaaaccataacaatttgtgaaaaaatattaaatctaatctagctaaaaagaaaccgaaaatcacagccaacaacagcagaagattgagtttgttttaatgaaaaaattaactaacaatgaatcaaaaacaatgtcaatattaaattatactaatttattaagcattgtcttcagaaagctaaattacttagcagctcattatacagaaaattgattcttaaagattaattttaagcttactgttttacaatttattaaaccatatttagtagcttttatcggaaattgaatggttactcccatgaactctaaccctctgtatgctgaaatcaggctttctaaaaatgattttaaatgctggaaaaaaatgtgcaagatcataacaaaaacagttaacagcttttgtaatattttgaatatgcccaacatataaaattcaaacgt

SEQ ID NO: 27317 - DNA, 3892 bp, DROSOPHILA
cataagtgttatctatacccaaacccgttcacacctccaacccttttttaaactttatacatacgcatgaaaaaggttgataaaatgttgggaagtaattaaaaagaatgctcaaatgaacacttgtttggaaggcaactgcgagtcgctgcccaactatgtgggtcgtggcaatgcggccaacatcgatttgaatcgcgatttccccgatcgcctggagcagagccatgtccaccagttgcgcgcccagtctcgtcagccggaaacagcagccctggtaaattggatcgttagcaaaccgtttgtgctctccgccaatttccatggcggagctgttgtggccagctatccctatgacaactccttggctcacaatgagtgctgcgaggagagtttgactccggatgatcgggtcttcaagcagctggcccacacctattctgacaaccatccgattatgagaaagggcaacaattgcaacgatagcttctcgggaggtatcaccaacggagcccactggtatgagttgtccggtggaatgcaggactttaactatgcgtttagcaactgtttcgagctgaccatcgagttgtcgtgctgcaagtatccggcagcaagcactttgccccaggaatggcagcggaacaaggcatccctgctgcagctgctgcgccaggcacatatcggcatcaagggcctggtgaccgatgccagtggctttccaatagccgatgccaatgtctacgtggctggactagaggagaaacccatgcgcacttccaaacgtggcgaatactggaggcttttgaccccgggactctatagcgtgcacgcctccgcttttggttaccagaccagtgccccgcaacaggtccgggtgaccaacgataaccaggaggccttgcgcctggactttaagcttgcgcccgtcgagacgaactttgatggcaacttccggaaagtaaaggtcgagcgctctgagcctccacagaagctcaagaagcagttcaatgggttcttgaccccgactaaatacgaacaccacaactttacggcaatggagagctatctgagggcgattagcagcagctatccttcccttacacgcctctacagcatcggtaaaagcgtccagggtcgtgatctttgggtgcttgagatttttgccacgccgggttctcatgtcccgggggttccggagttcaaatatgtggcaaacatgcatggcaacgaggtggtgggcaaggaattgcttctaatcctcaccaaatatatgctggaacgctatggcaatgatgacaggattaccaagctggtgaatggcacccgtatgcattttttgtacagcatgaaccccgatgggtatgagatctccatcgagggcgacagaaccggcggagttggaagagcgaatgcccatggaattgatttgaacagaaacttccccgatcaatatggcacggaccggttcaataaggtgacagagccagaggtggctgccgtcatgaactggacactgtcgctgccgtttgttttgtccgccaatctccatgggggctccttggtggccaactaccccttcgacgataacgaaaatgattttaatgatccgtttatgagactccgcaattctagtatcaatggccgcaagccaaatcccaccgaggataatgctcttttcaaacacctcgccgggatttattcaaacgcacaccccactatgtacctgggccagccatgtgagctcttccagaatgaattcttccctgatggcattacgaatggtgctcaatggtatagtgttactgggggaatgcaggactggaactatgtgcgggctggatgcctggagctaaccatcgaaatgggttgcgataagtttcccaaggccgccgagctttcgcgatactgggaggatcatcgcgagcctctgctacagtttatcgagcaagtgcattgcggcattcatggatttgtgcatagcaccattggtacgccgattgcgggagctgttgttcgtttggatggagccaatcattcgacctacagtcaagtcttcggtgactattggaagctagcgctgcctggtcgacacaatctcactgtgttgggggacaactatgcgccactacgaatggaagttgaagtacccgacgtccaccccttcgaaatgcgaatggatatcaccctcatgccagacgatccccagcattgggcatccgccaatgactttaggattattgaaaacgtagtcaacacaaggtatcacactaaccctcaagttcgcgcacgcctggcggagctggagaaccaaaatggacagattgccagctttggatatgccgattctgaatttggcacaatcttcaattacctcaaaatgacatctgatattggcgagcccgaggaacacaagtacaagctgttggtggtcagttccctatacgatacaacggctcctctgggaagggaaattttgctcaacctgatacgacacttggtcgaaggatttaagctgcaggacacgtctgtagtcgagttgcttaaacgaagtgttatctacttcctgccgcagactagcaagttccaaaatgtctttgacatgtacaacagcaacacctccatttgcgacccagtcctgggggatgagttagcagagcgcattcttggcccggagacagaccaggccaaggacgtattcctgcaatttttgcgtagcgaacgctttgatttgatgcttacctttggagcaggcaactccgacttgaactatccgaaaggggactcggtgctagtgaagtttgcccacagaatgcagcgaacggagttcaactactcgcccctgcagtgccctccatcggccacgagacagctccaccgggagaccaccgagagattgaccaatatgatgtaccgcatatacaatttgcccgtttacaccttgggcatttcctgctgccgcatgccgcaccaaaagaaaatcgcttccgtttggcgcaaaaacatcgataagattaagaactttttggctctagtgaaaaccggagtaagtggcttggtgcagaacgataaaggacaaccattgagggaggcctatgtccgattgttggagcacgatagaatcattaatgttaccaagaatgtggcgagattccagttgatgctgccccatggtctttatggcttggaggtaactgctcccaactacgagtcgcaaatgattaaggtggacgtagaagatggtcgagtcacggaattgggcattatacgcatgcatccattcacgttgattcgtggcgttgtcctggagctgccaaataacgataacagagccaccactagcattgcaggagtggtgctggatgagagcaaccacccagtgcggaacgccaaggtctcggtggtggggcagactcaattgagaaactttacaggcagcatgggacagtatcgtatatcggcggtacccttaggcaccatcactctaaaagtagaggcaccgcggcatctggaggccacccgacaaatgcacctgattcagggcggcttggccacagagaacgtggtctttcacctaaaagttaacgagcatgtctttggattgcctcgctttttgttcattttgtgcgccagcgttctgatcattgttggtgtcatcgtctgtgtgctatgtgcccagttttggttctatcgacgccatcggggggataagccttattataacttctcactgctgccgcagaggggtaaggagcagtttggccttgaggacgatgatgggggtgatgatggggaaacggagctctttcgatctcccatcaaacgtgagttgagccaaagggcacacttagtaaacaatcaaactaattattccttcattattcaggcggca

SEQ ID NO: 27318 - protein, 1259 aa, DROSOPHILA
MNTCLEGNCESLPNYVGRGNAANIDLNRDFPDRLEQSHVHQLRAQSRQPETAALVNWIVSKPFVLSANFHGGAVVASYPYDNSLAHNECCEESLTPDDRVFKQLAHTYSDNHPIMRKGNNCNDSFSGGITNGAHWYELSGGMQDFNYAFSNCFELTIELSCCKYPAASTLPQEWQRNKASLLQLLRQAHIGIKGLVTDASGFPIADANVYVAGLEEKPMRTSKRGEYWRLLTPGLYSVHASAFGYQTSAPQQVRVTNDNQEALRLDFKLAPVETNFDGNFRKVKVERSEPPQKLKKQFNGFLTPTKYEHHNFTAMESYLRAISSSYPSLTRLYSIGKSVQGRDLWVLEIFATPGSHVPGVPEFKYVANMHGNEVVGKELLLILTKYMLERYGNDDRITKLVNGTRMHFLYSMNPDGYEISIEGDRTGGVGRANAHGIDLNRNFPDQYGTDRFNKVTEPEVAAVMNWTLSLPFVLSANLHGGSLVANYPFDDNENDFNDPFMRLRNSSINGRKPNPTEDNALFKHLAGIYSNAHPTMYLGQPCELFQNEFFPDGITNGAQWYSVTGGMQDWNYVRAGCLELTIEMGCDKFPKAAELSRYWEDHREPLLQFIEQVHCGIHGFVHSTIGTPIAGAVVRLDGANHSTYSQVFGDYWKLALPGRHNLTVLGDNYAPLRMEVEVPDVHPFEMRMDITLMPDDPQHWASANDFRIIENVVNTRYHTNPQVRARLAELENQNGQIASFGYADSEFGTIFNYLKMTSDIGEPEEHKYKLLVVSSLYDTTAPLGREILLNLIRHLVEGFKLQDTSVVELLKRSVIYFLPQTSKFQNVFDMYNSNTSICDPVLGDELAERILGPETDQAKDVFLQFLRSERFDLMLTFGAGNSDLNYPKGDSVLVKFAHRMQRTEFNYSPLQCPPSATRQLHRETTERLTNMMYRIYNLPVYTLGISCCRMPHQKKIASVWRKNIDKIKNFLALVKTGVSGLVQNDKGQPLREAYVRLLEHDRIINVTKNVARFQLMLPHGLYGLEVTAPNYESQMIKVDVEDGRVTELGIIRMHPFTLIRGVVLELPNNDNRATTSIAGVVLDESNHPVRNAKVSVVGQTQLRNFTGSMGQYRISAVPLGTITLKVEAPRHLEATRQMHLIQGGLATENVVFHLKVNEHVFGLPRFLFILCASVLIIVGVIVCVLCAQFWFYRRHRGDKPYYNFSLLPQRGKEQFGLEDDDGGDDGETELFRSPIKRELSQRAHLVNNQTNYSFIIQAA

SEQ ID NO: 27319 - DNA, 10386 bp, DROSOPHILA
taatcgttgaaaagggtgttaagggtagatagatacgcttcatatcctataaattcttgatcagggtcaaaagcctagtcgatctggccgtgatcatctgtcaatatgaccgcctcgatctcgatctcactaaagaaagttgagattagggatgcagacgtagacgcatcgcaagtttttttcccgcattgttaccacgcccactctaaagccagcccacaaaccgaacaatacggcgtcgcccacacttttaaatgttatttattatgagccttataaatttctatcgacttgcctcgcccactcgaactcccagaaacttagcgaaactgtccagcccacactttttcgttttcttattagtaacgataaattttccttgtctattgctattgattcgccacagaaatgttttgtatgcaatcccacagttgagttacgggtatctgatagtcgaggaacaaataattacctgttaagaatttggtgttatttttatacccttgcaaaagataatgaaattttattgacaaattttttacaacattaagggaatttatttttcatcttcgactgttgccgaatattccctgcgtgccataactttacaccttatataattcccgatatggacatggctagatcgaatctcccaatgattctcatcttaaatacataatccttttgggtggaaaacatagtacatcctgccttggtcctactctcgccgaattggtaatcataaccacctcctcgtaggtaactattagtaaacaaatatataaaaagatcaaaaaattcaaatgaagcggtaaataagcaaacgaaatatcgatgagcatgaactaaaaatcgaattcgaagaccaaaaggagctaacctaaaatccaaggctatcgatacttaccgagcgcacatcgatagcaagaaatcgacacaatgagtaacaatcgacatcggtccacccctgtctcgcagaaaacaaagaccaaaaaccaccaaacagcaaaggcggtgtatttcgatagcggaacgcgaaacaatcgacttcacctgtgcgcgtgatttgtgctaaactcattgtgaaacgagcgcaccgaaagtcggcgagttttctggcggatatttaggaggcccccaccgcagccactcacacacgcaaacatgaggctgtttgcggcagcaacagttgcgcttgtattgcttctgggccaagcagctggcgaggagcttgcggaggagcgagcgggacaggcacagggcgatgcggaggtgagtgtgcgtgtgttgttttgttatgattcagcagcgcggctatttccacatcaaaacgctttcggggagcaaaaagtaacgtaatccccttcaaagtgactaaggcttgtgggcagggattacggttcgacattaagcgggaaatatgcaattttacagttaactctcactcgctctcacccgcttacccaaaaacacatacacaggagctcacctaaaccgaacacacctatactcacacacattcgccatattggctgacgtcccttgttttttcctctttgaagtacactgacaagaaaggatgtcaactgtccagcctcagtggctgaagtgcaatttcaacaatgattttcatcttcaatgaaatctgcgatattccaaacaaaaaatgtttaattgcgttttaaaaaatagcccattcttgctactctatttctctgaagagctttattttttcagctttccggtcagtgctctactttcctcttttcgcttttctacgcctgttttggcctttgtttattctgcgacgtgtcagctgtttgcttattttgaccgatagaaccccattgatccccagactgcgttgtttttgcaactgcttcttatcggggtattttaataggccccactagtccgtttaaaattgctttgtgcccggaattgcgttttaatttctgcgtttaagtgcacttccccacaagcggaaggggaatttaaatttgcaaggcttttttttacgtccgttcaaacgcaggccactgttttttcttttgcggaaagccttgcaaatcgaatgattgctagcaagtaactcaataggtagttatgaagctaacgaaaagaaatgggattcatctctccatcaagcaccacctcctatattaagtttgtcccaaccatccgtttgtatctatttactgtttcaacttagttattttagtttttgcacacaaggggagtatatctgatatattttttaaaagttcagatcttctacattgcttacactattagctacagcaaacaattgcccacttagtattgagatttttatccagcacattgttacgcaaacaaatttatttagaaagagatgagtatctcaacgaacaataggaacgttttctgtttgcattcataattagaatggcaatacaggttgaacacagatgctgaaactagtcattctagagacttaaacggaaatgaaataaatatatatagaaaaaattgtatcattgtgattttatatgattatttttcactcctgcaacacaagaatagtagtataaggaattaaaatgagggtacattttattgggcagattgaacggcaaaatcaattgactgctagatatgaccaaatttcttagcaagcaatctctaattgatgatatcaactgaaataaataattccgagaagtctgtgtaaacttatgagcacaccactgcgagaacctgaacagatttcgaattgtgattaactgatccatgattcagacgagaaacagatttcaatttaaataaattaaattttctgtttgtggtactccaaaacgacctcctcccgcccctgagccaccaagtaatgggccagattaatgactgagaaagcaccgcatggcgcccccctaccttccgaggaaagatggccgggctttgggatgatgccatttggagcagcgtcatcaatatcaattaaatagccggtagccagcagggcgagaacgagaaacagaaccagaaaaaatcgcacagcattcatcatactccacaagcaaaatatttgtatatgcaaataattaaatatagcgtaaaaagggttcaacgagttaaagccacagcattatggatgggggaggggttgcaatagtccggccacttgaattatttaccgcgtcgcatttaaaatgttgaattttaatttaacgcatgcctcaatggaagcaaaaataagtttaaataaatagtgcttgagagcgagttgtgcaagggtcgacagagtgttaccgatgggtacatcggtaaactatgtcaatccaaaaatcttacgacaactgggctaggcactagccatttacaagcataacaagtttcgtaaaaaacaataaatattaatgctgtatagatgttctttcttggatgttgtctgtttcactttttggactagaattaaatatcgattaggtttttggtgctcgttgaagaaaccccatgtgttaaaatcaaaaggtatgcgcaaagaagcactgaaacacacacacagagactagaaagaatgcatgggaaaatttgcataaatgaatattattgcggaactatatgcgcggataaagccacatacacaacacattcgcgcaaatatttatgggtacacaccagcataatatgcgagtataatatacatattcattcagtcaagtccgcggcaagattcgcacaaaacatgcttacttacttacggggccactattgtctcacaaatctctgccggcggactggagtgtttggaggaggggttggggctgccatttaggaaatcaaatcagatgattcatgaaccacaaaaacaagccagcaagaagcgatggacgaatctatcgacgtctctgccagcaaattgtcggcggttgtcaaatgcgaatcttctttctggcgtttggctttatgcaaatcagccctgaaagtgctgactccgcccgtggaggactccatccatccacccatcgatccgtgcatttgtctgggcgtccttcgtataattttgagcatgatttgccgcctaatggaaatgccaaaggaaattacggccctgggcccactaaatggttcggccagcccaagacaacgaaacccaatcactcccactatcgctgtcccgcctccaatccaagtcccttttcctataccaataccaataccaataccccactgccccccacacacagggtgcaaattagcacccaggggagctgtgaaggcaaagtttataatgagcttggccaggaggggccatctttgggtaaatggcggggagtgcggcatgtgtgcttgtgtgtctccattgtatgattggaaatttaagcacgcatcccaagtgctgatgcattaaatatatagaatcttcaaaaaattaagatacttcatctcggtccctagcaacaatcaaggttggaatacgtgtgttattatgagctatatacctattcgattttagttcgtttggttactgtaagagtttagctatttccacctcttgatttctgtcagcactatgccattgtgccatggtgaagcgactcggattgcgatggttaatgcataagcttaaaactatgagtggagcggggtggagggcggaggtcaggggaccgtctattgactgtgggttgggttgccgtgccatcatgccgatgggggctgttgggatgggactaaatctgcaggtgtcctgatggcagatagcacccaacaatgcgaatatcattccatagatggttgcgtgaagcgtggacggaatttaaaattttaccatcggttattagttggtgcaaggtttggaattccccaaatcagcacataaagtgcacgctcatatgtagtaagcattcgaagactcgatttaaaccccaaaatgttaataccaaggcagaataaatcaatttctggcggagctgactggagtaaatgagctcgcacgcatggtgtacgtttactcaattttcgaaacgaatgatttatgagcaagaagtgggttatattagtactgggacttatatgatctatgaggtatctatctatcagctgagaagaattagatgtaggtcagtacagataagaaggtatggtggttttcgtgtacaaaaaattgcaattaaaagaactcatttacatgatctcttcaaaattgcacttagctttctaatcgtaagcaaacacggatgagtcaaaggacaatataggcaaaagaaagaaaatgaaaactacattttaaggacccactacagccaatgtgtattcagaccccagcacaaggagataaaagtagattttattaagaaatcgcgtcttcgcacagcattatgtaaattcagactcacagcaggcaaccgaagaaagccccttccaaggttaatgtctttattaacactaaaacacgcccaaaacgtgcgcatcttatcaaggcccaaaagcgtggcatcttcaccttggactcaagtgcgttgcacaacgcagatactcagattccgactcagattcggattcagtgagctaacctgctataaccccccgaaagttttaatctcataccggtttctcgacttgtgcataggtggggtggggatgggagcttgggattcacagagccggtcgtgcgtaagtggatttcaaaatgttaatgggctgcgtgaaaaaattaagtcgccaatgacagaatattgccgcgatgatgatggcggcgctgcatttatttgcacggcgaacgggccaatcgctttaattaaactttaattaaaaacaacacaagccaaattgccaatttgcagcgactgcgccgctgctgcgacgtaacgtttgttcgctgatgtttgcgatgattcaattaaagtttttcaacactggcttaataccctgttccccctcgttccgagggcattacgtttaatatttccccggaaccgtttacactggcagattttgtgtttacactcgagttcagtaagccagtgactgcagcaggagcttatcgtgttggcgcgttgtgtttgcccagatcagggaattcgattggctgattgatggaaagtgttccgaaaagtaagcgcgccaaaatacacacattaagtacatatacagcttatggtgcgcagtggagttaaacggcactttttagttaaatcagttttccataatttaggtttgtggcaaatccgtgtctatattattggagttactcaataactgaatagaatgaaatgaatgtagttaccatacactagacgcaactattttttaactactataccattaccgaatgcgatactgtgaacactttctggcactcgaagataccccttcacatattaaccagaatgttcgggtgacagaatccactatctataatccctagatgcgctcagtgcacacgagtgtactgaaagatggcaacaggcttacgaccgactgcgtattgcataaattggttgctcttttgccaaggagttgccaggacaacaaacggagcgaagttaccagtgggcgtggcgcagaacttaaaaacccatcatcgtattttggtatggcttgcgatgttgtttaaaatgccataaagtttaattgaaaaacaagctccggcagcacagcgcatagctccaacctacaatggcttcatcgcccatcgctccatcgcatagtaccaatgctccattcccggaccctcgatccacccactcaacataatcagcttgagcatcaggcgggcatcaacgtcgcttgcagtgacgcaaccgctgtcaaaagtttttatgcatttttcggctttttgtcacgacgtcagcggcaatgaggatgaacgaccaaaacgtcaacaagacgccaagtattccagtcccccaaactacccgatgaccccatccatcccgtcccacatctcatcctcacttttctgccggctgctgtcgctgtcaactgcaatgtttcagcagcaatagcagaaatacacttatgaaataatgtggtttcacagctgccactaagtccattaagctctaagctacatagggcttaactgaacgttaagacagaatttgcgagctatgaatataaatgatatggcctaagaatattttattttaaaagatggtcgcgaaattgtcttagtactctcttgcttttcaccttagtactttgtcttttaaactttacaaccaattatcaataatgttatccataggtaaggaattattgcaaaataaatgcaatctatttgtcgggattcttgagacatcgatactgtcactacacttcaagatatttcattttttcaagtggtcccaccgaagcaacagtcaaagcaatccaaagattgtgggccgcctttttgcgattccgacttttttttaattattcagcaaaatccgtctgcagtgttccactgactgtctgtcaacggttttctgcatttgtgtctcatcatttatcgatggattgtgcggcattgccccaccaaccggttcgatgtggctcgcatcgtttcagtttcgttacggcggttaattagtttttgtggcctgaaaagcccagtcaagcgttggccagtgattgacttgattggtcgtctgatgtcccgatccattgccgcattttgaccgcaattgcagttgcaattatgcggagttcattaggctttaggcccggctggccgagcaggtgcatatgggggcggtgtggggtgcatcgattaactgagcctttgggggaggaggtcgtggtgcttgcaatgctttcatttgaaattaaccttaaacccccatgtgctgtaatgctttcctgaattggaaattaaggggatattcttgctaatggttggtggcttattaggtgcaacgtgcattgcaaaatgtttagtcatttagacaagctctcccagcataacatttctattaataagaagaataggttaatcaatcaaaattatttgaacaggatcgatggcatcacaaatcataatgataattaagcgtttaatttaacaaaaaccatgcctgttgtattctgtgtttaaactgatgggagaactaatttgggttgactggtctaataacccggtatactggtataaatcgaaattaaattaaatttgtgggattaaccatgttgatggtgaactggcttatgcttgttagccgcacttaacagtaaatcacacaatcaccacacggcttggcttgccccattgaaacatcacccactcccttacaaagacgcactaactccaatttggcatctggatcgatcatcaacgcctgctacaattccaaacgaaatctctatgtgtgtatcctcatatgtgttttgccttttgtttcgtccttccccacaacgcataccaatccccaaacaccccaatccgttcaaatcctcaaaacccgtacaaatagagcacggaatcttcagaaacaacaacggaccaggcggtgagtgagcccccgatcacgctggtccacgttctgaatcccggcgagcgggagtatttgtcacccaacctgattggtgtccagaacattgcgatgaccttcctgccactgtcgatgaactttgtgaatatcatcgacgcctttcgggaaatcaccgccggagtgcgctatgagatcctgctaaacgcgctagacacaaaggcaatacagccggcggaagcggacatagtctgccgcctggtcatcctggaaaagccttggctgcgcacccagtggggcgacaagcaccgcgaactggttacctccaattgcaccgacccagcggtgaactcggtggccggagatccggcagagaaggcgcgactgcttaacgagaaatatgtgagtaatagcatctttaatggcggtcagaggaaagaactgagcgacgcagagatggccaatctggagtcacagatactcactaacctgggacctatgaggcggaaggtcagtctgaccaaaaccgcttcagcggctcctgttcgtgcaccttctcctgctgctccttctcctgccgaggctgcccctctggattcggcagctcctgctgtattaaccgcatctatagcagtcaccaagcttagtccacctgacgccactaatgagacggccacggcaattagcattgataatgtggaagaaaaggcagaagaggtggaggacaagcacgaagaggaggtcgtagccaccaccacaatcgccacggagctgaacgaaaatgagaagcgttggctcgacgatttcctatcggtgggtgcgtatgacttcgagaagagtcaggagaaggggcagcaacaggaggaggccggccgggagcagaaggatcccgaggtggaggctactaccataccgacagcattatcatgaatattctcattatcatcccagacacacacacacacactcacacacacagccagccccatcgttcagagtctctgtctttctcatataaatactcagcccactcattatacatactcaccctaatgcgaacaataaaaaaggaaaatgttatttaattgaatttatttaagcctgccttttcacctgatgacgatggcgatgtgatgatgatggttgggttcgtcggcatggcagaacacttatttcaccttaataatcaaatgagtttccgctctcaaattacggccgcaatctgtttaacccgccgtatcttagccgtattcgtggcacctgtgcaggggccatctgcacctgtctatatgtcttggctgtgaactggggttgggttggccccaagtgccggtatgtatgagaggttaagtgggtggaggctcaggattcccctcccgctcgccgtgtagtgcccgcggtgtcgacagaagctgaaatacacagagtggtgcgaggcaagtgttctcattatccttgtgctctactttttacagcagttggctctgtggtgccacgcacagtgggtctgggcgatttgtctccggcggtcggtggccactttccacccgacttcgcgtcgagagcataaggggttaagtaatcaatgacacaatctgcaattttaatggtggcgacgctgctctagagcgtgggttttccaagtgtgagccgtttgatcgcaatccattgattggaaattttgtgagcaggagtatctacattgtaccatattgaatttaaactgaaggggcatttggtctttaccggatttaggaattaaatagccactgcggggagtgtaacttttgacttccaattaataaatccattatttaattactttgtttaaatccagctgccgaagagggaaataaattacatttgaacgcgataattcgcttcaatcttcgttggacatgttcaacaatcggaaattcctttgccaaca

SEQ ID NO: 27320 - DNA, 1217 bp, DROSOPHILA
aaacagcaaaggcggtgtatttcgatagcggaacgcgaaacaatcgacttcacctgtgcgcgtgatttgtgctaaactcattgtgaaacgagcgcaccgaaagtcggcgagttttctggcggatatttaggaggcccccaccgcagccactcacacacgcaaacatgaggctgtttgcggcagcaacagttgcgcttgtattgcttctgggccaagcagctggcgaggagcttgcggaggagcgagcgggacaggcacagggcgatgcggagagcacggaatcttcagaaacaacaacggaccaggcggtgagtgagcccccgatcacgctggtccacgttctgaatcccggcgagcgggagtatttgtcacccaacctgattggtgtccagaacattgcgatgaccttcctgccactgtcgatgaactttgtgaatatcatcgacgcctttcgggaaatcaccgccggagtgcgctatgagatcctgctaaacgcgctagacacaaaggcaatacagccggcggaagcggacatagtctgccgcctggtcatcctggaaaagccttggctgcgcacccagtggggcgacaagcaccgcgaactggttacctccaattgcaccgacccagcggtgaactcggtggccggagatccggcagagaaggcgcgactgcttaacgagaaatatgtgagtaatagcatctttaatggcggtcagaggaaagaactgagcgacgcagagatggccaatctggagtcacagatactcactaacctgggacctatgaggcggaaggtcagtctgaccaaaaccgcttcagcggctcctgttcgtgcaccttctcctgctgctccttctcctgccgaggctgcccctctggattcggcagctcctgctgtattaaccgcatctatagcagtcaccaagcttagtccacctgacgccactaatgagacggccacggcaattagcattgataatgtggaagaaaaggcagaagaggtggaggacaagcacgaagaggaggtcgtagccaccaccacaatcgccacggagctgaacgaaaatgagaagcgttggctcgacgatttcctatcggtgggtgcgtatgacttcgagaagagtcaggagaaggggcagcaacaggaggaggccggccgggagcagaaggatcccgaggtggaggctactaccataccgacagcattatcatga

SEQ ID NO: 27321 - protein, 350 aa, DROSOPHILA
MRLFAAATVALVLLLGQAAGEELAEERAGQAQGDAESTESSETTTDQAVSEPPITLVHVLNPGEREYLSPNLIGVQNIAMTFLPLSMNFVNIIDAFREITAGVRYEILLNALDTKAIQPAEADIVCRLVILEKPWLRTQWGDKHRELVTSNCTDPAVNSVAGDPAEKARLLNEKYVSNSIFNGGQRKELSDAEMANLESQILTNLGPMRRKVSLTKTASAAPVRAPSPAAPSPAEAAPLDSAAPAVLTASIAVTKLSPPDATNETATAISIDNVEEKAEEVEDKHEEEVVATTTIATELNENEKRWLDDFLSVGAYDFEKSQEKGQQQEEAGREQKDPEVEATTIPTALS

SEQ ID NO: 27322 - DNA, 3665 bp, DROSOPHILA
gaatatatatactttttaggatcggaatttggaaaatctatatgccttgggagatgtataacttgttcatttttcggcgttttcaaatgaaaacaaaaaataatttgtaattttcaaaaaacgaaaagattactaaaaatgtataagattagagatgtatagaattactaataaatgtataaatgtattgaacccaaaagattgattaattaattatgattaattaagctgaactcatcttttaagacttattatattaaaatgtaatatatacccgttactggtagagtaaaagagtatactagatttgtagaaaaagactgtaaaggcagaaggtggacagagaaggatggcaatagcgcagagtcgatctagcgatgtccgtccgcccgtctgtcggtatgaacgtcgagatatcaggaactataaaacttataaggttgaaattcagcatacagattctagagacaaaaacgcagcgtaattttgtttgcgccacgcccactttaacgttcacaaacagcacaaaactgtcacgcccacacctttgaaaaatattttgatatttttcatatttttgatagtcttgtaaattgctatcgatttgcaaaaaaactttttgccacgccccctctaacgccataaaaccgaccaaaactgccacgcccacacttttgaaacaagtttagatttttcttcgttttattgtgtcttgcgaatttttattggtataccaacaacactgtggccacgcccctcatttcacgtacaaaacgcccaaaacgatccacacttttaaatttttaaattgttttttattttattacctaatatctatcgatatcccagaaaaatgatgaaacttcgcgatcgtattccgactagatgagtaataggtatctgatagtcggggaactcgactatagcattccctcttgttgaatacttaaaacaagtgaacattttatgaaaatttatataacgtttaattaaataacaattatttaaagctatgttctttacaatccgaatcatagttgtcatctatctctagttttacataaccattattcttttcatatttaaatgttgttttcgctagtggttctacctcatcctcgctagcgtcgtctatgatcttatagatcaatggtgccttttcgacagtctcctttttaataaaacctgtcaagacgatggctacaaatacaccaatggcacttatgacgaagggcattgaaattggtgaattaactttattcttcgaatcatcctggaaaatgaagaagagtactccgaaaaaggcaggtcccacaccctcgctcaagcactcaattccagagataatgcccaggacagcaccccgattatcgggactggcgtagatggaagccaccgcattattggcagcgggtataattgttgccagtgcggccaagatactgcttaaccagtacatccaatgatgggttccaaagccgaagaagaacaactgcaatagcaggagtaataatcccagtcggatcgaccacttggcccccactatgtttataatataaccgagaaggagattggatgtgatcgccagcacagatagtaatcccaacatcatggacacctcctcgtactcaaatcccatattagttttgagataaacgggcgcagtagaatccactcctgcaaagggccaaatcgagaggaatgttatgaggtatatcacgagcaggttcttatccttacgacttttacgcagcacttcccaaagatcggaagagtttagggatccattatcaattttctccttttcagttaaatcattctgaaggttttcctctttgttgaactgttggcccagctctttatttgtgactagattttgtgatgtgccgtggttggatttgttcgctgaaacgtggttattcaatttttcttctctgtttaagatctctttcctttccttcgggttaatgtcctccatcttgttatcactctcttcatccaacatattatttttttcttttaaaactaaactctctggcaccgcaaatatgataaacattatattaatcaagcctgtgatggcggcaatcaaaataactgatgcggacccgtacgatttcatcaagtaattccccaacgatggtgaaaaggctattcctgcgccaaaactggccgcaacaatgccatagccttttgaacgattctccacagtagttgtgtctgccacataggccaatgaagaggagtaagtgctgccacagatggagctcacagtgagaatggcgaaaaaccaccaactcttcaacatcatgaatggaattggagcgtaggtggttgccactgccagtagcatcactactttccggccatgaaaatcggaaatggcacccatcacgggcgtggtcacaaatcccaggattcctctaactccataaaccagtccatcgacgagaaggacgcgattcccaaacgatcccgacaatttttcgatgaagggaacggtgagaagaccccaggagaagtagtgcataaacgtaacgatcaccgcgtgccaaacacttgcttttccgattccagaacgattaaccaatactttcaccaggggtctaagaaacttcaactgcgccattttttagtgttctgtccgcgaactggccaacgccagaatagcctgacaactccagtttaaatccaatttatacgcctcagttttatagaaaatatagttatggctgcactgtaaaaaacatgatactcgaactatactacactattttgtcgtttaaaatatatatcgtttaaactagaactcctcgcagaaagcaaagagatgtgtcaaagagatcgtaagcaaaacgcaaataagagaatttaaaagtttgttttcaaaatagctgaaattttcacaaatatattaacattattcatccaagctattaataataacaaacatttccctctcttgttagtgagaatagaaccataaggttccgatttacaagccaacaagtaaagccatctacttttagaactttttaaaggtaagccattaaaaattatttaacatattttcgtgtcttaaaatatgggttgagtatgcatgcctaaactttctatatgactgtgaataaatagtgacatttttgcaaatcacaatcacaacttagaagtgcggatatgagaatattgtaagtatacatatgtataccaaaccgaaaaagcacgctttagtcgagttcttcgactatcacatacccattacatggctagcaatggaaaaacaaaaacaaatttgtgaagaaattaattcaaaattgtggacatgaaagctttttgcagtttgttgccgataccagtggacgtgaccaaaatgttctcgttttgagaagttcgattttaaaatctagccaagatctaatcattctcagcatactcaaatcgagatcaaaccattctcagattgcaaatgattttgctttcatttgtcttcctctcttttttcagactcttcgacaatcttacacccaatacttcttccgaaaaataaaaaatataaacgttgagatcattttcgtctcgaaaccaagaaggtttatttattcactgagtacgctgagcgcaaccgacctctatttttttgttctcaatttttccgagtgcaggaa

SEQ ID NO: 27323 - DNA, 1665 bp, DROSOPHILA
ctggcgttggccagttcgcggacagaacactaaaaaatggcgcagttgaagtttcttagacccctggtgaaagtattggttaatcgttctggaatcggaaaagcaagtgtttggcacgcggtgatcgttacgtttatgcactacttctcctggggtcttctcaccgttcccttcatcgaaaaattgtcgggatcgtttgggaatcgcgtccttctcgtcgatggactggtttatggagttagaggaatcctgggatttgtgaccacgcccgtgatgggtgccatttccgattttcatggccggaaagtagtgatgctactggcagtggcaaccacctacgctccaattccattcatgatgttgaagagttggtggtttttcgccattctcactgtgagctccatctgtggcagcacttactcctcttcattggcctatgtggcagacacaactactgtggagaatcgttcaaaaggctatggcattgttgcggccagttttggcgcaggaatagccttttcaccatcgttggggaattacttgatgaaatcgtacgggtccgcatcagttattttgattgccgccatcacaggcttgattaatataatgtttatcatatttgcggtgccagagagtttagttttaaaagaaaaaaataatatgttggatgaagagagtgataacaagatggaggacattaacccgaaggaaaggaaagagatcttaaacagagaagaaaaattgaataaccacgtttcagcgaacaaatccaaccacggcacatcacaaaatctagtcacaaataaagagctgggccaacagttcaacaaagaggaaaaccttcagaatgatttaactgaaaaggagaaaattgataatggatccctaaactcttccgatctttgggaagtgctgcgtaaaagtcgtaaggataagaacctgctcgtgatatacctcataacattcctctcgatttggccctttgcaggagtggattctactgcgcccgtttatctcaaaactaatatgggatttgagtacgaggaggtgtccatgatgttgggattactatctgtgctggcgatcacatccaatctccttctcggttatattataaacatagtgggggccaagtggtcgatccgactgggattattactcctgctattgcagttgttcttcttcggctttggaacccatcattggatgtactggttaagcagtatcttggccgcactggcaacaattatacccgctgccaataatgcggtggcttccatctacgccagtcccgataatcggggtgctgtcctgggcattatctctggaattgagtgcttgagcgagggtgtgggacctgcctttttcggagtactcttcttcattttccaggatgattcgaagaataaagttaattcaccaatttcaatgcccttcgtcataagtgccattggtgtatttgtagccatcgtcttgacaggttttattaaaaaggagactgtcgaaaaggcaccattgatctataagatcatagacgacgctagcgaggatgaggtagaaccactagcgaaaacaacatttaaatatgaaaagaataatggttatgtaaaactagagatagatgacaactatgattcggattgtaaagaacatagctttaaataa

SEQ ID NO: 27324 - protein, 542 aa, DROSOPHILA
MAQLKFLRPLVKVLVNRSGIGKASVWHAVIVTFMHYFSWGLLTVPFIEKLSGSFGNRVLLVDGLVYGVRGILGFVTTPVMGAISDFHGRKVVMLLAVATTYAPIPFMMLKSWWFFAILTVSSICGSTYSSSLAYVADTTTVENRSKGYGIVAASFGAGIAFSPSLGNYLMKSYGSASVILIAAITGLINIMFIIFAVPESLVLKEKNNMLDEESDNKMEDINPKERKEILNREEKLNNHVSANKSNHGTSQNLVTNKELGQQFNKEENLQNDLTEKEKIDNGSLNSSDLWEVLRKSRKDKNLLVIYLITFLSIWPFAGVDSTAPVYLKTNMGFEYEEVSMMLGLLSVLAITSNLLLGYIINIVGAKWSIRLGLLLLLLQLFFFGFGTHHWMYWLSSILAALATIIPAANNAVASIYASPDNRGAVLGIISGIECLSEGVGPAFFGVLFFIFQDDSKNKVNSPISMPFVISAIGVFVAIVLTGFIKKETVEKAPLIYKIIDDASEDEVEPLAKTTFKYEKNNGYVKLEIDDNYDSDCKEHSFK

SEQ ID NO: 27325 - DNA, 3186 bp, DROSOPHILA
cagggctttctttatttacatgatgatatggcattttggcttggttgggtctttgcatgcacttgctggacaggattctcacctaattgggcttttcttcttgatgtccgcagcagccaggtcaccaatgtagtatttcttcaacatctctctgaaaaggcaagtggggaagaaatgtgaatcaggtgatccaggcgcactggctataagatggactctctaacctcgcctccgagctgtgacccacgtcattgaaggccttggtggcatcgcgaccggcctcatccaccagggattcctcgccaccgggatgctggagataagggcatcgaattagatggattcgccacccccccctaaaaccaacaatctgcatcgccacttgcctcgagacggaacttggtcacatcgtagaccttgttgtcgatgaccacccacagatccgtggctttgttgtgttcgttgacggtggccaaacggatttccttgctcatcttgcctgactgcgcctgcctgctcttctccgcaaatttaactaaataacgcaagctaacaggttttcggactattccagtgtggccggctccacttttcgttggagtcagctggtcacacaaaataccccaaatataccacataaggtacctaagcaataattccaatgtacctgtggtacaattccagtaaaatacaatagagtattacaaatttaaatattcaaattaaatccaccactccaacgccatccaatgtttattgcaactttctatcaagaatcccccacaaaattaaaaaccctgggaaacacagataaaaactacatagagtattacattgaacacacaaattgaaaattttattcttcgaataccaataattattgtgattgattattttgtgcctttgaataaaccaatttactaaaacttagtatgaattcttgagttatgccctgtggcacaactaactaacttcaatttttataagggtgaaaaaatctagatggcgccaccacgcagacgcaggaccaagtgaagggtcgactccttctggatgttgtagtcggacagagtgcgtccgtcctcgagctgctttccggcgaaaatcaaacgctgctgatctggggggattccctccttgtcctggatcttggccttaacgttctcaatggtatcggatggctcgacctccaaggtgatggtcttgccagtgagggtcttaacgaagatctgcatgccaccacgcagacgcaagaccaagtgaagggtcgactccttctggatgttgtagtcggacagagtgcgtccgtcctccagctgctttccggcgaaaatcaaacgctgctgatctggggggattccctccttgtcctggatcttggccttaacgttctcaatggtatcggatggctcgacctccaaagtgatggtcttgccagtgagggtcttcacaaagatctgcatgccaccacgcagacgcaggaccaagtgaagggtcgactccttctggatgttgtagtctggacagaggtgcgtccagtcctccagctgctttccggcgaagatcaaacgctgctgatctggggggattccctccttgtcctggatcttggccttaacgttctcaatggtatcggatggctcaacctccaaagtgatggtcttgccagtgagggtcttaacgaaaatttgcatattgcctgagtggagaaatgaaaaagggaaaaagttggcttgagtaatggaaagtggaaggaaattgattttctgcgtagtgacccaattcccgtgacccagaaaagtattttagcatacacatacagaaaacattattggttttttcgttaatgttttcacagcttgcattatttcgccatgaaatggcaaatttagttttggtgactaatctctaacttcgttaaaaaaaatcccctggaactgggcatacacacacacacacacacacacacacacacacacacacatagatagaagcatggaaagcaccgttttctgcttgctgcatcgccattttgaatgcaactaagaaaaactattaagcaattgccaaactgaactcaccttattttcttgtttcgcacacaaaagttaatttatttctttactgttggtctgcactttttgaaatattcaaaaacttgcttttattttacttgctcggacgtccgctctctacgactttttcacagtttatgattcgtttcgcagccccacgctggtatttataggcagctgactggaaagtcgtcgcctgctctctcgctcactctcgggcggtaggttactttgttttcgctctctgccacttaaagtgaccgtttcttttgtctagtctattggaaatgagatttcgcattgacaagagtatttaacacatgaaggccaatcaattggctagctgcaatacgcaaaattgggcattgaaaacaaaatgcgtagtgcatatgtgcactgcttttatctcgctcgctctcgtgagcgagagagcggagttatcgataagttgcctgaccctctttccaacactaatctcagctgttgaagtgtatgcgtttgtgtgtgtattctaacagagggaggtgtataaatttgtatatacatacatatgtatgcatgtagacgcacagacatcttcttgtgacgttctttgtttggcgagttaatcgacctttttttgttttgacgccgcctgggagatttgtcttcgctttggtcatcagcctttagacaagagagcccaacaatttaaaatttcccaccaacccactcgcacataagccagtatgcgtacaatgctatttccatatgtacatatgcattacaattgcatctggaaagttccaggaatggaagggtctgatgaaatctgatgtatgctgatttcagcagcttaacccttgatgtaaccccttaaaatagtaaacgttattaactctttaagtacaaactaaagatataggataatatatacaattattcaaataattgtcatgaatttctcatactaacaatccagtgtacatgtattccccatgatatgacaaaaaaaaaaaaacaaaataaagtttttccttccaaaaaagtgaagttttttttggaattggtagcttcttactataaaatagttccaagttacacgagatttcattaagtttgctttatatta

SEQ ID NO: 27326 - DNA, 804 bp, DROSOPHILA
gacgtccgagcaagtaaaataaaagcaagtttttgaatatttcaaaaagtgcagaccaacagtaaagaaataaattaacttttgtgtgcgaaacaagaaaataaggcaatatgcaaattttcgttaagaccctcactggcaagaccatcactttggaggttgagccatccgataccattgagaacgttaaggccaagatccaggacaaggagggaatccccccagatcagcagcgtttgatcttcgccggaaagcagctggaggactggacgcacctctgtccagactacaacatccagaaggagtcgacccttcacttggtcctgcgtctgcgtggtggcatgcagatctttgtgaagaccctcactggcaagaccatcactttggaggtcgagccatccgataccattgagaacgttaaggccaagatccaggacaaggagggaatccccccagatcagcagcgtttgattttcgccggaaagcagctggaggacggacgcactctgtccgactacaacatccagaaggagtcgacccttcacttggtcttgcgtctgcgtggtggcatgcagatcttcgttaagaccctcactggcaagaccatcaccttggaggtcgagccatccgataccattgagaacgttaaggccaagatccaggacaaggagggaatccccccagatcagcagcgtttgattttcgccggaaagcagctcgaggacggacgcactctgtccgactacaacatccagaaggagtcgacccttcacttggtcctgcgtctgcgtggtggcgccatct

SEQ ID NO: 27327 - protein, 231 aa, DROSOPHILA
MQIFVKTLTGKTITLEVEPSDTIENVKAKIQDKEGIPPDQQRLIFAGKQLEDWTHLCPDYNIQKESTLHLVLRLRGGMQIFVKTLTGKTITLEVEPSDTIENVKAKIQDKEGIPPDQQRLIFAGKQLEDGRTLSDYNIQKESTLHLVLRLRGGMQIFVKTLTGKTITLEVEPSDTIENVKAKIQDKEGIPPDQQRLIFAGKQLEDGRTLSDYNIQKESTLHLVLRLRGGAI

SEQ ID NO: 27328 - DNA, 9262 bp, DROSOPHILA; identical to SEQ ID NO: 20242

SEQ ID NO: 27329 - DNA, 1519 bp, DROSOPHILA
ccggcgcgttcgcttgcttcacttatgcgcttgttgaaaatcaaggaaagggcgcggaaaataagtttaattaaatatttcgagtggctcgactaacacagcaattaagcgaatgtgcaaaacgtgaaagcagttgtgaataaaacgcactcatcgcgaaattaaaagctttttgggagcgtcctgcgatggagaaacgcgtgaggaaaaatcaattcaaaatgtaaggagaagctcgcaacggaattccccccgcaacgaagaaacgcaaccaaagaagctgccagtcctcacaaacggatcctgaaagttccttccacacacaagccagcaaactcaaaacaaaagccaaatgactgccaacagtctgctaggaaggtccatactcaatgaaggtcgctcaaacaagcgatcatttgtgtccctgattgtgggcctgatcgtgggcttctgcctggcggagctgttcgtctactccacgccggagcgaagtgaattcatgccatacgatggccatcggcacggcgacgtgaacgatgcacatcacagccacgacatgatggagatgtccggaccggaacaggacgtgggtggacacgagcacgtgcacgagaactcgaccattgcggagcgactgtacagcgaggtgcgtgtgctctgctggatcatgaccaatccgagcaaccatcagaagaaggcgcgccacgtgaagcgcacctggggcaagcgttgcaacaagctgatctttatgagctccgccaaggacgacgagctggacgcagtggctctgcccgtaggcgagggtcgcaacaacctatggggcaagacgaaggaggcctacaaatacatctacgagcatcacatcaacgacgccgactggttcctgaaggctgacgatgacacatacacgatagtggagaacatgcgatacatgctgtatccgtacagtccggaaactccagtctacttcggctgcaagttcaagccgtacgtgaaacaaggctacatgtccggcggtgccggctacgttctcagccgggaggctgtgcgtcgctttgtggtcgaagccctgcccaatccgaagctgtgcaagtcggataactcgggtgctgaggacgtggagattggcaaatgtctgcagaatgtaaacgtgctcgctggggactcgcgagactcaaacggtcggggtcgcttctttccatttgtgcccgagcaccatctgattccatcgcacacggacaagaagttctggtactggcagtatatcttctacaagacggatgagggacttgactgctgctcggacaacgccatatcgttccactacgtctcccccaatcaaatgtatgtgctggattatctgatctaccatctgagaccgtacgggatcataaacacacccgatgcgttgccgaataagctagccgtgggcgaactgatgccggagatcaaggagcaggcgacggaaagcacaagtgatggggtctccaagagatccgccgagacaaagacgcaataa

SEQ ID NO: 27330 - protein, 388 aa, DROSOPHILA; identical to SEQ ID NO: 20244

SEQ ID NO: 27331 - DNA, 4660 bp, DROSOPHILA
aattgctgggctcaggggtctatctcagattttcaaaatccttgacctggtgactgcatatcctcggtgtgaattggtctgaagctgtcgaagtcatcgatgcgcagcggaatggcgatgagtttagccaggccgtaaaatacggctaagcacagaaaaatggtcagaatcatttggctgggcggcactaaaaaacacataatgtttataaaaacctgcttgttaaatgtatgaactcagcaaacccttgccggtgaaccaaggcagtttaggactagacgatatcatttttatcacacttaacactttgatgacagagttccaaatgagatataaagtcaaattgaactatcgactttaaaaaaccaccaactgatcaaacaaaagctacgcctaaccaaccattcatacatacagtgatccctagtaaaaaaggcaaaaagtgaacaacaatagcccagaagtggaactacgttcaatacgacatttgttatgtttaaacttttaaaaagtattgtaatatacagtatctatagatactgctaatactgctaatgttattgccaggaatgagtacttcaaatatgctagagcaattctccgaaatcattatctgtatgctgcaaatagactataagtccgaaattatatcgtagccaacggaaattgacccagaaattgttattagcacataaccaaagtaatcggcaatggacgttggtgataacaaataataatacattgctgataagttgcggttgtatggaaaatgataagagccggccatactaatttccacgaccatgtcattcgccgaaaatcaattacccaaatgcccatgccaccccatatgcatatctacatgcattagcaagacacttttcttgctttacatttatttcacagataagtggaaactacagcgaaaaatgaaaagagaacaaagcgtacattgcttaaaaaccatctgcatttcggagttctagccgcacttattaaccaagtgccgactcgtgcgggtgcaaaactgcagaaaagattgatttactttggttggcgcagctggtttgcattcgcctgctggtcttgctaccaatttaattgttttatccatgcaaacaaaattattgagtaagtgctaaatagaagattcactaaacaatgactgcgacgggacaaaacaaaaacgattttcgtgctcgaatcgaagatttaattgttctaacaaatgtgacgactgcaagtaattattcgaaaataaagtttatttttggccactaagtgaagtcattcattccttatgcacttacaaagccatttagttgaaatatagttaattaattaacatttattaagtaattatcactagttgtgtgcctagttcaacgacaccaacgaaaaccattcaattatattgttttagtacctgtttagctgattgctaactaaacaaaactctgaaactaaaagaaacccatgacgaaaaagttatctttattacggtgtcaaaagtttaattgcgtttctatttgcactttgccacagaataggcaaaatacttagtgtccaaaatcccatgagattctctatgttgtccgctagttttatgacacaaactcgaaaaaagcaaaatattctttgcgcagactcttgatttttctgccttttctttttgcaatgtttacgtacggcgaaaaggcaacgtagtgcagtaatctcggaaggaaagaacgcgaaaaaacagacacgtgcaaaacttaaaacgagcaaatatagaaaaattgaaatgttttctgaaataaatatttatcagcaatgttgctgcagttgcagaatgcaactccgagcggcggcaattgtcacgttttgcatgagattaacacagttcgagttaaccatgcggaggcgagccaatccgagccgaaacagccaactccatgctcagatagttgacacaaatgaccgagtgcagatgcgttccgaaaaacgcaacgattcgttctaaaaatacatacacgtggctaatttgctggcgatttgctctcggactctattgcagaaaatgtaaggagaagctcgcaacggaattccccccgcaacgaagaaacgcaaccaaagaagctgccagtcctcacaaacggatcctgaaagttccttccacacacaagccagcaaactcaaaacaaaagccaaatgactgccaacagtctgctaggaaggtccatactcaatgaaggtgagtaaaggtgcaccaactaataaagatataataatatataaagatatatgctcgaatgtatttcaaatgtgtatctttacttatagcgtttagccatcttaaaaggtgtctcaagtatgttctaatatggcagcttcgtagaaaaacagtgtagcatatctttagacaccatattaacttaataacatatgtgaatgaacatccatattaattcagtctacattcttcgcaggtcgctcaaacaagcgatcatttgtgtccctgattgtgggcctgatcgtgggcttctgcctggcggagctgttcgtctactccacgccggagcgaagtgaattcatgccatacgatggccatcggcacggcgacgtgaacgatgcacatcacagccacgacatgatggagatgtccggaccggaacaggacgtgggtggacacgagcacgtgcacgagaactcgaccattgcggagcgactgtacagcgaggtgcgtgtgctctgctggatcatgaccaatccgagcaaccatcagaagaaggcgcgccacgtgaagcgcacctggggcaagcgttgcaacaagctgatctttatgagctccgccaaggacgacgagctggacgcagtggctctgcccgtaggcgagggtcgcaacaacctatggggcaagacgaaggaggcctacaaatacatctacgagcatcacatcaacgacgccgactggttcctgaaggctgacgatgacacatacacgatagtggagaacatgcgatacatgctgtatccgtacagtccggaaactccagtctacttcggctgcaagttcaagccgtacgtgaaacaaggctacatgtccggcggtgccggctacgttctcagccgggaggctgtgcgtcgctttgtggtcgaagccctgcccaatccgaagctgtgcaagtcggataactcgggtgctgaggacgtggagattggcaaatgtctgcagaatgtaaacgtgctcgctggggactcgcgagactcaaacggtcggggtcgcttctttccatttgtgcccgagcaccatctgattccatcgcacacggacaagaagttctggtactggcagtatatcttctacaagacggatgaggtaagaacagaattatttaagaaatgtcttataacatccgttaaaactaatattaactctttcagggacttgactgctgctcggacaacgccatatcgttccactacgtctcccccaatcaaatgtatgtgctggattatctgatctaccatctgagaccgtacgggatcataaacacacccgatgcgttgccgaataagctagccgtgggcgaactgatgccggagatcaaggagcaggcgacggaaagcacaagtgatggggtctccaagagatccgccgagacaaagacgcaataatagagacacacgggtagacacctaatgtacatatagcttttgtatatatcaatagataattgtgtaatccaacacgatgaatcgctacaagctatcctagcaatgccattaccacttccataaaacaactttatgtcctcggtccatttcttcacatcccgaaaaggtttcgtttgggctccactgcggagctcttcccttttgtacaaataccaaaactagttataatttagttatgttactgtagtatgtaattaagtctaggttgtacaattataaagtcatcactaatagggcgcatttactattgaattctggttttccgtcactaagttggccattacgtgtttatgagtcgcctaagtaaatcctatacatatgtagttgtatatttaatctcttttgtgattgagattattgcgtattatagatcttaatcttctacatgtattgaataaaatgaaaattaattacaatgtatttttaatgtctgaataaattttaacgcaagcaagtttcttattgtaaccagcaaaatttgaaatttgaagtacactgcaacttagagccatcgattcatttgcgccgtcaagataataatatcggtgcatgtctcagctatttggtgtgttatcgtctatcggcttatcgttagttatcgtttcacctcccatctctataacacatgttttgtttgtaaataaaataagtaataatgttggcgccaattaagcacttattagggaattatcgcatagtcttagccagcggctctccacggcgacaggaactggtcaagatgttggtaggttacatcagatctcgaaatccatccaagacataaccgattaccttttttaagggactaaatgccgaattgtgtccttcgacttttgaggagaatttaaacttggaggactttaaggagttctcggattatattgaagccactgctctgggaaaagccgaggaggtctactcgagattgaggtccacgggg

SEQ ID NO: 27332 - DNA, 1432 bp, DROSOPHILA
caagtgccgactcgtgcgggtgcaaaactgcagaaaagattgatttactttggttggcgcagctggtttgcattcgcctgctggtcttgctaccaatttaattgttttatccatgcaaacaaaatttgcagaaaatgtaaggagaagctcgcaacggaattccccccgcaacgaagaaacgcaaccaaagaagctgccagtcctcacaaacggatcctgaaagttccttccacacacaagccagcaaactcaaaacaaaagccaaatgactgccaacagtctgctaggaaggtccatactcaatgaaggtcgctcaaacaagcgatcatttgtgtccctgattgtgggcctgatcgtgggcttctgcctggcggagctgttcgtctactccacgccggagcgaagtgaattcatgccatacgatggccatcggcacggcgacgtgaacgatgcacatcacagccacgacatgatggagatgtccggaccggaacaggacgtgggtggacacgagcacgtgcacgagaactcgaccattgcggagcgactgtacagcgaggtgcgtgtgctctgctggatcatgaccaatccgagcaaccatcagaagaaggcgcgccacgtgaagcgcacctggggcaagcgttgcaacaagctgatctttatgagctccgccaaggacgacgagctggacgcagtggctctgcccgtaggcgagggtcgcaacaacctatggggcaagacgaaggaggcctacaaatacatctacgagcatcacatcaacgacgccgactggttcctgaaggctgacgatgacacatacacgatagtggagaacatgcgatacatgctgtatccgtacagtccggaaactccagtctacttcggctgcaagttcaagccgtacgtgaaacaaggctacatgtccggcggtgccggctacgttctcagccgggaggctgtgcgtcgctttgtggtcgaagccctgcccaatccgaagctgtgcaagtcggataactcgggtgctgaggacgtggagattggcaaatgtctgcagaatgtaaacgtgctcgctggggactcgcgagactcaaacggtcggggtcgcttctttccatttgtgcccgagcaccatctgattccatcgcacacggacaagaagttctggtactggcagtatatcttctacaagacggatgagggacttgactgctgctcggacaacgccatatcgttccactacgtctcccccaatcaaatgtatgtgctggattatctgatctaccatctgagaccgtacgggatcataaacacacccgatgcgttgccgaataagctagccgtgggcgaactgatgccggagatcaaggagcaggcgacggaaagcacaagtgatggggtctccaagagatccgccgagacaaagacgcaataa

SEQ ID NO: 27333 - protein, 388 aa, DROSOPHILA; identical to SEQ ID NO: 20244

SEQ ID NO: 27334 - DNA, 3828 bp, DROSOPHILA
ccttcttttgtagacactatcccccattttggaaggtcacgcctcgcagggaagctccgccaagcagatctatcatttcgcccaattgcagggcaattctgctttccaaaagtacgactacgggctaattctgaataagatacgctaccagtcgatctttcccccactttacaacctttccctggcactgggcaaggtggctcttcaccgcggagatggcgactggttgggatccgaatcggatgtccttcgactggagcgggacctgcccaactgcatagaaaacaggaacattcgcttcgaaggattctcgcacttcgacttcacgatttcgaaggatgttcgatccttggtctacgatcgcgtaatcgatttgtgcggttcaaattgaacttttagcttacgaatgaaatattagcaaatcaattaatagatttgcttggcacatatgtgaaattgccttttcctaagggctcggaaataaatataatttttattaagggaaattaaatatatacaaatattttacaattttcccagctgtaataaagaaagacttttattatgataatcgaaaatatggaaatgaataaaccgacaaaagtcgccagtgtttagggtgaattcaggccagagacaattgttatgtttttatccgtgttatttaatgaggtcacaaatcaatcaaacaaaatactaaagaataacgatacctatcatactaagtacaatcttcttttacgattaattatgatcaacctgtaattcaagctcctttaaaaagttacgatatctttacatctagctgcttgaatacaaaaaatgtatttattaaacccttgatcaaggttgccctttgttaaatattactttagtgatgctcgatcgatatgttaatctagttattcactccaagcatggatattttaatttcagggtattttatcattaacgctataaaagagttcgatttcatttctgccttcgagagtagacaagaagggaacgaaatggcgatcgcatttaatattgcgatctatgcaataattttagtgggtagtttggtacccagcaagactcaggaatgggttccatatgcatatcctgtagatgaaaatcaaggattgaatgaacagacacagtggcagtcacaatcacagattcaggtaaacaaagagagtgcaaagcagctaagatccgttggacctagaacaaccactacctaaaaaacccaagcttaccgtcaagggtaaactcaatcacagtcgcaagatttattgtaaggacgtgcttaatcacctataaactacaatcacaacctctcaatcggaagcctaatcaagcgtaattcccatttcagagtcaagggacgtcacaatcacaaagtcaagctcaaattcaatcacagcctgaaccaaggtcatgtttacaatgtcaacaagctagttaccaacaattctttgcggaggtggacatccagatcgacgccaagctggagacggtgagccataccactcataagattacacttggacagcatgcagtaactatatatttttctatcgtttgacagcccaaaatgatctcaaaatatggacatcaagtagagacccattacgcattcactgccgacggctacaagctctgcctgcatcggattccgcggtctggagctacacccgtcctattggtccatggcctgatggccagctcggccacttgggtgcagttcggtccatcccagggtctggcctacatcctgtcccaaagcggctacgacgtctggatgttgaacacaaggggtaacgtttactcggaggagcgcctggccggtcgggagagcgacaagatcttctgggacttctccttccacgagatcgggcagtacgatctacccgctgccatcgacttgatcctgctgcagactaaaatgccgagcatccagtacattggtcactcgcagggatccacggccttctttgtgatgtgtagtgaaaggcctgagtatgcaggcaagatctcattgatgcagtccctctcgccatcagtttatatggaaggaacacgcagtccagcacttaagtttatgaaattattttcgggtggcttcacagtgagtgcatgaaattcctaaacaatatgtatatatttaatgctctccatttctttcaaaagatgttgttgaatctcttgggcggccacaagatctccctgaaaaacaagattgttgacatgttccgtaaccacatctgcaccaaacttatccccagtcgcatctgtgccatctttgaatttgtggtgtgcggatttaacttcaacagcttcaatatggtgggaaattcatcactaatttggatttcacgggttaatattgattttttgtagacactatcccccattttggaaggtcacgcctcgcagggaagctccgccaagcagatctatcacttcgcccaattgcagggcaattctgctttccaaaagtacgactacgggctaattctgaataagatacgctaccagtcgatctttcccccactttacaacctttccctggcactgggcaaggtggctcttcaccgcggagatggcgactggttgggatccgaatcggatgtccttcgactggagcgggacctgcccaactgcatagaaaacaggaacattcgcttcgaaggattctcgcacttcgacttcacgatctcaaaggacgttcgatccttggtctacgatcgtgtaataagtctttgtggttctaatcgttaaatgcttagataacaaattgtactcttagcttacaactgaaatacaatcaaagcaattaactgatttgcttagcacaatcattttttgaggactcgccgccaatgtacctaataatacaaaagtaaagaaaaaacaaagaataataattctatttaaaataatatagatacatgtttcagtaattataaagaaaaaagaattcttggaagagggggaaaaatacttgccttgatcatataacatttcctaacaatgcgggtggaatcagcattcagaatgaattccacccattgtttaagagattttcattatattatattatatattatatcatattatataggcgctaagtacatttcatggttgaaatctccctatgtgtagacctttaattctttcaacacttctgatccaaaaagctttaagtagccaaatctatattacgaaattattgcttgttgacacttgtaaggatatctatttaacgccaggattcaaaaattataattttcaaggttttttttccctgccaaccattggaaaattgtattgtagtgatgcaacatcggtatgttaatttagttatccactccaagcatggttattttaatttcaaggtcttgtatcttttaacctatataaacgaacgattccttcgctgtcgaaactaagttttgcaacgtaatgactatcgtattaaatcttccggtctgtgttttgtttttactcggtactttggtacccagcaactctcagaaatggatcccatatgcgaatcctttggatgaacagtcgcagctacaggtaaacacaagaacgcaaagcagctcataagcacctaaagcacaatccaatgttttaatattaggaaattggattaagcgatcaaaatccggataattttgagcagtcgcaatctcaatcacaagatcagatagttgcgcagattctgccatctgatgcttctctaagtggagggcaaccacctaataatattatacaacttgtggatgaagggatggatcgacctttgctcctacagccacaaaatcgcccaatcga

SEQ ID NO: 27335 - DNA, 1446 bp, DROSOPHILA
agggaacgaaatggcgatcgcatttaatattgcgatctatgcaataattttagtgggtagtttggtacccagcaagactcaggaatgggttccatatgcatatcctgtagatgaaaatcaaggattgaatgaacagacacagtggcagtcacaatcacagattcagagtcaagggacgtcacaatcacaaagtcaagctcaaattcaatcacagcctgaaccaaggtcatgtttacaatgtcaacaagctagttaccaacaattctttgcggaggtggacatccagatcgacgccaagctggagacgcccaaaatgatctcaaaatatggacatcaagtagagacccattacgcattcactgccgacggctacaagctctgcctgcatcggattccgcggtctggagctacacccgtcctattggtccatggcctgatggccagctcggccacttgggtgcagttcggtccatcccagggtctggcctacatcctgtcccaaagcggctacgacgtctggatgttgaacacaaggggtaacgtttactcggaggagcgcctggccggtcgggagagcgacaagatcttctgggacttctccttccacgagatcgggcagtacgatctacccgctgccatcgacttgatcctgctgcagactaaaatgccgagcatccagtacattggtcactcgcagggatccacggccttctttgtgatgtgtagtgaaaggcctgagtatgcaggcaagatctcattgatgcagtccctctcgccatcagtttatatggaaggaacacgcagtccagcacttaagtttatgaaattattttcgggtggcttcacaatgttgttgaatctcttgggcggccacaagatctccctgaaaaacaagattgttgacatgttccgtaaccacatctgcaccaaacttatccccagtcgcatctgtgccatctttgaatttgtggtgtgcggatttaacttcaacagcttcaatatgacactatcccccattttggaaggtcacgcctcgcagggaagctccgccaagcagatctatcacttcgcccaattgcagggcaattctgctttccaaaagtacgactacgggctaattctgaataagatacgctaccagtcgatctttcccccactttacaacctttccctggcactgggcaaggtggctcttcaccgcggagatggcgactggttgggatccgaatcggatgtccttcgactggagcgggacctgcccaactgcatagaaaacaggaacattcgcttcgaaggattctcgcacttcgacttcacgatctcaaaggacgttcgatccttggtctacgatcgtgtaataagtctttgtggttctaatcgttaaatgcttagataacaaattgtactcttagcttacaactgaaatacaatcaaagcaattaactg

SEQ ID NO: 27336 - protein, 356 aa, DROSOPHILA
MISKYGHQVETHYAFTADGYKLCLHRIPRSGATPVLLVHGLMASSATWVQFGPSQGLAYILSQSGYDVWMLNTRGNVYSEERLAGRESDKIFWDFSFHEIGQYDLPAAIDLILLQTKMPSIQYIGHSQGSTAFFVMCSERPEYAGKISLMQSLSPSVYMEGTRSPALKFMKLFSGGFTMLLNLLGGHKISLKNKIVDMFRNHICTKLIPSRICAIFEFVVCGFNFNSFNMTLSPILEGHASQGSSAKQIYHFAQLQGNSAFQKYDYGLILNKIRYQSIFPPLYNLSLALGKVALHRGDGDWLGSESDVLRLERDLPNCIENRNIRFEGFSHFDFTISKDVRSLVYDRVISLCGSNR

SEQ ID NO: 27337 - DNA, 10400 bp, DROSOPHILA
cacctggatgcgacctttgccccgctcggcacactccttcagcacgtccacatcgtaggcggtgactccgatgaatcgagcctttcccgcctggacgtactcctcgaggacgggtatggtctcattcagcaccatgtccagactaggtgccgcatccacgtcatgaacctgtcacaaggtgttagtttatagacaaatctatatattggtataccaaacacacctgtagtacgtccaccctgtccaactggagcagctccagactacgcttcacactctcccgagccttggcagccgtatagtcgaacatattgtttggatccaactcgtaacgtgcaactttagttgctatataataggcctcccggggcacatccttgagcgcctggccaagcagctcttccgatttgccttggccataaaagggagccgtgtctatgtagttgataccggatctaatggcttcctgcaccgtgaggatgccctcctcgcgatcgaagtcatcggagaagagcttggagagagtggcaccacccaaagcaattttggatactcgcagacccgtggatccgagttggcggtactccatacgacgcaccttctcctcatcgtggaaacccttgacgaaagtagctggcagtgatcccgacatccttttcgcttcaattaacaagcttgaatgaatagaactcctagaaaaatggcactttataagtgcataaagtgattttaacatatgtaggtatgagtgagttccaaaatagatttgcctcccttagcaagcttctcttcgtgataagctgtggaagagaaggttcgctcttagttctttatatatattactatgtaatttcgcattattaatgtagctctctgtaagaatgattctaaaaattgtgatatcatataccaaccacattttttaaagagaaaaccaattcccaattaaggtaattccttttaataccttgcatgtgaacaataagcataactccgatcatgtttgttttaatactatttattttatttatcagaggagattctgagctttttgcggcttccaatcagttgacaaatcgttaagagtaaatataaatatctgctttatatatcaatatgcatgagatggggacgagcaccgctcagaagaagacatcgaaatcgccctgtggctgatagccagctccgggcgggatcagctggggtcgctgctgttgctggcgctgtgggcgtggcacgatgatgtcgttgatctcatggagaattccattggtggccaccacatcgcacttggtgacgccggcgttctcgatcttgggacgacgatcgcgggtgatacgcagatgctggccagagatggactcgatggagcggacaaatggccagttggttgggataatgccggcacagcagacaacatcctcaacgatatgggttttgaccaaggccatgggatcggcgggctttgaaccctcaccggactcgttcagctcctcgaagatatcgttctttggcaccagcagggtgagactcctcgaatcgttggacagcagctgtgtaagattagccttacgaaccagctccaggaacttgctgtagttgggattagcctccagcagcttaagcatgttctgtggaatatttacaaataagcataagctttaaattccgtgataacctcgtagaactcacattcttgggaggcgccaaggcacgatccacctggtggagaacggatccgcagctctcgtcatcgaagtgcaccaaacgggcacagtttaccgttgcccggttcatcacgtccgagaagagagcatgggtggagtacaggttcagacgcacactagatccagcaaccgtgggcagggacttctccgacaggtcacaggtcttgatcatgggcttgaccacatggtagttaaggaactccagcagatccaagttatgattcagcagctccggctgttccttgagcatgcgagcccattccgtattctgcagagccttgtcagttggtgcaaagatggtcacgttgtccagatcgtcgaactgatcatcgtagccggaggcctccagcaatcgctggaagatggtcaggttcttttgcgacatcagcgaggtcatgggcagagccgattcggtgggcaggatggtgtcgattacgtgcagcacaccattggtgcccatgatatcggcatcaatgattttggccaagttattgatgtagatgggagtcggtccagtctgattcgcagcgcggtgggttcggttgaggagcaggggttctcccagtagattgtaggccgtcgtcttggcacccggaacagtggccagcgagcagaaggtgaggtccagcaaatggttcttcaggatgtctaccggataaatgggaatcatattatattagttagttagctgcttgtggataagtttccagaccaactcactggaggcacaaccgcgaccttccttgagggctcgacgcagatgaggttccaacttgtcgaaggcggcatcggtgggcacaaagatggtcactggcttgtcatcctctagcatggcgctcaggttggtcttctccagaacggtgcgcataatggacatatccgcacgctccctgatgatatccataaggttcttggtcagcggcttcaggactccgcccagagtgtggacaagggcctgctccgagagcttgtcgtgcttctcgatgggcacacagttggcggcaaagcggtagggttccaggcccaaagccgcaggcagctggtagctgttgatgcggatcttctggtcaggcagctccgtctgcagaagcttctcattgggcacatcctccagctgaacttcgccgagaacagcgtgcagtttgtagatggatggcttggaagcctcggccttggcatcttccacattctgttgtacgcaaagaattctcatttatttacatgaattttagtaaccaaaggcatgctcacattctcctgctgatgatgaccacggtactccatgaaggcggcgtcgttgggcacgaagagggtcaccttcttgccactgcctgctccgagcatatcggccagctcaccggcggtgcgtgcactctccaggaactgcttggcacccatgtcactggccgtggcctccacgtccttgatgtcgatcttctcgcagggcgttgtgaagtcagcgtttctggggcgtccatatccatagcagcactggcgggtcagcgtcagcgttttcttcttgccattttgattcacgctgcaggggataaagtgttcaatcaattggatgagattaggtaatcctactgtaatctgcttacatcttggtgcagacgtgcttgttgggcttctcggcgcaggagttaacgctgaactggaactggccaaagagtggggatcgcaccacgttggtaacgccatcacgttcctggccaaaggtgtccacggtttcttctgcctccgtttcactggccacagtctcgtcttcctccttttcggtgcacacattgggtctgaataaagcgaaaaattggttattggttaacaatgtgatgtagtaatagtttggcgaaatgaacaaatataattcaaggcaatcgtttttcgagactcaaatacataagctttaaaaatagtgtatttcaggcatatattcaaatcattagttttataagttatcttcaatgagcaattactaataacttgttgctatatttaatctatgatgatcattctccctttacgttctctacaaattatagccaaacctgctaatgaattggtcatataacagacatgcaaatcgaaatgtcaatgcactatatagcactatataccactatacatatatgtatataattttgattcaaccctaaattcctatatatccacaactccgaatccaatccaacttagtcggttgatcggcactcgctaaccgattgtttgcccaatggatttgcacaatgagtccggcacatagaaagcatagttatattatacaaactgacttttatataaatgcgtatgtgtgttggcttaacagctttgccagtccatcaattcaattatggcagcgatgagaggagtctactgaatgcgaactcattgtgtgcgtagattttagaaatttctcactgaaccatagatacacagtcgcatacatacatacatacatatgtttgtaatgcagctaatttatcaatttgccacatctgtgactttcattttactatgcccgcgcagtaacgagttcatcgcacagtgcaaaaaagacgacaagtggatttcacaatttataaaagtgcaagctcggctgtagaaaccgtgcagttgtgcacttatccaatatagacactatatatctatatattcattcacttttccctatatacaatgccatatctggttgggcaattaaaaaaaaaaacagcaatcgagccctggaaaattattaagcagcctcagctgcgaataatcttggatggaaaattatttaagtaggtatttaccatttaattgatatgctcgattgcctctatgatggcgataacccatccaactttacacaattatagaatatatataccatacaatcatatagttaatgggtcgtatgaacttgacattgtgctctcttaattgccaaatgccaagaacggcgaagttggccacagaatcactcgagtgcggcgattaggaaagacgccaaattagtgaccataactgggggacttttttttttttttttagcattcaagtgggggcaaatgcccttaatggatggcacttaccccttccaccagggctcctgggcagctccaaagccaaagcctccgaacgaattgaagaactcattgccaaagaaggggaacgattgctggaagaagatggccggatttggggaattcacatccgtggtgatggtgtccacatctgcgaagtaaggaaacgcaattaaaaccatactataaaatttaacaattgcttaagacacttaaaatattctttagtaacaattcaaattacgctgagattaagcttgcacataatattcttcaagatactaattttgcgagtgcaatttttatggcattgttaaatcactataattaagcgatcagcatagttgatcaagaatggctacctcttgctgttttgcaaagtagtttataaattggtcgtttctaagattcaatttcagatttaaattcagattttattccagatttggactagaaaccaattgcaacagaaataattaaaagagttttgggatttctattttaataaattttaaacgaatatctaaatatatgtatattatagagatatagagcacttactgaacggcttctgctccacaccgctgggggtttgagcgggaacggtggccgccgtctcctggcgtccctgcggctgctgctggtgctccagtggcacgaactcggtgtcgtatccgctgctgaagaggggcaacaggtgagatgagtggagttgcggcgccaacggggcgggtccgttccagacgctcgccatccgctgcgaggcctgggcatgcagtggatcttggggctcgagcggtgcgagtggtgcgaagggcaggggcgcgaacagattgcgatgcgccggcaatgggtgggttaaatgtggcataaagctgcagaacggtgggagtgggcgtaggagtggacgtggtgtagagtgatgtggttagtgtatacagtattagctggctactgtgtgcccatatgtgtgtgtgtgtgtgtgtgtctgtgtgtgttcccttcatgcaaattccattggtgagcggaacgaatcgaaacggaaccgggacccaataattcatatgcctccattgttacctcgcataaaaagaagctcaactctatcctcaccaaactaaatatatgtatctatctgtatgtagtatatatgctgatcgtgctcattgtttaggttttttgcgcagcatttacctgagccgcatactaagcgcctgtcagtggaactctttttagaatcaaatgaaaataactttttaagtgccgaaacaatcgctgaaaaaggcgaacaaaacttgagaaatgttcctgcacttgtcatccatcaactgagatttatgtcaacggattttggttttttctgcgtctcccaatgcattcgaaatctgtaaactgactcagatactttctatgaagacatacatacgcgttagccaacttcaaatctttttttcttcgctgcggctcattaaaattcgcttcgcgggagctaattaaaaaaagctcataataagtgctaaatgaaaaaaatatacgaaacgaaactagctggaaataaataataaaacaatactgcccgaaaaggcgaaacgtaaacaatttgttgggttgctgactttgaggtacttctgtgtatccgattcacttctggttggagatctgcctccgtccaagatgactcatccaggcgggacgtgatcgacagggctcgaagcggctttggctgagctacagatacaggcggtttaagccgacattacaatacatagaggcttggccagtttgatttttttttttctctttctaccttgtcagattctctggaaatcacttctataatattgctagagcgagtgaatgcacctcagtttaaatcaattgtgtgtccatcaatcaaaaaaccatcaaaatatttgataaaaaggaacacttaatttattcacaatttattcgcaagaatatttactcaaaacgttatcataaatattttatattacttggaaataagtcaaaaattttatttctttttcattattttaactactgtacgtcgattattgaatgcaaataatatttcaaaatgtatacattcatatgaacagatttgaataaagaaataaaaaatcttacaatagagcgaatgacttttgaaatcttagaataattactcttcatcttaaaaattgtgcaaaaatataatatcaactgtatgttgtttgataagatattaaatatatccatttagcagtaattcaatgactaagtactttgtgaaagattaatgaatgtgtgaagtatttgttttgtgatcatggtattcaagactacttggaatatttgtagactgcgtatccaatctgtgaatcgaatataatttgcaaacaaactaaattctgttcgcttgaagccagagcgaaagtcattggccacagaaatttccagggaaatgtttacgtcgagggcagagatggatccaaccaaatggctgcctgatttaatttaagcgcagccgtgacaggcagaataaaaaaaaacattctgtgagcgttaaagggggaaccaaattgtgggcgacccaattcgagggcagattatagagtttgcggagacattcttttgccggcgcattacccattacccacaatatgccacttaatgccgtgtcaaatgtcaattgctctcagggccaaaactgttcgagatttgtgtgccaaagatgagccctgcggcggcttgaacccaaaggtggcaaagtcagccaagtgtggagcgaacggagaagatcggtggaagaagatgtggatcttggttgcccaagtcccgcggtgttgccccactttggttgcacattgttctcttgcgatgcagtatctttcgcaaaaaagggggaaaaaaataataaaagccaaagactcagatcgtggcctttgcacatttccaatggcggcaaagaacccagttcgatgcggatttattggcagacaatctctgcgactcaacaatttcagtttaaggtttatcaattgaggtcaatactcggcgggcttttggactttctttccgggggaacttttcgctctttcagcgccttcgctaccataaacatttcggtcaactttatttgcagtttcgtttagcgggcgaaaagtttctccaagaacaaacagggctcggtgcctcgttgggcttgaaaatgtcataaaaaacactgaacccggtattagccaacttttatgtggtgtcagtgggcccagcggaacccgtgagtgaaaaaaatattgaaactgtttaagcatttttaagttgtttaacatgtaaacctcgtcggtatgtttgctttgttaagtagttgtaaatgagcaaatctactgggaaatgttggggactcaacagctgggctaactacgtttacttatagttcacctggagttatctgaggactcgtgtgtggaatccgaggagtcatcgaattcggcaacctcttcagaacttgaactggaattcaacatttcgtttattgggacagatttaaaaggtcgggcggatgggaaaaatctactagggttagttctatgggacttaagcacttaatattaacgattatttggaaactttaccaattggtcttcaaaaatatatttgaaagcgttattgtaaaacttcaataatggcaaaatacttgttttttaactcgtggcttacattaatattgttataaacattgttatggatggtatcaaacgtttcaatttagatctaattttgtatttctttcaaagtgtttttttttttttaatttttttccgtttttagttatttgggatgcgcttgttaggtaaaattttgttccaatgattctatgaaattgtatatgtttaattagagaagtatttcaattttgtgggtcccaggcattcctggcatttcaattgtgttccgataacataaaacatttagttcatgccttatcagaagatgtcgatgtacatatgttaaccatttagcccgcaacgcaaacaactcaaactacgtgaaatgtgcatgaaacgaacgctactacacagcacgaaaaacttgtcggattgatactcactcgccgtagaatggaaccgcctggatctggattgatcccaggaggagcaggcaggcccacagccgtagcatgtttggtatcacaattttaatctggagcctcggttgggagctaagtaaatgaacgagacaagctgaaagttgctgtaatcaagggaatggctgaagctggctgaatggctggttggattcgagaaatttcaccgcgatggatggaaaaacagctgagaaaccgaagaaatacaggttttccacgcagcgctgcactcgcgtatgtaggtgactgattttgggagtgagagcgacggtcgacgaagaaaattttccactgtcttcacgcattaattgtaaatatgctacggatagacgacatataccgcctgtcactcacttgtaattattgtcaattgtcttgtttttacaaaaattggcacacactcaattatcaaatgtctctggctccttttactgcagttaatcgtaaaaaaggggcacttgtggcactcacgaaagttgttatatgttgcttgatccgacgatgttgccgcttcaagtcgcagtttaaaactaactgcccaagaacgtcgagcatctggtatttataagctgctctgccgcagtcgccgtcgattcctctgccgcgatatcaacgcatgtagtgatcatgggagctttgggagaacagagagaacttttggggacgctgtgaaatcggtaatagctctatatatgtatgtatgtgtgtatttacatatgtatatgcaaatagtgcgggtggcaggaggttcgtacaaattgtgaaagtgccagctattaacacttcatagagaagcgagcgaaacgaagcacttttattaatcatagtacatttcactcaaaatactgtagaatttgggatacaaaacccaaactaaaacggtgtagaatctgaagaatatatcctataatataggactcatatcatttcagactttggcttggcgagcatttcaaactacttattcatttcgagtattttcaatttcctagaatcattttctgtttaaactgcacctagagcgtttctggcaatgtcctacctgtatttgctagccaggtgtagtgcgcacttggaatttccgatattcccgtaacctctaacacccatcaatcactgtggtgtctggtcggttccgccttattaggagtctcctcatattttgaaactgttccgatcggtttttattgttttgtataaacaagatgtcagcttgtagctacatgtgtagatgaaattgaatttcttggaactgttagaagactttataatgtgttcttatatttgattgctcattgttttgattttagtcaatattagatgcccgttttttacttattaccaaagtcaagcaaagtatgttgttattgaaaaaccatgaaaaatcgtaatcatccgtttctgaaataaatatttattcattatttacaatatttatttgtgctattaatgtaggtgtatatatattttgtatacgta

SEQ ID NO: 27338 - DNA, 3037 bp, DROSOPHILA
caactttcgtgagtgccacaagtgccccttttttacgattaactgcagtaaaaggagccagagacatttgataattgagtgtgtgccaatttttgtaaaaacaagacaattgacaataattacaagtgagtgacaggcggtatatgtcgtctatccgtagcatatttacaattaatgcgtgaagacagtggaaaattttcttcgtcgaccgtcgctctcactcccaaaatcagtcacctacatacgcgagtgcagcgctgcgtggaaaacctgtatttcttcggtttctcagctgtttttccatccatcgcggtgaaatttctcgaatccaaccagccattcagccagcttcagccattcccttgattacagcaactttcagcttgtctcgttcatttacttagctcccaaccgaggctccagattaaaattgtgataccaaacatgctacggctgtgggcctgcctgctcctcctgggatcaatccagatccaggcggttccattctacggcgacagcggatacgacaccgagttcgtgccactggagcaccagcagcagccgcagggacgccaggagacggcggccaccgttcccgctcaaacccccagcggtgtggagcagaagccgttcaatgtggacaccatcaccacggatgtgaattccccaaatccggccatcttcttccagcaatcgttccccttctttggcaatgagttcttcaattcgttcggaggctttggctttggagctgcccaggagccctggtggaagggacccaatgtgtgcaccgaaaaggaggaagacgagactgtggccagtgaaacggaggcagaagaaaccgtggacacctttggccaggaacgtgatggcgttaccaacgtggtgcgatccccactctttggccagttccagttcagcgttaactcctgcgccgagaagcccaacaagcacgtctgcaccaagatcgtgaatcaaaatggcaagaagaaaacgctgacgctgacccgccagtgctgctatggatatggacgccccagaaacgctgacttcacaacgccctgcgagaagatcgacatcaaggacgtggaggccacggccagtgacatgggtgccaagcagttcctggagagtgcacgcaccgccggtgagctggccgatatgctcggagcaggcagtggcaagaaggtgaccctcttcgtgcccaacgacgccgccttcatggagtaccgtggtcatcatcagcaggagaataatgtggaagatgccaaggccgaggcttccaagccatccatctacaaactgcacgctgttctcggcgaagttcagctggaggatgtgcccaatgagaagcttctgcagacggagctgcctgaccagaagatccgcatcaacagctaccagctgcctgcggctttgggcctggaaccctaccgctttgccgccaactgtgtgcccatcgagaagcacgacaagctctcggagcaggcccttgtccacactctgggcggagtcctgaagccgctgaccaagaaccttatggatatcatcagggagcgtgcggatatgtccattatgcgcaccgttctggagaagaccaacctgagcgccatgctagaggatgacaagccagtgaccatctttgtgcccaccgatgccgccttcgacaagttggaacctcatctgcgtcgagccctcaaggaaggtcgcggttgtgcctccaacatcctgaagaaccatttgctggacctcaccttctgctcgctggccactgttccgggtgccaagacgacggcctacaatctactgggagaacccctgctcctcaaccgaacccaccgcgctgcgaatcagactggaccgactcccatctacatcaataacttggccaaaatcattgatgccgatatcatgggcaccaatggtgtgctgcacgtaatcgacaccatcctgcccaccgaatcggctctgcccatgacctcgctgatgtcgcaaaagaacctgaccatcttccagcgattgctggaggcctccggctacgatgatcagttcgacgatctggacaacgtgaccatctttgcaccaactgacaaggctctgcagaatacggaatgggctcgcatgctcaaggaacagccggagctgctgaatcataacttggatctgctggagttccttaactaccatgtggtcaagcccatgatcaagacctgtgacctgtcggagaagtccctgcccacggttgctggatctagtgtgcgtctgaacctgtactccacccatgctctcttctcggacgtgatgaaccgggcaacggtaaactgtgcccgtttggtgcacttcgatgacgagagctgcggatccgttctccaccaggtggatcgtgccttggcgcctcccaagaataacatgcttaagctgctggaggctaatcccaactacagcaagttcctggagctggttcgtaaggctaatcttacacagctgctgtccaacgattcgaggagtctcaccctgctggtgccaaagaacgatatcttcgaggagctgaacgagtccggtgagggttcaaagcccgccgatcccatggccttggtcaaaacccatatcgttgaggatgttgtctgctgtgccggcattatcccaaccaactggccatttgtccgctccatcgagtccatctctggccagcatctgcgtatcacccgcgatcgtcgtcccaagatcgagaacgccggcgtcaccaagtgcgatgtggtggccaccaatggaattctccatgagatcaacgacatcatcgtgccacgcccacagcgccagcaacagcagcgaccccagctgatcccgcccggagctggctatcagccacagggcgatttcgatgtcttcttctgagcggtgctcgtccccatctcatgcatattgatatataaagcagatatttatatttactcttaacgatttgtcaactgattggaagccgcaaaaagctcagaatctcctctgataaataaaataaatagtattaaaacaaaca

SEQ ID NO: 27339 - protein, 816 aa, DROSOPHILA; identical to SEQ ID NO: 26112

SEQ ID NO: 27340 - DNA, 3468 bp, DROSOPHILA
ttctttgttgtccacttgtgcccccaagcataaaagcccatcacaaaagaatcagatgcccagcttggagttgagcataaaaataaactggggatctacaagcataatcgcgccttggagacccctcaggtaccaagtccattcccgaactcaaatcggatccctcgctctcgtataaataggggctgcctggccctatttcaaaacagtcttcgctcgatcgctggaggaatacatacataggtggaaagaaagtgaaaatgaaggttttcgttgccatctgcgtgctgattggactggtgagtgctcgatacagataaacggcgaccaggaccagaataattcaacgccttcccttgggttataggcctccgccgactatgtggtgaagaaccgacacgacatgctggcctaccgcgatgagtgcgtcaaggagctggccgtgcccgtggatctggtggagaagtaccagaagtgggagtaccccaacgacgccaagacccagtgctacatcaagtgcgtcttcaccaagtggggcctgttcgacgtccagagcggtttcaacgtggagaacatccaccaacagctggtgggcaaccacgctgaccacaacgaggccttccacgcctccttggccgcctgcgtggacaagaacgagcagggatccaatgcctgcgagtgggcctaccgcggagccacctgtctgctgaaggagaacctggcccagatccagaagagcctggccccgaaggcctagtggcttaggtcctagttggacggatgtaacgataagcattagtttagttaataaagtaattgatttcccatacaagttcgagcattccttctcgattcagtggggaaaaacagaatgtagatatttcttcttcaatgggggcctcaatttacttattaacaactccgagtagcaattacattgaggatatgcttttaggcagccaaactaaactaaaactttggccaactacttccattcgtcatgttgctgtacaccaaggaacttgtgattccgcggccgagaccaggactactgcgcttcaggaacaatccgcgtggtattaagtttcgggaaaaactgtgcaactcctttgcccactccaacatccatgggatgcagcacgtcttcggggagcagcatctctggcagcgctgcctgtggctcgccatcgtcctgggagcggtgatcacaggattcagtctgtacaccgtgctgatgcatcgccacagcgagcagctcctggtcagcctgatagagaccacccagttgccagtgtaccacatcgactttccagctgtggccgtttgcccctggaatcatttcaactggcagagggctccgtcggcatttatccgctttctgccacgtcatccgaatgccgagctccgggaaacatttcgccagctactcgccagtatggacattatgaacttctccaactttaaccggatacggattctgaccaaacgaaatctgacgggaattagttatctaaaaatgacggacctgatgaacttcatgacctatagatgcgatgaactcttcgtcgccgattcctgcgtcttcgatgagactccctacgactgctgcaaacttttcgtacgggagcagacggtgaagggccagtgcttggtcttcaactccatgatttcggagaactcgcgcaaaaagcacctgattaaccagttctatccccacaagctgagcaccgctggcgaggattcgggcctgaagttcacgatcaatgcaagctactcctttatgaacaacatagacgctctgactccatttggaatgaatgtaagtcccttagttgcgtcacagtttgctcatattttgtttaattttattttttggttactaagctcatgattaaggaaccacgccagtggtccaatgaaatgatgtaccacctgtacccggatacggagaactttgttgctgtgcatccgctggtcacggaaacctctccaaatacctatgaaatgagtcccaaaaaaagacgttgctactttgatgtgtgtatagcttgcaactaataggaaaagataatcataataataattccttactccataggatgaaaagaaccctaccttccagaacacttcgttgacttataaccgcgaaaactgcctggtggtgtgcctccacttagttgtgtggaagacctgccagtgctcgctgccagcttttctgcctcccattggtaattatcgtaattattctattacattttaaattttttttttttttagatggagttccggaatgtggaatcaacgatgcacaatgcttgggcaacaattccgatatattcacttacgtgaagatgggtgatcaggagaaatacattaacgactcacgacagggtcacttttgtgattgcccagacaattgcaattcacggctgtacgaaatgtcacttaatgtgcgcaaattggattagtaagttcaatgtatatattcttaaagaacagataattaaattcccctctcttttagcccaaaaaactcgacagatcaattgataaaagcccaggtttattatggccaacgtgtcatgaccaaaatcattacgaaactcaagtacaccaatatagatttactggccaactttggcgggatcataagtctgtatataggggcctccgtcatgagttttatagagcttttatttgtgctgggaaaactgatgtggggtttcatcagagatgcgcgcataaaattgaaagagtatactaagtagcttactttaaaaaatgatgtaaaactttgccgtaaacaagtatatataacattatttctgtttagtttcctggtccgtgggatagcgtatatagatagccggatgtggcactgtagccggcgtctctggcagttggtccaagtaggagcagccgatggccagggcgctgccatcggagctgaagttgagcgtggatatggaggtatcgtattcgtggaactgacaaaggcgcttcttgttgaagccatcccaaatgttcacaatgccatcggatccgccagtggcgaacgtctgatagacattgtggaaactcaaggcattaacggggtagatctgttcgatattctgctccctattccggtggcacttgaaagcgaacttgcggcgctgcacctcaggatcgtgatccaggtactccactgccacccgtccctcgatggaggacatcacgtagccttctttgttggggaatagacgaatgcagcgggtctggtacttgagcgaggactcccgcttcatgatgtagctgtccatcttgcgaaggtcccagatgagcaccttgcggtcggaggtggccaccacgatcttttcgtcgatcacggacatggagtacacctttccgttgttctgttcgaaggttccaacgcagcgcttctcccgcatgtcccacagcttcacggtattgtcccagctacccgtg

SEQ ID NO: 27341 - DNA, 1293 bp, DROSOPHILA
atgttgctgtacaccaaggaacttgtgattccgcggccgagaccaggactactgcgcttcaggaacaatccgcgtggtattaagtttcgggaaaaactgtgcaactcctttgcccactccaacatccatgggatgcagcacgtcttcggggagcagcatctctggcagcgctgcctgtggctcgccatcgtcctgggagcggtgatcacaggattcagtctgtacaccgtgctgatgcatcgccacagcgagcagctcctggtcagcctgatagagaccacccagttgccagtgtaccacatcgactttccagctgtggccgtttgcccctggaatcatttcaactggcagagggctccgtcggcatttatccgctttctgccacgtcatccgaatgccgagctccgggaaacatttcgccagctactcgccagtatggacattatgaacttctccaactttaaccggatacggattctgaccaaacgaaatctgacgggaattagttatctaaaaatgacggacctgatgaacttcatgacctatagatgcgatgaactcttcgtcgccgattcctgcgtcttcgatgagactccctacgactgctgcaaacttttcgtacgggagcagacggtgaagggccagtgcttggtcttcaactccatgatttcggagaactcgcgcaaaaagcacctgattaaccagttctatccccacaagctgagcaccgctggcgaggattcgggcctgaagttcacgatcaatgcaagctactcctttatgaacaacatagacgctctgactccatttggaatgaatctcatgattaaggaaccacgccagtggtccaatgaaatgatgtaccacctgtacccggatacggagaactttgttgctgtgcatccgctggtcacggaaacctctccaaatacctatgaaatgagtcccaaaaaaagacgttgctactttgatgatgaaaagaaccctaccttccagaacacttcgttgacttataaccgcgaaaactgcctggtggtgtgcctccacttagttgtgtggaagacctgccagtgctcgctgccagcttttctgcctcccattgatggagttccggaatgtggaatcaacgatgcacaatgcttgggcaacaattccgatatattcacttacgtgaagatgggtgatcaggagaaatacattaacgactcacgacagggtcacttttgtgattgcccagacaattgcaattcacggctgtacgaaatgtcacttaatgtgcgcaaattggattag

SEQ ID NO: 27342 - protein, 430 aa, DROSOPHILA
MLLYTKELVIPRPRPGLLRFRNNPRGIKFREKLCNSFAHSNIHGMQHVFGEQHLWQRCLWLAIVLGAVITGFSLYTVLMHRHSEQLLVSLIETTQLPVYHIDFPAVAVCPWNHFNWQRAPSAFIRFLPRHPNAELRETFRQLLASMDIMNFSNFNRIRILTKRNLTGISYLKMTDLMNFMTYRCDELFVADSCVFDETPYDCCKLFVREQTVKGQCLVFNSMISENSRKKHLINQFYPHKLSTAGEDSGLKFTINASYSFMNNIDALTPFGMNLMIKEPRQWSNEMMYHLYPDTENFVAVHPLVTETSPNTYEMSPKKRRCYFDDEKNPTFQNTSLTYNRENCLVVCLHLVVWKTCQCSLPAFLPPIDGVPECGINDAQCLGNNSDIFTYVKMGDQEKYINDSRQGHFCDCPDNCNSRLYEMSLNVRKLD

SEQ ID NO: 27343 - DNA, 2996 bp, DROSOPHILA
aagcagagaaaaatgtaaaatacaatgaaacactagcctcacatccaaatcctcttgcaagaaaacttttcgagtatgcagccaaagccgactgcaccggaacgaccaactagcccagcgttaaatttgttaggccacacagcacgaatcactccataaaatgatatttagttagtttagaataagattttaaaacttattgttagtcttttaagtaaaaggaaagattcaacaaataattaaaacatggaaaaaaaccgccggcgtgatgctcccgtcagcaaatatcgtacaccttttcttcttttttattataaatttattccaaacaaaaaaaaaccgtttatatccatagcattaaataataaaaaatgtgtcagaaagactttcgggcccagcgccagcttgagcaagaccaacgtcggatctcaaaaattcaccctgtcgattgacatccaatagaactaactggctaaaatacaagaaattcgtaagttcgcatattgaactgaacccaagaatcatcaataaggctgacatagaaatcaccactaaactcttggagtctgtccttgttgcagcagcccatgcctcaaccccaaaaaaacaaactgtacagtatatgcaacgtaagacaaatgttcaaattgagcagcttgtcttggaaaagcgctgcctgcgacgagaatggcaatcttattgtcgagccgccgacaatatccagggaatgccttaaatgcttagacaaatgaagatggctttattgtatagggaaataatacagttttgcaaggcattacacattttgaccttatatctgttctgaattttacgtaccgcagtttcccttccctcactcttggatatcgtcagacgaactgatctgacgcgccaagtatagcttaattcttagttaaatcgatgggaccaattacaataacaataaaaacacatacattataatactaaatccgagtgccctctatcggtgagaaattacttaactacttatcgatagccctaatttggctcgatcgctagtcctcaccgaaaccggacgtggcactccatcttttccggtgaacacctcttcaacgacgcttcttttccactccctgcgtggtatggccggatcgcagatgtataacaggtctcctcgacgcatggactcaacacgctggcaccctttctctctgccaacaagtgtgggcaagtactcgtgcacccaccatttccagaaccgatctcttatcatccgagcgatacgccactgtttccttgttgtgcatctctcagatgccaattcatcatctccaggaatatttggcacgtcgggcattcctttcaacaggtcgttcggtgtcagtggagccttctggtccattgtgatcggcaagtgcgtgagcgggcgggaattcactatattctccgcctcgatcagcaagttctcctgcacgtgcctcttgggtacaagttccttcatcgtatgcgccaaaaccttcttcacgcactggaccatcctttcccagacacctccatcagctgacaacttgccctgtatcttcgctgggtcaaatacatcgctgaatcgtctggcctctttatcggctctcacgaagtttttgcaattatcgctccttatcctaaccaccggtccacggcggcacacgaagtttctcctagcgatgatgcatgaatccgctgacaaatcgtgagttaggcaggtgagtagcgccacccacctcttctctgttcggcgcccaatcgacacaagcaatggtccgaaatagtctaggccagtgaatttaaatggccatccatttgtctcaagccgatcctccggcaatgggcccatctccggttgtgtcggtcgtgccttctgcaacttgtatacgttacaattagccaccaccttctgttgcagcctcctcacgttagttatccaaaactttcgacgaatctcgccgatggtggcctccacgtttgggtggcacatcctctcatggttgtgacgaagggatcatttccgtcagtgcgcttttatggaacagtatgatcggacggcgagccccatatggtacgcatgccgctgcgtgaatccttccattggcacccatgatacccaatatccaaatacggcgacagtcctgataattggctgctcttgctaaccattcctccttgagcttcctcggcgaacgcttcactcttcgccagccggaccaacgcgtgttccgcgtcagcacgttcgacagaggtaagcccgtgctcttctcgctcgtagcgttgcctgcgacagcgtcgaatctttaggatccatgctgtcgttcttaccagccggttgaaactcgagaacctcttccaagatacaagcggccatgaccaatgcaaactcacatgacatctctttttcctcagcggcctgtggagtgcgtccatcggttacagtagatttgggccaactttcttcaggtcccattaggaatggtgggtgatccgcttaaccaccgcgaaccttggctgaagtccacgcggcgttgcgacctggttctccattttgaaacctctgtggattctaagatttcggccacccgatttcccacaaattgctcatatatccggggagtgctggtgatccagtacagcacggttaatagtgtgcagctactgatcgctacaccgtattcctgtcttgttcctaatacagctgcttgaagttccagtcgtgggatcgacatcgtcctcatgggagcacattttgttttggaacacacaaaatgtgccttgcacgtcgtcgtttacgtatgtggcccgccaataagccgccgcggcgaacgcagattggcttggagtccacgaagacgttcagctgcagtgtccgcacacgtccagcgccgaagtagtagcgtggacatcggaattcttcaatgtatttcatttcttgccgccagtactcaaatgctgcggccaattcgtctgggagcggctcatcccac

SEQ ID NO: 27344 - DNA, 996 bp, DROSOPHILA
atgtgccacccaaacgtggaggccaccatcggcgagattcgtcgaaagttttggataactaacgtgaggaggctgcaacagaaggtggtggctaattgtaacgtatacaagttgcagaaggcacgaccgacacaaccggagatgggcccattgccggaggatcggcttgagacaaatggatggccatttaaattcactggcctagactatttcggaccattgcttgtgtcgattgggcgccgaacagagaagaggtgggtggcgctactcacctgcctaactcacgatttgtcagcggattcatgcatcatcgctaggagaaacttcgtgtgccgccgtggaccggtggttaggataaggagcgataattgcaaaaacttcgtgagagccgataaagaggccagacgattcagcgatgtatttgacccagcgaagatacagggcaagttgtcagctgatggaggtgtctgggaaaggatggtccagtgcgtgaagaaggttttggcgcatacgatgaaggaacttgtacccaagaggcacgtgcaggagaacttgctgatcgaggcggagaatatagtgaattcccgcccgctcacgcacttgccgatcacaatggaccagaaggctccactgacaccgaacgacctgttgaaaggaatgcccgacgtgccaaatattcctggagatgatgaattggcatctgagagatgcacaacaaggaaacagtggcgtatcgctcggatgataagagatcggttctggaaatggtgggtgcacgagtacttgcccacacttgttggcagagagaaagggtgccagcgtgttgagtccatgcgtcgaggagacctgttatacatctgcgatccggccataccacgcagggagtggaaaagaagcgtcgttgaagaggtgttcaccggaaaagatggagtgccacgtccggtttcggtgaggactagcgatcgagccaaattagggctatcgataagtagttaa

SEQ ID NO: 27345 - protein, 331 aa, DROSOPHILA
MCHPNVEATIGEIRRKFWITNVRRLQQKVVANCNVYKLQKARPTQPEMGPLPEDRLETNGWPFKFTGLDYFGPLLVSIGRRTEKRWVALLTCLTHDLSADSCIIARRNFVCRRGPVVRIRSDNCKNFVRADKEARRFSDVFDPAKIQGKLSADGGVWERMVQCVKKVLAHTMKELVPKRHVQENLLIEAENIVNSRPLTHLPITMDQKAPLTPNDLLKGMPDVPNIPGDDELASERCTTRKQWRIARMIRDRFWKWWVHEYLPTLVGREKGCQRVESMRRGDLLYICDPAIPRREWKRSVVEEVFTGKDGVPRPVSVRTSDRAKLGLSISS

SEQ ID NO: 27346 - DNA, 3308 bp, DROSOPHILA
tcttctctgttcggcgcccaatcgacacaagcaatggtccgaaatagtctaggccagtgaatttaaatggccatccatttgtctcaagccgatcctccggcaatgggcccatctccggttgtgtcggtcgtgccttctgcaacttgtatacgttacaattagccaccaccttctgttgcagcctcctcacgttagttatccaaaactttcgacgaatctcgccgatggtggcctccacgtttgggtggcacatcctctcatggttgtgacgaagggatcatttccgtcagtgcgcttttatggaacagtatgatcggacggcgagccccatatggtacgcatgccgctgcgtgaatccttccattggcacccatgatacccaatatccaaatacggcgacagtcctgataattggctgctcttgctaaccattcctccttgagcttcctcggcgaacgcttcactcttcgccagccggaccaacgcgtgttccgcgtcagcacgttcgacagaggtaagcccgtgctcttctcgctcgtagcgttgcctgcgacagcgtcgaatctttaggatccatgctgtcgttcttaccagccggttgaaactcgagaacctcttccaagatacaagcggccatgaccaatgcaaactcacatgacatctctttttcctcagcggcctgtggagtgcgtccatcggttacagtagatttgggccaactttcttcaggtcccattaggaatggtgggtgatccgcttaaccaccgcgaaccttggctgaagtccacgcggcgttgcgacctggttctccattttgaaacctctgtggattctaagatttcggccacccgatttcccacaaattgctcatatatccggggagtgctggtgatccagtacagcacggttaatagtgtgcagctactgatcgctacaccgtattcctgtcttgttcctaatacagctgcttgaagttccagtcgtgggatcgacatcgtcctcatgggagcacattttgttttggaacacacaaaatgtgccttgcacgtcgtcgtttacgtatgtggcccgccaataagccgccgcggcgaacgcagattggcttggagtccacgaagacgttcagctgcagtgtccgcacacgtccagcgccgaagtagtagcgtggacatcggaattcttcaatgtatttcatttcttgccgccagtactcaaatgctgcggccaattcgtctgggagcggctcatcccacttgactctccttcgccaaatctctcgcatcaacagtttggcggttatcatgtagcacctcaagaacccgatcggatcgttggatccgtgtgggttcagagctttgaccacacctgccgaactggaggaaaaccgacacaaatcaaatcctgcgtttgcgtgtatttctctcacccgtgacaaaacggcgacagcttcgtccttgctcatgaaactgtctacatagtcgtccacgtagtagtactcctttaccgcccgaacccctcgcggatccgtactactatattgcgaagcgttgacgagcttcacatagtccgctgcacaaggagagcaagttgctccgaatgtcatgacctgcatctcgtaggtgtccggcttccgacgatcctctccatttctccacaagaatcgctgggcatatctgtcctgtggctgcacttgcagcagcacttggtgacacatcttcttgatgtctgcacattttccaactgctccttcccggaagtggaagagcactgctggtagagatttgtagcgctgagggcctttcatcagcgccgagttcagtgatatgtcgttcactttggctgcggcatcaaagactagacggatttttcccggcttgtttgggttttcgaccccaaaatgcggaaggtaccataccttacccgccgttggtgtggggtatatcctgcggctctagtcgttgtgtatatcccttcttgatgaattatccataattccattttatgcccgcgcgaagacctcttcgcgcttcattttccgttcaatgttgacgagtctcttgagtgccatgttgtagctgtctttcagtctcacctcgtcgtctttccatagcagaccagtccggtatcgtcggcctacacgtttagtcgtgtcctccaaaatgcttaaggctcgcacatcgtcaccagctgcgaccggcggtgggggctttactccaaaattctcagtttcgaagtaatcgctgaccatcttctctagaagattatcggtggacttgcactcccttttacgggtccgtacaccacccattcaagtttggtggcggctccaaatggtcctcctgctccaaagcctctggtcctcagtggaatacccaaatgtgcgtgatctacgccgatcacgccgttgcatcgaagtatggtttaacggtaggctcactgtattacagttattattccgtgtgacttgttgcctactagttccactcaattgtggctgcatatttccactcaattgtgcggcaacggttcattcaaagatggcgtcacaaattgttcccgttgcagattttcactcaacatctgcgtcgtcccttcactcatagctaacgacgtttctctcatacttagcggtgtattcgccgcaccgttacggttaccgctcaaaccgattccaacgggattccttgcggtctctacttgcccttcacttgcctttgccttggatagttccatttctaaggttgcgattctttccagtaggttcgccacctctacagttgtgcaatttgtagtccgccctgctttggcaggctgcggagtacctatcggaccgaataatcaacttttcctggaactttaaggctgctgtatatccctagtcacactcatagatctggtcggagtgccagtttctggttgtgatcgtcgtggaccccttggactgatctagtctagggcttcgcctcagcgccggcatgttacaaatcacagggtgcgaataaagactgcgaataaaagaaatgccgagccgccgacaatatccagggaatgtcttaaacgctcattggcttagacaaatgaagatggtcttattctatagggaatggatcaaatcactactggcacctaggcaagccatggccactataggaggacagtcgtacacagtatctaccacaaggggttggccccaagggggtgtcctctcgcctctcttgtggagcttgctggtagacgagttgctggacagactgacccgcagaggtatactttgccaaggctatgctgacgatattgccattatagcc

SEQ ID NO: 27347 - DNA, 1167 bp, DROSOPHILA
atgggtggtgtacggacccgtaaaagggagtgcaagtccaccgataatcttctagagaagatggtcagcgattacttcgaaactgagaattttggagtaaagcccccaccgccggtcgcagctggtgacgatgtgcgagccttaagcattttggaggacacgactaaacgtgtaggccgacgataccggactggtctgctatggaaagacgacgagagccgcaggatataccccacaccaacggcgggtaaggtatggtaccttccgcattttggggtcgaaaacccaaacaagccgggaaaaatccgtctagtctttgatgccgcagccaaagtgaacgacatatcactgaactcggcgctgatgaaaggccctcagcgctacaaatctctaccagcagtgctcttccacttccgggaaggagcagttggaaaatgtgcagacatcaagaagatgtgtcaccaagtgctgctgcaagtgcagccacaggacagatatgcccagcgattcttgtggagaaatggagaggatcgtcggaagccggacacctacgagatgcaggtcatgacattcggagcaacttgctctccttgtgcagcggactatgtgaagctcgtcaacgcttcgcaatatagtagtacggatccgcgaggggttcgggcggtaaaggagtactactacgtggacgactatgtagacagtttcatgagcaaggacgaagctgtcgccgttttgtcacgggtgagagaaatacacgcaaacgcaggatttgatttgtgtcggttttcctccagttcggcaggtgtggtcaaagctctgaacccacacggatccaacgatccgatcgggttcttgaggtgctacatgataaccgccaaactgttgatgcgagagatttggcgaaggagagtcaagtgggatgagccgctcccagacgaattggccgcagcatttgagtactggcggcaagaaatgaaatacattgaagaattccgatgtccacgctactacttcggcgctggacgtgtgcggacactgcagctgaacgtcttcgtggactccaagccaatctgcgttcgccgcggcggcttattggcgggccacatacgtaaacgacgacgtgcaaggcacattttgtgtgttccaaaacaaaatgtgctcccatga

SEQ ID NO: 27348 - protein, 388 aa, DROSOPHILA
MGGVRTRKRECKSTDNLLEKMVSDYFETENFGVKPPPPVAAGDDVRALSILEDTTKRVGRRYRTGLLWKDDESRRIYPTPTAGKVWYLPHFGVENPNKPGKIRLVFDAAAKVNDISLNSALMKGPQRYKSLPAVLFHFREGAVGKCADIKKMCHQVLLQVQPQDRYAQRFLWRNGEDRRKPDTYEMQVMTFGATCSPCAADYVKLVNASQYSSTDPRGVRAVKEYYYVDDYVDSFMSKDEAVAVLSRVREIHANAGFDLCRFSSSSAGVVKALNPHGSNDPIGFLRCYMITAKLLMREIWRRRVKWDEPLPDELAAAFEYWRQEMKYIEEFRCPRYYFGAGRVRTLQLNVFVDSKPICVRRGGLLAGHIRKRRRARHILCVPKQNVLP

SEQ ID NO: 27349 - DNA, 3723 bp, DROSOPHILA
atccccaaaaccaacaaccaacccacccacccagaaaaacagcccacacccaacaaattatggccgagagaatgcggcggtatataagttttggtttagttttgaaattcttatttctaattgcgagtgcgttctcatcatcgctgagagatttccatcgcaaccatgtatggattgggccaacgtgcaaatgttgattaaaaattagacaaaacaaaaaacgaacacgccacccatacatctgcagacacctccgcagctgcagacaaagatatagcaacagatacaaatacatataaagataacgattcggattcggatggagagcaaacattacgcctacgattgggatgctccgatccggaggatcttctcgggtgtgagtgtctgtgtgccatcgcgatgttgtttaccaaggcgctcagatccgtctgtttctctgtttctcagtcgatattacacaaagagaaaatgttgaaagctgtgacctaaacatcaccaagttcacaagcctttacttagctttaaaccaaataattaaaagtattaaatatttttctggcatatttacttaataatataataataatacttaagaagtagtttgtggtatgatattttaatattagaaaatcattacacaatagaaaataggtacaaaattgattattttcattccatcatatgcgctttacaaaaatctatattttctcataacatattttgagccatctttcctgcagtgcaccatctgggaaattatgaacgaagcgagcagaagtccaaaagcaaaaatccaacgaaaacaaattatttttaaaagaaactcagaatctccccccgccggcgcaatgtgcatccatgtgcacatgtgtgccgagaggcgattgagtgtgcgtgcggaaaatatctaaaacgactgagggtcgccagaatggtataaatattagcgcatctcggtccagcgaccactcgcagttctacagcgaaagtgttgatttggatttctagtttttcttcgtctaacggttagtatactccacatccaccaattccgtctgtctggttgacttttacccaatccgatgctggatccagtgtacagtgcccaactttctgaaaagaaagatactttggaaagatagagatctcaacaaacaacatatttgacaaggagcagaaaaagtttaatcaacgatccttaaatgtttggtttttaatagtgactaatttttgtttaaaaaaacattctttaaaatgttaaaactgaaaaatattagttgtttgatcttaaatcaaaaattataattaattaaaacttttattaaagtatgtaatattttcaaaagttgaagacagcccttttttattaattttaatgattgctcctctgcaaagatactctttcttttaaagtcatacatgttctgaggcaacacctacacgtatttcataatttcacacttacacacaagattacaattaaaatccatacccaatccgaataccgaaagcccacttctcacttctccttctaaaaaccgcctccgttctcgttgttgttgcagtgaaaacagccagtagccaagatgtgtgacgatgaggttgccgcattggtcgtggacaatggttccggaatgtgcaaggcaggattcgccggcgatgatgcgccccgcgccgtcttcccctcgattgtgggtcgtccccgtcatcagggcgtaatggtgggcatgggacagaaggactcctatgttggtgatgaggcccagagcaagcgtggtatcctcaccctgaaataccccatcgagcacggcatcatcaccaactgggacgatatggagaagatctggcaccacactttctataacgagctgcgcgtcgcccccgaggaacaccccgtcctgctgaccgaggcccccctgaaccccaaggccaatcgcgagaagatgacccagatcatgttcgagaccttcaacgcacccgccatgtatgtggccatccaggctgtgctctcgctgtacgcctccggtcgtaccaccggtattgtcctcgactccgggtgacggtgtctcccacaccgtgcccatctacgagggttacgccctgccccacgccatcctgcgtctggatctggctggtcgcgatttgaccgactacctgatgaagatcctgaccgagcgcggttactcattcaccaccaccgctgagcgtgaaatcgttcgcgacatcaaggagaagctgtgctatgttgccctggactttgagcaggagatggccaccgccgccgcctccacatccctggagaagtcatacgagcttcccgacggacaggtgatcaccatcggcaacgaacgtttccgctgcccagagtcgctgttccagccctctttcctgggaatggaatcgtgcggcatccacgagaccgtgtacaactcgatcatgaagtgcgatgtggacatccgtaaggatctgtatgctaacatcgtcatgtcgggtggtaccaccatgtaccctggtattgccgatcgtatgcagaaggagatcaccgccctggcgccgtccaccatcaagatcaagatcattgccccaccggagcgcaagtactccgtctggatcggtggctccatcctggcctccctgtccaccttccagcagatgtggatctccaagcaggagtacgacgagtccggcccaggaatcgtccaccgcaagtgcttctaagcgatctaaacaccacagacactgcaaaccacacgggcattgagacccaaccacaccacgccacagaacaccacacaacaacaacaagaacaacatgaacagcaacaaccaaataccaaatcaagatctatagcctagtgctattgatgattaatcttaagttaaaacctcttgctgccctgccatccaaagaaaaccgaaggaaccgcgattgtaacagcatgtattatacttatattaatatttattggagagccgcttgatggcgctgaaggaggagttgaggagacacaagaatgcaaaattttacagttttaaaaataaattatactagcatcctctataaattaaatctaaattttaaacgaaacgtatcttttattcgctgcaagcggcatgctatgcgattatttttagcgacgcacaggaaattacgaaattttgcacgcccactgcaaagagcgaaatctggaggtggatctcctcgactggggtgcacatacatatgtacatatgtggctggggatgagcacggtaatcccagcatagacgcctccaagacagtccatttttgcccattgccagtcggtgcaggagctgcccccctcgtcgtggatctaaaaatacagaccaaaggaaacaacaaaagcggcaaatcaacatgccgaagtattaacaaatgtcttctaagactacagtcaacccacagtagattgaacaaatatgtgactttgaatgtcagaatatcaactttaaagggattcgaaaatatatatttttaaaactaaactaattaggaatacaagagctcgctgaaaacagtcttcgttcaagacctagttaagtatattttaggtatgttccactgtaacaatgtgtgagatggccgtttttttggagttaacatagccgctgggagaagcgaccgccggctgtcttttaaattgcagtgccacgacctcgggggctgcaaaaatatcttggaatttcaagtacatttgt

SEQ ID NO: 27350 - DNA, 1183 bp, DROSOPHILA
tggatttctagtttttcttcgtctaacgtgaaaacagccagtagccaagatgtgtgacgatgaggttgccgcattggtcgtggacaatggttccggaatgtgcaaggcaggattcgccggcgatgatgcgccccgcgccgtcttcccctcgattgtgggtcgtccccgtcatcagggcgtaatggtgggcatgggacagaaggactcctatgttggtgatgaggcccagagcaagcgtggtatcctcaccctgaaataccccatcgagcacggcatcatcaccaactgggacgatatggagaagatctggcaccacactttctataacgagctgcgcgtcgcccccgaggaacaccccgtcctgctgaccgaggcccccctgaaccccaaggccaatcgcgagaagatgacccagatcatgttcgagaccttcaacgcacccgccatgtatgtggccatccaggctgtgctctcgctgtacgcctccggtcgtaccaccggtattgtcctcgactccgggtgacggtgtctcccacaccgtgcccatctacgagggttacgccctgccccacgccatcctgcgtctggatctggctggtcgcgatttgaccgactacctgatgaagatcctgaccgagcgcggttactcattcaccaccaccgctgagcgtgaaatcgttcgcgacatcaaggagaagctgtgctatgttgccctggactttgagcaggagatggccaccgccgccgcctccacatccctggagaagtcatacgagcttcccgacggacaggtgatcaccatcggcaacgaacgtttccgctgcccagagtcgctgttccagccctctttcctgggaatggaatcgtgcggcatccacgagaccgtgtacaactcgatcatgaagtgcgatgtggacatccgtaaggatctgtatgctaacatcgtcatgtcgggtggtaccaccatgtaccctggtattgccgatcgtatgcagaaggagatcaccgccctggcgccgtccaccatcaagatcaagatcattgccccaccggagcgcaagtactccgtctggatcggtggctccatcctggcctccctgtccaccttccagcagatgtggatctccaagcaggagtacgacgagtccggcccaggaatcgtccaccgcaagtgcttctaagc

SEQ ID NO: 27351 - protein, 157 aa, DROSOPHILA
MCDDEVAALVVDNGSGMCKAGFAGDDAPRAVFPSIVGRPRHQGVMVGMGQKDSYVGDEAQSKRGILTLKYPIEHGIITNWDDMEKIWHHTFYNELRVAPEEHPVLLTEAPLNPKANREKMTQIMFETFNAPAMYVAIQAVLSLYASGRTTGIVLDSG

SEQ ID NO: 27352 - DNA, 6196 bp, DROSOPHILA
cactggctggctgcatttcaagtcaagcaccattgcgaactgcaattgaatagataattaacagggaattggactgccggccaatcaaacgcacagtcaatagttaatgagaactctttttgagttgaaaactgcagcactttggggtcctggctgcgagctgcaactctagtgcagcgttgcattgtgggtcggtctaacgtgaatttatctccgtgcgctttgtaaactgtcaatgtcctgggggctattagtcggtcgccctgccaaaggagtataaatatttctttgtgcacatttaaaagcaatttgcgaagcacacacgcacaccgaatatccaaaggaattccattaaacacatgcacaaagagcaaataaaatttgccaaatataaaacgcaaaactttcaaccgaccgaccaatctctcctttcgtctaagtccatcgcacgctgtgcgtaaacaaatagggcaaaaataaatttaaaattgcaaatgctgcaagaagtatcagcatatacttgcccagctgcttttggccaagagttgcttcaaagttttatatctatcaagagtgcggttagctgcaagggcgtgcttcaacttgcttaacaaatgaatggatctaaagttttcgggccaaattattgtggcagagagataaatgtgaattgatgcttgaggaatgcaatttgttggttgcaaatttgtaattacaaagcataacttaagtccgacagagcacttgaccagcacccttggtttatttcttaattcgtggtagaccgcacaggtggccctaacttatcggagcaacctgctcctagcaatgggttatcggatggggaatctgacacctctcgcacaagccatttaatagtacagggagaccaatattaatttcaattttactacttacatggggaagaagaatatatattataacctctacgtatgggtttagttcatttaattcattaccaactgagcgtagagcccaaatgctcacagagaaacttccaacttatttgtaaggcttaaccgaattcctcgagaccatttttcgagtacccaatttgattcctctttctcaatcacattttcgcagatacgacctgatggccggcgtgacacgtgccgaggcctttttcagcttcaattcgggcgacgtgcaatatggaatcgaggcggatcgacggtcgagaattttaaaggcctacgtacggaacacgtacacgttccatttgaacgagatattcgccacgattgtcaatgagtatacggattgggagaggcccgtgcagcatccaattaatatccggtgagtaattgcgtttgtatgcgaacccaagcccctcgaacccgagattccggacggtcggaagggtaaagacggagatttcaaggagccaggtggctggtgtgtgccaaataaatatttcgttcttaattaaatacgcagtgacatgcccgatctgctgccctggtgctcgctcgcttcccaagcaggtttcaattaaaggggcttaaatgaatcttgatttcaatcttgtggcaaatgaaatgcaaattttttgcccatttctgtcggccggccagccagtcagacagcctgccagtcttcataaataatgtttggctgcaatttgtccgcaaacgggtcgcataagtggcatggaaattgctagcacacaagcccaatcaaatatatgatttgcttttcattttgtcgatttcaatcaatatttatgtttgcgactaggtcatagtgacagcgcagccagcacacgcagaatgcattcatatcatgtccaatgtatatttcgactctcgtttccatttcctcaaacaatttatttgtgtttacataatttatgcggaattacatttcgatattttcaaagaaatacgccaaacaaattgatttcccccactgcaacgcgtggcgtatacttaatacagcctttcacagcccactaccaagcatttcccggagttgtgcggacgtgcgttaagtggcctgcaatgaagcacggcaaacgtttcacgctccaactccgccaaggccgcatttccctggagcattgataacaggtgccgaggatgggaatgcaggcggcggggtggagcgaagtgccattccgtttgagtgtcagcaatacaagagatgtatttgccatccagctaccaggcgcgtttcttaagagagttctgattacatataaaaatgcaacaacagcaattgatgaagtgaatggtaccaatcacagctgaagtaaataccattcttaactgattaaaagaaaatatgggtatggatatagtttcacaacaatcaaatgtattcttcatagaacaacaaaataaggacatattcttgcaacttagctgttgatttaacatccaatatcaacaaaatgcaactgataacttattaataatataggcagttcacttaaaggcttagtcacaaatttatttgtcgcactgaaaattgtttcgaacattaaagaactttcagcattaagcacaaaaaagtgcaaggacaccccaaataataaaaaaaaagcgagagacacaaagagctcctggtggttccatctttgctgcactgaaaagatatgtatgcaaatgcgccaaatgggttttattcaaattttccgctgctgcatttcgactgctaaacaaactaaaaaaaaaaagcgtaaagggcagagacagacaaaaataagggaaatgcggaaaatcggactgcgggcgggcgcaaaaaaaaaacttaaaccgaaataggcttaggccagcgttgagggctccactcggtaaacaggtaaatacgagccacatcaaccaaagtggcagcactcaaagtggcttgttagttgcgcacttgaacacagctcgattggcgaagagcaatggcaaaatagccggaaaattggaagcgagctgaagggcgccggcgggcaaatattgaaaaattcttatttgattttaatgttgtgctttttcccacattttccgcagggacgaaacactggaggcgcttagcgatgctcaggtggtggctccggcggctcaaacggtggatttgcactcggcggatcatcggaactcgtacctgtacgtgtttgactaccagacgcgattcggtgattatcctcaggtgagttcaagttcagcttggaaaatgcggtgcaaattaacaataatatctatgaattactttacataatacaggcagactttatgagcgtttagtttgatatataaatctgcatagtttaccttccaagtacataaacctgttttgcgaatactttaataggattgcaggccgctcctcttagatctcacaaataccccaattagttagtaaactgagctgcagatcagggtcaaggatgtgatgatggttggcacttaatttggtttctggttttccggcattttgcagcgccagggatgcattcacggcgaggacctgccctacatcttcggtgccccgcttgtcggcggttttaatcacttcacgcgcaactacacgaaaaccgaaatcagtctatcggaagttgtgatgttctactggtccaactttgtgcgaacggggtaagtgcagttgcgaatgctgcgggtactcacacagagaaatcatttatttatctttgatactgagcaattgtgttaataagacatatattctcaccgtgtgctcacctaatttaaatgtatgctagcactaaccatccattaccggtactaagcacacattcttcctccattcgcagcaatccaaatgagcaaatggaaacagagcatgggagtcgtcaggaacggagtcgctataaaacaatcgagtggacagcctacgaaagtgtgcacaagaaatacctcaattttggttagtatccataatatttagaatggtcgaagtctaatgcattttcaattaattttatgctaagactctaatgtccgccttacgcaatacattaaacggggattccgattcctttttgtatttcatatgtttcccatagacaccaagccgaagctcaagaatcactatagagcacatcgcctctccttctggctcaatctcataccggatctgcataagccaggaggcgacaatgtgcccgccgcacaccaccaactgcacgacgatgacgacgaggacaacaacatacccagcgatgcctccgtgaagccccttaatcctccgtacatttcacgggctgcgaacgcggcggccatggcaaactttacgatttttaccaaccaggtcttctcgctgctaaatctcagttcgccgtcttcgtcgcttcaaaggaacggcactcgctacgggggcggtaagatatatccggacgatatgatggacggcgatcacgcaggtggggcggccagtgcctcgcaggatagcgatggctttgcggcgtactccacagctttgagtgtgaccatcgcaataggatgttcgcttttgatcctgaatgtgttgatcttcgcgggggtctactaccaaagggacaagacccgactgagcgaacccagaccccaaaccaagctcaagaggcaggagaacggacagatgccgaataacatatgcggcgatctggaaactctgaccatacacgcgaagagcgatcccgccactatactgtcgcaccaccatgccatgcagcaccaccagctgccgccgccggaattcgcagacataccccaccgagcgccgcctccaccgaagcacatgaaatcgctgcaggatccgggtggcggtggttccgtcagcggggcggtgggcgtttccggggttgtgcaaatgccgccgccacacgccctccaggtgatgggcaatcagtgcggcactctgaccaagaagagctgcatgaagcaaacgcaggcccaggcccagcagcactcgcccgcccagcagcagcagcaacagcaacagcagcagcagcaacatgtggtcacccatcagcaacacttgcagaatcatcataatcaaagcatgaccactgtgctgaccacggccggtggactggtggtgcccacgccacccactgtgccggtaattgtggcctccacaacgcagcaccagcaacaccagcaacagcatcagcagcagcaacaccagcagcagcagcagcagcaacagcagcaacatccgctgatggacgagctgcgtgtgtgacattaattgaccgtgcgttttaaatgtgatctctaaacgcacagccacctcattcctggaacactaaatcccttcccaatgcgtttcagctgtctctatatatatgaagtactatatggtagctatatggtaagtgtgtgtcaggagtaagagctgtgtctatctaatacgcacagatgcttcgctccgctcaactttgttgctagttggttttaaaaattacactgtaaatagttaaccaagtgtagattgttgtcgaagtctttatcaaggaaagttaacttggaatttccactgatctgcaaagtgttcagcgagtgtttttagagttcattttcgattgcatagtaggcatttgaggctaaattagaattgtagaatttcttgaaatttcctttatatgtattagttgaccaagtacgtattgctctttaaagttttatttcttttccaatttaatacttaatattttttttgaagtactattttttccatgtcaatatgtgtttagcaactaattaggaccaatcaaaactacacgattccaagttacgaacaagtttccttctcttccttgtgttggcgttagtattaaaaattgtggtagaataaaaatagaaaaacctaagagtattctgaatgcgaaaataaaaatgaacatgaatgttattcttccaaagactgaattataatggtgtattgtgtgtaaataaaactagttgcagaattaaacgtactactctacatgtacaaacaaacactcccataaatatattttagttttcagaagtattaatatggaaatgcagtttttaaccaaacagaaaaccaaaagaagaaacacaagtccaaggaaaatggcaaccatgaaatcaaatcatgtacaggtgaaagggagctgttcctttaagttttctccgagatttgtaaaattaaagctgtacaactaccccaaaaaaaaaaaaaacaatagacgtaaactaaactcatgctaaaactg

SEQ ID NO: 27353 - DNA, 1806 bp, DROSOPHILA
atgctcacagagaaacttccaacttatttatacgacctgatggccggcgtgacacgtgccgaggcctttttcagcttcaattcgggcgacgtgcaatatggaatcgaggcggatcgacggtcgagaattttaaaggcctacgtacggaacacgtacacgttccatttgaacgagatattcgccacgattgtcaatgagtatacggattgggagaggcccgtgcagcatccaattaatatccgggacgaaacactggaggcgcttagcgatgctcaggtggtggctccggcggctcaaacggtggatttgcactcggcggatcatcggaactcgtacctgtacgtgtttgactaccagacgcgattcggtgattatcctcagcgccagggatgcattcacggcgaggacctgccctacatcttcggtgccccgcttgtcggcggttttaatcacttcacgcgcaactacacgaaaaccgaaatcagtctatcggaagttgtgatgttctactggtccaactttgtgcgaacgggcaatccaaatgagcaaatggaaacagagcatgggagtcgtcaggaacggagtcgctataaaacaatcgagtggacagcctacgaaagtgtgcacaagaaatacctcaattttgacaccaagccgaagctcaagaatcactatagagcacatcgcctctccttctggctcaatctcataccggatctgcataagccaggaggcgacaatgtgcccgccgcacaccaccaactgcacgacgatgacgacgaggacaacaacatacccagcgatgcctccgtgaagccccttaatcctccgtacatttcacgggctgcgaacgcggcggccatggcaaactttacgatttttaccaaccaggtcttctcgctgctaaatctcagttcgccgtcttcgtcgcttcaaaggaacggcactcgctacgggggcggtaagatatatccggacgatatgatggacggcgatcacgcaggtggggcggccagtgcctcgcaggatagcgatggctttgcggcgtactccacagctttgagtgtgaccatcgcaataggatgttcgcttttgatcctgaatgtgttgatcttcgcgggggtctactaccaaagggacaagacccgactgagcgaacccagaccccaaaccaagctcaagaggcaggagaacggacagatgccgaataacatatgcggcgatctggaaactctgaccatacacgcgaagagcgatcccgccactatactgtcgcaccaccatgccatgcagcaccaccagctgccgccgccggaattcgcagacataccccaccgagcgccgcctccaccgaagcacatgaaatcgctgcaggatccgggtggcggtggttccgtcagcggggcggtgggcgtttccggggttgtgcaaatgccgccgccacacgccctccaggtgatgggcaatcagtgcggcactctgaccaagaagagctgcatgaagcaaacgcaggcccaggcccagcagcactcgcccgcccagcagcagcagcaacagcaacagcagcagcagcaacatgtggtcacccatcagcaacacttgcagaatcatcataatcaaagcatgaccactgtgctgaccacggccggtggactggtggtgcccacgccacccactgtgccggtaattgtggcctccacaacgcagcaccagcaacaccagcaacagcatcagcagcagcaacaccagcagcagcagcagcagcaacagcagcaacatccgctgatggacgagctgcgtgtgtga

SEQ ID NO: 27354 - protein, 601 aa, DROSOPHILA
MLTEKLPTYLYDLMAGVTRAEAFFSFNSGDVQYGIEADRRSRILKAYVRNTYTFHLNEIFATIVNEYTDWERPVQHPINIRDETLEALSDAQVVAPAAQTVDLHSADHRNSYLYVFDYQTRFGDYPQRQGCIHGEDLPYIFGAPLVGGFNHFTRNYTKTEISLSEVVMFYWSNFVRTGNPNEQMETEHGSRQERSRYKTIEWTAYESVHKKYLNFDTKPKLKNHYRAHRLSFWLNLIPDLHKPGGDNVPAAHHQLHDDDDEDNNIPSDASVKPLNPPYISRAANAAAMANFTIFTNQVFSLLNLSSPSSSLQRNGTRYGGGKIYPDDMMDGDHAGGAASASQDSDGFAAYSTALSVTIAIGCSLLILNVLIFAGVYYQRDKTRLSEPRPQTKLKRQENGQMPNNICGDLETLTIHAKSDPATILSHHHAMQHHQLPPPEFADIPHRAPPPPKHMKSLQDPGGGGSVSGAVGVSGVVQMPPPHALQVMGNQCGTLTKKSCMKQTQAQAQQHSPAQQQQQQQQQQQQHVVTHQQHLQNHHNQSMTTVLTTAGGLVVPTPPTVPVIVASTTQHQQHQQQHQQQQHQQQQQQQQQQHPLMDELRV

SEQ ID NO: 27355 - DNA, 3023 bp, DROSOPHILA
aaatggaagaggatctgagcaaaccctatcccggctgctgtcccaagttcaactgctgacaacgcctccctcgcaagtcgaactgcaaatgtgaaatgaactatgaaaactgaatatataactatagaaacatacataccttaaatgagagatgcagttggatggatggttatgaggggttcatacataattagaatcaagtttgccagttctgcgtttacaaaaaccaaaatagcgcatttatttcgatttcgatttcggtttcggtttggtatacatgcttgaacttagtcgtatttgctctcatacatatagtaaataatgtgtatacatatataaatattctcgtgtcaattgccactaattcaccattcacttggacatgcacactgttcgcttgcataacaagtatatatgtatacatatatctctgcttaactacatctacatatctgcatttgtatagttctctaaaataacgaggagcagctttatccggcagtgacaaactcgcacaaatcctgtccagatacatccgtatctgcatctgcatttgtatctgcaaatcctcgacggcggttgccattagatactcgtaattgattgcattcactaacgcagacacaggagcaactgggtcttgcattaacggatacaaattaatgggtatacggtagagatacacaagtccaataacttgggctgcagctatacttgtagcattgtcgatttaaccgattgtaacctgagctagtctaaacattctttaactatggtccggcggcccgagggccattaagttgatgtgggcttacaagttagtacaaattgctacactttaatgcttaattgggacaaaatggatctttgcgtttgctatatgtccgtgtttttttttgttttttttgtttgggggtaattaacctagatgaggccgatcctcgcctcctggtccatttcactccggggtcgccagctgcggcgccagcgactcctcctctcattggcgcgccgcacgctccgtttccatgaggcattcgcgcaccaggatgcgggcatggacaatgccccgcttgagacgctccgtggagctgcgcgagcccgtgtacgtgggccggatatcgcggcccatctcctcaatgacggccagcagctgggcgtacttggtcagcccattgcccgggcccactgagggcaggctggccgtggaggtcagcggcgtggtgatattggccgaagtttgggtggtcaccaccacgggcgaggtggagggtggcgggtactttagctgcgatgagctcagattcaggcccatgctctggccattgctgccagaggaggtggaggaaacgccggcaccggaattccgctgaccaccattgctggagcacatgttggccagcgagagggccgcagcggcgacggctgccggcgtggccgtcgtgttcgactgctgctggagtagcgccagctgggcctggaggaactgcggggagtattggagggcagcgacggcggcggcagctgctgctgcattggccgctgcagcggagctctgcttgctggacgagctgctgtagtcgctggcggaggagcggtcccgctcccgcttgccaccgctgctcgtggagtagtcggtggcagcgttggatgagttggatccgcctcctccgccaacggatccacgcgagtggtggatggccgatatctggatttggggctgctgctcgcgctgctcccgctgctgctggtaattgtagaaattctgcacttggctgcgcggtatcggtgtcaccgtgacgtcactcagcttggactctacggcctggatatccatgatgtccatggtggcgctgggcgatgtggtgtctggagtcgatatccgtcggttgttgtggtaacttaactatgtccacctttccgttttcctggcacacaaaactactagtttttagcgtttcttttttggtttattgttttttgtgatatgatatcgatatcgatatcaggaggcgttattacgctttcccttcaacgcacaaacaaatacacccccaccaacaaaagtcgatggttcggattatagtatcgatagacaagcgcgatgcaaagtgcccacctattcgcgtctcgaatgtgggtgtttccactgtacaagcaatttgtatacatgtggaaagctctttgtccaaattggtaaatggctaaatgtttttgaaaaaaagataattaacaaccataaaactacaagaaaattacaaaatttaacccaagtgcatatgtatacatgaatgacaaaacggtaaaaccatgcaaatgaataaccatccacgtcgaataatacctagttcaccctgataaggcactcccaatttgtcttattaaacagctaattttgttagggcttaaaaatacccaacgttatgtatgtctagtgttgtctagtttcggggggcggaaaagccaattgcacacaaatatacaaagtattgccgaaacgttgattctttcaataaataaggcacattttaatgaacttatgcttatgccaacaaaagcggtcgcttatttttattacttattgatataaattccaaaacagctgacatttttaacggttactttgcctagtgttggccaagacatcaatcttaataataaactctcaagttgtcaaaattatacttgtatttctactaaaaagtcataaatatacccaaaaactacttagccaatagtaaccctgcttaatatggattttattcacttattaacacgccaattgtctcacttttcaaacacaacggctgattgccagcactgtttgcgctgcagtccagtgctgcgcaacgcggcggggacaaaaaacaatggcgaggcgaaactaaaaaattgtgttgctgacatctggtcgcttgcaaaactatttctagcagattttgtgatatttcgttgtgatcggtcgataaatccgccagttttttttttaatggaaagtgctaacacattgtagcggttgggaa

SEQ ID NO: 27356 - DNA, 1023 bp, DROSOPHILA
cgtaataacgcctcctgatatcgatatcgatatcatatcacaaaaaacaataaaccaaaaaagaaacgctaaaaactagtagttttgtgtgccaggaaaacggaaaggtggacatagttaagttaccacaacaaccgacggatatcgactccagacaccacatcgcccagcgccaccatggacatcatggatatccaggccgtagagtccaagctgagtgacgtcacggtgacaccgataccgcgcagccaagtgcagaatttctacaattaccagcagcagcgggagcagcgcgagcagcagccccaaatccagatatcggccatccaccactcgcgtggatccgttggcggaggaggcggatccaactcatccaacgctgccaccgactactccacgagcagcggtggcaagcgggagcgggaccgctcctccgccagcgactacagcagctcgtccagcaagcagagctccgctgcagcggccaatgcagcagcagctgccgccgccgtcgctgccctccaatactccccgcagttcctccaggcccagctggcgctactccagcagcagtcgaacacgacggccacgccggcagccgtcgccgctgcggccctctcgctggccaacatgtgctccagcaatggtggtcagcggaattccggtgccggcgtttcctccacctcctctggcagcaatggccagagcatgggcctgaatctgagctcatcgcagctaaagtacccgccaccctccacctcgcccgtggtggtgaccacccaaacttcggccaatatcaccacgccgctgacctccacggccagcctgccctcagtgggcccgggcaatgggctgaccaagtacgcccagctgctggccgtcattgaggagatgggccgcgatatccggcccacgtacacgggctcgcgcagctccacggagcgtctcaagcggggcattgtccatgcccgcatcctggtgcgcgaatgcctcatggaaacggagcgtgcggcgcgccaatga

SEQ ID NO: 27357 - protein, 278 aa, DROSOPHILA
MDIQAVESKLSDVTVTPIPRSQVQNFYNYQQQREQREQQPQIQISAIHHSRGSVGGGGGSNSSNAATDYSTSSGGKRERDRSSASDYSSSSSKQSSAAAANAAAAAAAVAALQYSPQFLQAQLALLQQQSNTTATPAAVAAAALSLANMCSSNGGQRNSGAGVSSTSSGSNGQSMGLNLSSSQLKYPPPSTSPVVVTTQTSANITTPLTSTASLPSVGPGNGLTKYAQLLAVIEEMGRDIRPTYTGSRSSTERLKRGIVHARILVRECLMETERAARQ

SEQ ID NO: 27358 - DNA, 3277 bp, DROSOPHILA
agccacaattaaaaattgcttatgaacggaaatggcagacaaaaaaagggaaaataactgccacccgtttaggagctgagccaactttcagtctcgaccataatctgagccatgggaaagctctcaaacttttccgggagggtgtgcgaaaaacttaatttcctatttcctttgcagtttccgctcacttccatataccatccatttggtgtaaactgtgcgcatcattattttggaatttttgacacttttttagctcgatggtgctaagctacttgtaaatcaacccaagctcatgcgtcttcctctagccagtgtcttttatatatcggtgtataagtgtgtgtgtgtgggtgtgtggatgtgtcacatttccggcggaagtgagagcagaaaacttggttcgttttcctcttcgctaaatggcatcaagaaatgcagcatcgtcgcctcagaggaacagagacattgactgatgatgatgaggacgatgatgtaaatgggattttagtgccgcacatgacaatagtaaacttctttagcagccgaaatcataagctgtgatgtctctgttcagatctgctctgtgctcttgtgacatgcaagtaaattgccttgctaaatttattgcgcaattacaagaaaatctaatgaacaaagcaaaggatgagccggaaagaagatccaaaatagaatgaagccacttaattctggctaagaagaaagagaactctgtgcattgggagacttaatataaaattattttgccaagagcaccctttctgatgtaacattttttaatacataaaagctacgagtgtggctaagctgatcttagatagtttaatcttaaaagtaaacttccaaaatataggagtctgaaaaaccatcagcttagttcagctttaggaaatattttcagttcctaagttaacgctttaaatctgttctggtttccagttcccaaggaaaaataggccattgcctatactccgtccacaaaatggcattcccttatatctgggcactactgcccctcatctgctccgcttcaggtctcagcctcccaaacatgacctcaacggatgcagtggttgccggtggaggcattttgccaatcctggtggcaggaaatcccggcaatctggggagcagcaatatgagcctgagcggcgggggaggattggccggcagcagtaccggcggacaatcgttaccggatacgggaggaggtaactctgcgggcggctcgccggcgggtggcagcagcggtaccggcggcggtggcagcaacagcggcatcagtggcaacaactcggccatgatccaaggacaaaagagcaaccagtacgagaagtgtgcgggtcctggagatccgggtccatgcaagcagtacatctacaagtggcgctatgagccaaccaccaacgagtgcaccaacttcatttggggcggttgtgaaggaaatccgcagaaccgtttcggcaccgaggcggagtgcctgttccactgcatcggcggaccaccccaggaaggtgtcctgcccaactgccagatcaagtgtgatgcagagccgtgcaaaaatggcggcacctgccaggagcactttgctgagcaactctcgacatgcgattgcgagcacacgagttttctgggcgaattctgttcggaggagaaaggagcagatttcagtggcgaatcgacgttgcagcgcaaatttgaactgcctggtacgggtcgcgttgactatgtgcgcctgcaactggccttttcgtccttcgacctgagacgagccaatcggataatgctgctgatgcaaacggaggctgagcgcagctactaccttctattggccatcacctccgacggttacctgcagctggaggaggaccgagataatgggcaaacggtgggcgcccgaattgatcggaatttcctgaacagtgccaggcactcggtgtattatgtcagaaatggcacccaatcgcagctattcattgatcgcgagcaggtgccgctgagcgagttcgccgcacgtgtccttaccaccggtggcgatgctggctcgaatcgcgtccagatcggtggcatcaacagcacggactcgcggtttgccgtctttaaaagctacagcggttgcctgtcgagtgagtgtcgtaaatttcatgcccgtctgccattaatttcttttcggtctcatcaagtgacataccccttcgctccctttgctaagaaaaaaaaaatcgaaataaagtacaccgaaagaatttagtatgatagaaactcatatccgaaagggtcgtcactgagacttctagtggcttagtctcatgaaggtgtctataagtagggattaacattatattgaagacctcttttataatatttcaactatattaagcatattaagaattagcattaatatgttattacagtgctccctctgcttaactgctgcactttatgaactcactgagctgagctcttgaaattgggttggcgaggggagttagtgctcgccgaggggggtggcggggtttgcttcacattgttgaccaaaaaattaaatttattcgctgccataaaaagtcatttccgtggccgtggcttcgttgccataaattctgtcagtttttgctctcaagatttacagtggctcatatttaaattgctgctttgctgccactccgaaaaccgcagcacagtgaccaacactttgattaaaaattcacccgagctcccacaaattcccgcccctccatcgcccataaagcagctgctcagccagccacgcccacaccacatgtgggcggccgttaaacgttcttgatcattccattaaagaggcatcgatgtatagcgtgatagttttggtcataaacagtagagtacattaagttcagcgaacacaaaatggccaactttcttattaatttgaaaatatcaaagtgttttaaagtataccataaaaaaatattatagtcaaatttactactaagtaagtactttacttaatgatttcttaggtttgcaagcgcatttattattaaacattagtaagaaaattatacgatttgatctaatcaaaaactaagcttaattataatcaaagcctattggaaataccattaaattgccaatatagatggccactccccacgataaacgcacacaatcgaagggcgtctgcgttgtgggagtttgccgatgggcattaaaaatgttattgctaatttcgggacgggcataaaacacgcacgaacgacttgccacgggt

SEQ ID NO: 27359 - DNA, 5227 bp, DROSOPHILA
aaaatggcattcccttatatctgggcactactgcccctcatctgctccgcttcaggtctcagcctcccaaacatgacctcaacggatgcagtggttgccggtggaggcattttgccaatcctggtggcaggaaatcccggcaatctggggagcagcaatatgagcctgagcggcgggggaggattggccggcagcagtaccggcggacaatcgttaccggatacgggaggaggtaactctgcgggcggctcgccggcgggtggcagcagcggtaccggcggcggtggcagcaacagcggcatcagtggcaacaactcggccatgatccaaggacaaaagagcaaccagtacgagaagtgtgcgggtcctggagatccgggtccatgcaagcagtacatctacaagtggcgctatgagccaaccaccaacgagtgcaccaacttcatttggggcggttgtgaaggaaatccgcagaaccgtttcggcaccgaggcggagtgcctgttccactgcatcggcggaccacacactctgccaccgttcctacaatccaccacccgtgagccaagcactacggagagctccatgcttctgggtctgccgtacacccagagtccggctcagtcaccggacggaatgggcggggcagagggcggtgatggcacaacgcccgtgcccatcgaacagcgcggacccgagctgactttcgcggagacgggccaaggcaaaactttcattttcgccaagaacaacacgttcatccaaatggacggcgacattatacagacatttcaattaagactttgccgtgagatttcatttcaattccgcacccgactgccgcacggcctgctcgtctatcacaacgttaagaatccggatcgcattaatttggacccctatgcactctacgtgattgtggagaagggccagctgaaggtggtccatgtctttggcaagcattcaacgagtgtcactgttggcgagagtctaaatcgagatgaatggcacagtgtgatggtgcgcatcgatgtccatggtgcaagattaattgcacgcgtcgacaatagtcaggaggaggtctatctgaaaggactgaatcacgagtataactacggcgtctccacgaatctgccatcggtggtcctggtcggaggtggcctttcctcggaggagaagctgcacggcgtgaaatacattactgagtcctttgtgggctgcattcgcaatgtggtcctgagctccggcaaggccgcctccgacctcctgcccatcgcacccctggtggccaccaagcacgagaacgtcaacgagggatgctcggacatgtgcgaatcccggcacaacctctgcttcgtgggatcgcgctgcatcaaccactacggaggaatctcctgcgattgctttggcacccactacgagggcgagcactgcgacatttacagtgaataatcacattgcgaggagctagctatgtatcgtacaggatatacgactggaaggatcgagtgcactcctccaccaggcgtattagtctcatgttccgtacgaatttcgacgattcagctctattctacgccagtggcgaatcattgaaacatcagtatatagcggcttccattaaaaaccagtcggttcacgtggaaatggactttggcgacaatgtgatgagcaccgtgctaaccgacgacctgacccgcggttattggcacaatctgacaatactacacgaacagcgaacggttagcattatcctggatcagcagcaaaaggtcctggaactgccagcaacggccagtgggaatatgctcttcgatccggaaatatatttcggcggaggaccggaattgcataagaagaagggtctggcctcacataacaatttcgtgggcagcctgaagtatgtctactacaatgacatatccattttgtacgaactgcagcgtggaaatcccaaggtgcactatcacggcgtgctggaggcggagtttgtcgagaacgaagtgaatgtcataccaatcacctatccctttgcgacatcacacatttggtggcccataaatcacgccgaggaatttaatattaaattcgatttccgcagcagtcggccgggcgcggtgctggcctacagtgacgtaacgaccagtgccggaaatggcttctgggagatacgtctgacgtcggacaaactaagtttcgatctggtacctgatgttaacaacaatgtaacccactcgaccaccattaaaatcaatagggccacctcctggcatagcgtggagctggattataagctcggcgagattcgcttcactgtggactatcggcacactcttagccagatgtacggcttaacctttaacatcggcgacaaactgatcattggcagcagcttaaagtcggcagccatgggcttagtgggctgtatacgggatatagaaattaatggacatttaatcgaaccgcgacatgtggtcaaaactgaacgagttgtgggagaggtcgccctggacaactgcaactacatagatccgtgcaaaagacccaatacctgtgagcatggtggcaaatgctttgtaaaggacgatcgagtcacctgtgattgcaaacacacgggttatataggtaaaaattgtcactttaccaagtacagaaagacctgcgaagagctggcactcttgggcttcaccaaatcagatgtctatctcatcgatatcgatggcaatggtgtttttccacctgcccatgtcaagtgcgatttccagagccttgagaatgccaccaaaacgattgtggagcacaatctgcccagtcaagtggatgtgcgatccgccagggaatcggacttcagcttcaacatcagatatagggaattttcaccccacatgctgcaggaacttatctcacattcactgtactgcactcagtacatcaagtacgactgctaccgggctcagttggaactgcactcggccacatggttcacatcctcggccaagaatctcaccgtcgacttcctgggcaatgtcaagagaggcgcctgcccgtgctccgttaacaagacgtgcgtggatccgaatcaatcatgcaactgcgatgtaaaggagaacaaatggaattcggatgagggctactaccaggatccccagagcctgggcattacaaacatgtacttcctgcagcaaaaggatatggatgacgaggcccagggtcgcatcactctgggtccgctggagtgtgttgaaacaaatacgcaaaagtacgtggtcaccttcactacatcgcagtcgtacatcgaggtgcccggctggaggaagggcgacattgccttctcgttccgcaccaccggcgagaaggccatcctgctattccagccacccatccggccgcactatccatcgttcatggtggcgctgaccggcgatgaccagctcacgttcaccttcaccctgagcacgggtaccacccgcgagctggtcattaactcgcaccgacggttgaacggcggcgaatggcataaaatatggatcgactacaaccagtatcatgtgcgcttcatgataaacaccgattaccagatgctcgatttgctgccagaggaggagttcggaccgttcgagggcagcatgtacatcggtggcgccacattcgacctgctgaagaagctgtcagttaaggccggccttattggctgcttccgtgggttggtggtcaacggcgagattctcgacatctacagctacatgtcggtgcatctgtcggagattatcaaggactgcaagccatcctgcgtcccatcgccctgtcgcaatggcgcccagtgcaaggagctctggagcagctttaagtgcgtctgcaacaatccctgggcacatatcggcgaattctgcgagacaaacatcaacgaaaaggctcttaccttcatcaaccgtgaatcctttctgatgcgaaattatctgagtgtgggtgccacacctgttatcctaatgcacggtataaatggcgaacgggatgtcctaaagggaatccttaaccaagatctactgatcaatttacgaacttacgacacgaatgccctggtgctttatgccaacgatcattataataactttgtgcacctctacattagtctgaaccgggagattgtttttctttacaattacggtgatgaaattgtaaatcttacgctgctagatgacaccttaatggcgtctttaaaaagcattcaagtggccatcgtgcgaggagagcaggaaactaggatgcatgtgaacgagcacagtgtgagcatcgataggggaactctgctccttgatgagtatgccaacaagccttggagtaatccggaaaaaggtaagttgcgccccaatgtggatgcaccggctctggaaggctacatcgggtgtgtgcggggcctgaaaatcggagcgcagttgatcgacttggcggatatcaatgaaaggaatatagcgcccacccaggaaggtgtcctgcccaactgccagatcaagtgtgatgcagagccgtgcaaaaatggcggcacctgccaggagcactttgctgagcaactctcgacatgcgattgcgagcacacgagttttctgggcgaattctgttcggaggagaaaggagcagatttcagtggcgaatcgacgttgcagcgcaaatttgaactgcctggtacgggtcgcgttgactatgtgcgcctgcaactggccttttcgtccttcgacctgagacgagccaatcggataatgctgctgatgcaaacggaggctgagcgcagctactaccttctattggccatcacctccgacggttacctgcagctggaggaggaccgagataatgggcaaacggtgggcgcccgaattgatcggaatttcctgaacagtgccaggcactcggtgtattatgtcagaaatggcacccaatcgcagctattcattgatcgcgagcaggtgccgctgagcgagttcgccgcacgtgtccttaccaccggtggcgatgctggctcgaatcgcgtccagatcggtggcatcaacagcacggactcgcggtttgccgtctttaaaagctacagcggttgcctgtcgagtgagtgtcgtaaatttcatgcccgtctgccattaatttcttttcggtctcatcaagtgacataccccttcgctccctttgctaagaaaaaaaaaatcgaaataaagtacaccgaaagaatttagtatga

SEQ ID NO: 27360 - protein, 482 aa, DROSOPHILA
MAFPYIWALLPLICSASGLSLPNMTSTDAVVAGGGILPILVAGNPGNLGSSNMSLSGGGGLAGSSTGGQSLPDTGGGNSAGGSPAGGSSGTGGGGSNSGISGNNSAMIQGQKSNQYEKCAGPGDPGPCKQYIYKWRYEPTTNECTNFIWGGCEGNPQNRFGTEAECLFHCIGGPHTLPPFLQSTTREPSTTESSMLLGLPYTQSPAQSPDGMGGAEGGDGTTPVPIEQRGPELTFAETGQGKTFIFAKNNTFIQMDGDIIQTFQLRLCREISFQFRTRLPHGLLVYHNVKNPDRINLDPYALYVIVEKGQLKVVHVFGKHSTSVTVGESLNRDEWHSVMVRIDVHGARLIARVDNSQEEVYLKGLNHEYNYGVSTNLPSVVLVGGGLSSEEKLHGVKYITESFVGCIRNVVLSSGKAASDLLPIAPLVATKHENVNEGCSDMCESRHNLCFVGSRCINHYGGISCDCFGTHYEGEHCDIYSE

SEQ ID NO: 27361 - DNA, 2885 bp, DROSOPHILA
ggccatggtcctcgtcctcatcctcatccccatccgctttcgcatcctcatcgtcctcgatctcggcgtatgtttgccaattggatttgacattttattgggttttccttcgctctcgttactgccgctccactggatccacgattgctattgttgttgttgttgttgatattgttgccgtaattgatgtgcctgatgtgctgccgtttcgaccaagtcgctgccaacataaatccacgctgtcctttatgccccagacttcatggatgccccggttaaccacgacatcgctagctactccgctactgagttcctgctggttaatatgggcatatggactgggtagtggataaattgaagtcgcgtggctcgcttttattttgggtaattagtggaaggcaacttgattatcgcgctatctccacggatgttgtccagttgcccatgaattggtaaccaaagcagtgtagccgacttaatggcctgcaataactccgtccgacgctggatggctggagggtccagaaggattttaaccgggtaacaggtcggataacacggtcagcattggcttcagctgaaaattggctccgcagctgggcaattcaatcgcatcgcatggtatctctcaagtgtcctaattaataaattgaaccaggatctttccacaggatgttcgtatctaaccaaaccaaagcgttatccaattaatttggctggcaattcaatttcaattgataacacacaaatttagaaattgaatcaaaataaaagaaaaaactgctgaaattgttaatagaaccactatttaatgtttggttctagagtttttttttttgcaattggaaacgttgcttttataaaattaaaaataatatttgcaatttgatttaactttttattaaacaaaacagtcaaaataaaacattttcagctgtaaatatcattcgattggtagttgaattaaaagtttattgagttacagcatccaacatttggactattgttttttttcatgaataccgcatccgaaacaagtaaatggctgacgcagggccagcatccgatcgcgattcattcgaaagatatgatcctgcatcaactggtcagtgtgggagcgtatttgattacgatcctcgaggacatgacgcaactgaatcaaagcgttatcaccatcgatgccgcacaattcctcctcgtcggcgtgcagactcatatcggcgatgcccaaacgggccatggccatggcaatattatcaatgtcgctatcaacatgaaagcacgataggtatttctgatcagcctcagttgagcatttatccaactcctgcgactgatcgcccactgtacacatttcattcctttctcgagtttctgtggcttcttcagcagtggccggtttcttaaccaccctcacaatgcatccatcatcaaaggcctcgtcgtagttttgcacactgtatgccccctttggtgacttcggctccttcgtttccattaccataaagcccttggtgatggaaatatcaaatttaggtttgacacctgctagcgttgcctttgactcagcatcatcgctggctttcttttcgatctcaaattgaattttctttatcatatcgacggccggctcttcgcgacaaatcttgccaacgaatagcggtggtgtgatggaaccattatactgtggctgtggtggaccgaaacgtccgatgtagtccatgaaccacagttcggatagagttcccggcttgatgacgcaaccggcttcgaatcctttgggcatgaaacgtttgggcagaaaaattggtcgattgacgccctcacaaatgggaaagactccgatgggcagctcgaacttggggcactccgcatcatcgcccatggtggcgaatgccacagatggaacatgcggattgttaacggtggacagtatcgccaccgtaagatcgcgttggtgcgacataagcaacagaacattggacagatccggcgtataaatgttgcactgcaacgggatacggccatatgaatagggcgatggtggactcggtggtattggcaaattgaagaccatcgatagcgaaaattcatcacgaagctcttgtccttttggctgtgccccatttataagatcattgctggcatgcaaccaattcatcaatgtgtcctgaattggttgggactcaccgtctttttttaggagactctcgacccttgtcggcggttggacttccatgcgcaaaccgacaaacagcggcggcgtttgacccttgtgacccgcggccttcaagtcaatgggataggaacgacgcgtaaggatacccggcccaaaaacaccgccagcttcgaagcccatgggcaacatggacgttggcagaaagacaatcttgtccattggaaccttatccgcgaacagggatggcggcacatcaaagcatggggtctcggttccctcgaagttttcggctgcctgcttatcgtgcttattgacatcgagatataggcgggccaccacaatcttctctgggtaaaacaacttcggaatgaacaggttcaccagatagggcaagtaattggccttcttcaagattaccacctgatctttatcacgatgcaccgtatccattcgcagcatttcggttactaacaattggttgaatttaaaaaaaaacaaaaaaaaaatctatacttaatcccgctctggaatttgttctcgattcaatgaataaaaataaatttctcacaatttctgatctgacaactgatattgtgaatatgggaatataactattccaaagcagcgtactcaaatgaaaacatatttcaaaacaaatccgtcgccaaggatgattctttgtggaatttttaagcgatcgatggca

SEQ ID NO: 27362 - DNA, 885 bp, DROSOPHILA
atgggcgatgatgcggagtgccccaagttcgagctgcccatcggagtctttcccatttgtgagggcgtcaatcgaccaatttttctgcccaaacgtttcatgcccaaaggattcgaagccggttgcgtcatcaagccgggaactctatccgaactgtggttcatggactacatcggacgtttcggtccaccacagccacagtataatggttccatcacaccaccgctattcgttggcaagatttgtcgcgaagagccggccgtcgatatgataaagaaaattcaatttgagatcgaaaagaaagccagcgatgatgctgagtcaaaggcaacgctagcaggtgtcaaacctaaatttgatatttccatcaccaagggctttatggtaatggaaacgaaggagccgaagtcaccaaagggggcatacagtgtgcaaaactacgacgaggcctttgatgatggatgcattgtgagggtggttaagaaaccggccactgctgaagaagccacagaaactcgagaaaggaatgaaatgtgtacagtgggcgatcagtcgcaggagttggataaatgctcaactgaggctgatcagaaatacctatcgtgctttcatgttgatagcgacattgataatattgccatggccatggcccgtttgggcatcgccgatatgagtctgcacgccgacgaggaggaattgtgcggcatcgatggtgataacgctttgattcagttgcgtcatgtcctcgaggatcgtaatcaaatacgctcccacactgaccagttgatgcaggatcatatctttcgaatgaatcgcgatcggatgctggccctgcgtcagccatttacttgtttcggatgcggtattcatgaaaaaaaacaatag

SEQ ID NO: 27363 - protein, 294 aa, DROSOPHILA
MGDDAECPKFELPIGVFPICEGVNRPIFLPKRFMPKGFEAGCVIKPGTLSELWFMDYIGRFGPPQPQYNGSITPPLFVGKICREEPAVDMIKKIQFEIEKKASDDAESKATLAGVKPKFDISITKGFMVMETKEPKSPKGAYSVQNYDEAFDDGCIVRVVKKPATAEEATETRERNEMCTVGDQSQELDKCSTEADQKYLSCFHVDSDIDNIAMAMARLGIADMSLHADEEELCGIDGDNALIQLRHVLEDRNQIRSHTDQLMQDHIFRMNRDRMLALRQPFTCFGCGIHEKKQ

SEQ ID NO: 27364 - DNA, 2451 bp, DROSOPHILA
ttcatccggccgaacatgtgttacgtacttccaaacgaatctagtataccctgttattctacgagtatcgtttttttttttgcaagtccaaaaatctaatacttcagcaatttatggggtcatataatcgatataagcgttcatttttattatatttatcgtcctagataatcacagcataaaaatttagatgagaaatggtgcaggagcagcagcgtagctcagtggtgcggagtaagccaaaggcgaggagtaggccagtcgtgcagccagaggagtagccgcgtacttcgccaccacaggagcagccagaggagtagccgcgtacttcgccaccacaggagcagccagaggagcagcaacgggagcaatcacaggagcagaggcgattccattgtaattcctggcgataacctggctactggttgcggtcacaactggagcgggagcagctaccacggcagcaggagcagagtaagccagaggagcagtgtaagcaaggggagcacccaggagtccaggcttggcagcagcgcaggcaacgagagcgagaacgacgacagcctgtgaacaaataaacttgattagtttaatcctttgggtgtcctttctgaagaacgtacgtatttgaacatggtgaaatatttgtttggtttgcttcttcggaaggctagaaactctttgatatcccactgctcttcgtggagcatatttatacccgaatgtttgctcagatctgactcatgatcgcactcattcagttcatttaaatgcggtgacagtctcccgttaccatttaccatttgcactgtgccgtagtttatgtgatttcccactgctgactgcagaatgtggaataactcttggtggccacggaatgcgatggcctgaggtcacagacgcagtcccgatgcggcgtataaatagtggtatggaatgtgttggacgacatcagacaagttcaagttttcgaaccgtaagcaccagatccataatcataatgttcaaatccgtaagtttggaatcttagcttcctgccatatttactcatcgcattttattgacaggccgttgttattctggctatcgttgcctgcgctgctgccaagcctggacttctgggtgctccccttgcttacactgctcctctggcttactctgctcctctggcttactcagctcctgctgccgtggtagctgctcccgctccagttgtgaccgccaccagtagccaggttatcgccaggaactacaatggaatcgccgctgctcctgtgattgctcccgttgccgctcctgtggtggccaagtacgctgctgctccattggctgctcctgtggtggcgaagtacgcggctactcctctagctgcaccactggcctactcctcgcctttggcttactccgcaccactgagctacgccgttccatctgcaccgctccttatctaaattactaatctgtgatcacatcggagacaacgataataaatggagatataataagacgttattctattgtttattcttttttaagcacgcttcaaattaatatatatttcaatacaaaattggctctgaagttcagagtctgaacgtacacgaagatgatttctcgataatttcccagcatttatgaacaattattccgagaatgcactctagcgccacctgatacatttcttaatcacagccctattatctgttgtgtctaaattaactgcaaaattttaaattattgcagtgattcagaaaatattggtgtttttctaaatgattaccgaaatactcgagttgcttctacgtttctagaatctccctgctgaattttaacttttaagctcaaatcgctttcgatatcaccgaatttaaaggacacacagcgtgtaaacaatgtgagagtgggcgtttaatcttcaaattaccttgcgctgcgcctcctcctctaaaatctgaatgcccaatccaaactgtgtagcttaaatggttcccaagatcccgccgtccatcccaactgtccgaagaccaatatacattctggtgactttcaagtggcgaacatggacaaatcaactcgactggtgatcctgatcagaaatatttttcaattgtgtaacgatttcgtaaacctcgggtgaaaatgttcgaaatcggttatgtgcggtggtcatgtcccggatcctcagcctagtttcattcctagtcagaggcaaacaattagagacttcaaaaaataaaaatatatttaaatactaatcaaatttcacacagctatctcgagtttttacttaacataaatgatagattattgattgatagaaaataagttagagaccaatttggtcgcgaaccttactttgacgcttttaattatttcttgctagctgctgaattcgatcgacttggaatttcgaaccccacgtatgaggctctggcctcagtgtccccttat

SEQ ID NO: 27365 - DNA, 396 bp, DROSOPHILA
atgttcaaatccgccgttgttattctggctatcgttgcctgcgctgctgccaagcctggacttctgggtgctccccttgcttacactgctcctctggcttactctgctcctctggcttactcagctcctgctgccgtggtagctgctcccgctccagttgtgaccgccaccagtagccaggttatcgccaggaactacaatggaatcgccgctgctcctgtgattgctcccgttgccgctcctgtggtggccaagtacgctgctgctccattggctgctcctgtggtggcgaagtacgcggctactcctctagctgcaccactggcctactcctcgcctttggcttactccgcaccactgagctacgccgttccatctgcaccgctccttatctaa

SEQ ID NO: 27366 - protein, 131 aa, DROSOPHILA
MFKSAVVILAIVACAAAKPGLLGAPLAYTAPLAYSAPLAYSAPAAVVAAPAPVVTATSSQVIARNYNGIAAAPVIAPVAAPVVAKYAAAPLAAPVVAKYAATPLAAPLAYSSPLAYSAPLSYAVPSAPLLI

SEQ ID NO: 27367 - DNA, 4206 bp, DROSOPHILA; identical to SEQ ID NO: 8377

SEQ ID NO: 27368 - DNA, 1932 bp, DROSOPHILA
gaacaagcaggacagaagtgactagggagaactggttccgcgggcgaaccaagagtgtctggcggagtgcttgttagttagtttacatgcacaccgctaggtggaaactcccaagggaatttcgcacaggtcaccgtcttcaaaaggctgtcctatgcacgagtttttataaaccactaaacttaattcaaatttgttttcctcgatggattcaagagtttatatactttttctaatggtgaagccaatctgcactagatggcgtcgatatgtaagatcgactggcaactctgtgccgcacagctgatcttcttaccggctacaaattagatttcttacatttgtttatttacgccgcctcctacttgctaggcctcaggaaagcataaacctaggaacggagcctggtacagacacggagctatacacctacaacaacgcacatttcacctagttgcgcaacgcacttagccggctggcgtggcagtgcacggtaagctgaaacgtacgtggcaatgaatatgaaatcgagcttgcaggaacattgaaccaacgagcgtgtagcactagaccctaattccaataccaactccttatttcaccaagatgacggccacgttgcgttaccgcggcgacaaaagcaatctcttggagttcgccaagaacttggacgcgttcaaaaaagtgccagagaagtacacggagacctcggaaatcggaggcaccctatccctgttgagccgcctgttgatcgtttacctggtttacacggagctgcactactactggcacgagacggacattgtgtaccagttcgagccggacatcgctctggacgagcaggtgcagatgcacgtcgacatcacggtggccatgccctgcgcctcgctgtccggcgtagatctcatggacgagacgcagcaggacgtgttcgcctatgggactctgcagcgggagggtgtctggtgggagatgtccgaacacgaccggctgcagttccaggccatacagattcaaaaccactacctgcgcgaggagtttcactcggtggccgatgtactgttcaaggacataatgcgggataaccatcctgcgcgggagagtgcctcgaaggcgcctgctgccccgccgccaggagcgttgccactgtctgtcgacctgcatggccggcacaacgttcagccagaaagcaaattcgatgcgtgtcgtctgcacggaacgctgggcatcaacaaagtggccggtgtgctccacctcgtgggcggagctcagcccgttgtgggactcttcgaggaccactggatgatcgaactgcggcgcatgcctgcgaactttacgcatcgcattaaccggctcagctttggacagtactcgggaaggattgtccagccattggagggcgacgagattgtcatccacgaggaggctaccacagtacaatacttcctgaaggttgtgcccacagagatccaccagactttcaccaccatatacgcttttcagtatgccgtcaccgaaaacgtgcgaaaactagattcagagcgcaattcgtacggctcccctggcatttactttaagtacgactggtcggctctgaaaattattgtgcgcaacgatcgcgatcacctagtaacctttgccatccgcctgtgctcaattatatcaggaatcattgtcatctcgggggcgataaatgccttgcttctgagcattagaagccgcctactccgcaccttcgctccggttttgtacaaccgattgaccagagccaaggctgctgctccggatgctccttctctatcctcgctctccgcaaaggccgggacagctccgcccgtcaacgagcttctgcacacagccaacctgatggccagcgtggacatctcggcctatttgcccacgacgccgccaaagctccaagccggcctttag

SEQ ID NO: 27369 - protein, 441 aa, DROSOPHILA; identical to SEQ ID NO: 8379

SEQ ID NO: 27370 - DNA, 4113 bp, DROSOPHILA
tagacctgaatcggccgtcctcaccgacttttcgctaaatttgatgccgggaacaaccacagcggtagtgggtcgttcaggatctggaaagacgacgatagctctgctaatgctccgactatatgacccccaagggggaacagtgcatttggatggcatagatttgcgaacagtgaatccacagtggttgcgaaataacattggtgccgtcagtcaggagccggtgctcttctcgtgctccattcgagagaatattctttatggcgctaatcctggcgaaacaccgagcccggagcgactgcagcaggttattgaagatgcaaatgtcagccagttcaccgaccaactgccggatggactagacacgctcgtcggccaacggggaatgatgctcagtggcggacaaaagcaaagagtagccattgccagggctctaattaaggtggagtctaaattcaattcttagttactcaatttacaatttcctaaatgtaaacttattcatacccccacagaaccccgctatcctgattttggatgaagctaccagtgcgttggacgccgtttcggaaaatctggtgcagaatgccttagacaatcttatccagggacgcaccgtactgacaattgcccatcgactcagtacaattcgaaatgcggatcaaatcgccgtcttaagcgacggaaaaattgtagagcagggcagctacaacgagcttatgggcatccaggagggcgtcttccgggaactggtggccagccaagcgttcggcagccgaaactaaaagagggtgtggaatttaagataagttggactaaacggcttagaagtggccccaccgctccttggtggtggaccagctagtgctattgttaccgggatatgtgttcataaatcaaatgtttttaactctttgtaaaatatacaccgttgaccataaaggaaccgatgtcttttcttccaaaaaaaaaaaaaaaaaacatttctaatggcatctttcgttgctttgggtgaatacaaacacctaaaacataaatggttttattctacggaaacttattacttttcaaagaaaatattcaaacggttctttacataataatcgtttaattgttatcatttacatacaattattttcaagatacacgtttcgtctcaaatcgtcttaaatctaataaacaggcacacaaataaatgcaataatttctttgtatctagtttctaaatacgtcctgtgtgcaagcatccagaaattcaatacgtggaacatttcatctgaatcttctccagaatcttttcaggttctgcctatttcatggtgggcatggccacagccgcctgggtgtgggtcacatccgttttgcgccacaactgggtgaccgtcttcgtctgggtgtagaatttgataccctgtttgccatagaagtgatggtcgccgcggaaagagccacgagttccggtaaaggagaacatgggcaggggcacgggaattggcacattcacgccaacctgaccagcatcaatttcgttgacaaacttgcgggctgccgctccattggtggtgaatacggcggtaccatttccataaggattggcatttacaatgccaatggcatcgtccaaggtgtcggccttcaggataaccaacacagggccaaagatctcctcagtgtagcacttcatgctgggcgtaacatcgcttaggatggttggtcccacaaagtatccatcctcgtatccgggcacggttatcttcctgccgtccaggataagcttagctccctccttgaccccagactcaatcaggtcattaatgcgttggcgtgaggcggcactgatcacgggacccacgtcagttccaggtacatggccggcatttaccttcagcttctgggcacgctccaccagatcgggaatccatgcctgggcatcgccgacaaagacagccgtagacaatgccatgcaacgctgaccagcagctccaaaggcggcacctgccaactggttcaaagtattctccttgttggcatcgcccaggatgatgccgtggttcttagcgcccatattagattgcacccgcttgccattcttgccagcccgctcgtaaatgtacttgcctgcctggtcggagcccacaaaggacactgccttaatttcgggagcatcgcagatgaagttcacagcgtcatgttggccatggattacgttgacgacacccggcggacagccagcttcgttaagaagctccatcagcaacatggttgcaccaggcacacgttccgatggcttcagcagcatagtgttaccggtggtgatggccaccgggaacatccacagcggtatcatggccgggaaattgaacggcgcaacgccagcggttactccgaggggcagcactagtgagtacgtatccatgtccctggccacgttggctacggtttcgcccatctgcagagatgggatgctgcagcaatgttccaccacctgaaggccgcggagcacgtcgccctctgcgtcggccaaggttttgccctgctccttggtaatgttcttggccagctcacccatgttctccttgatgagagcctgcagcttgaacatcacctgctggcgggtgaggatcgactggttgctccacgagcgaaaagccttcttgttcgactcaagggccgcctgcatctccgcctgtgtggccttgggcacgcgggtgaccacttggttggtggccggatcgtgcacgtcaatccattcgttcgtcttcgactcaacgaacttgccgtcgatgaagagcttggttgtgggagcggctgaagagtaggacctctttgccagatggcgggcctggtgataaaggagggacaagagttggtaaacagccagtacaaaaggtatgaactccgatcgctaagcgtactttattttcccacttccacgtatactaaaccaaaaatttaccatttagtccacctttcatttgctttgcaaattgcccagtgctcgcaatcctaacctcaacggccggacaaatccgtttaatgtggggtgaggtctatttttttgggtgttgataacttgagtggtaggcgcgcggggggcagccgcccacgcttatcagtgtccatctggcaaattcgagattttcatggcgcgcctgtcgtggaaaggtaccgcttatcgcgttttattggatttaacgtcaactcaaacattgtaccgctaaattccccgcgaattcgccttgtgcgctttatctgcttaatattctggttctagttctacttcttccgcttcgcagcgacgtattgcgtaacatgtgttgttttcaactgcccgttcgccgctcacacccgtgggccattccaatcactagagtgggtggagtgtgagatgggcgccgaaagtgcatacattacatgcccaaggccaatcgcatcgccaattaccgaattcacggccacaccagtgtcagagagaacgagagagagcgccaaaacgatccaaatgctgatggatggatgcacgtatgtatgtatgtcagggtgaggatggcagcctagcatgcctataggacatacacccacccaccaattggaaactcacctctgctccgatcaatcgcactagggacatcttggggatacggagatgagaatttggtgcggggatcggatcgcgtgctctccgaacggtggctacactgaaactgaacgcagcgcagccgcccatttctgatgccagttattctccactgttctctacacatatacatgaatggaaatatatatgtacatatatctgtataggtttgaggtaatgtatggtggtgtggtgtggtattggcatggtgtggcgattgttgatatacgaaggcgaaggcgaagaccacgtcaaaaagtgctttacattagcaagtggttatagtttgatgctcacacacacgtgtacacgcacatatgtatgtaacttgctaccgcacacaccgttaggaaccgggggcacagctgttgtttttgtgttgctctgttttcgcaattgttgctgttgctgttttttgggggctcgttgtgagtatgtgtgtgtgagtgtagtgcttgctttgcggtgtttgcgtt

SEQ ID NO: 27371 - DNA, 1999 bp, DROSOPHILA
ataagcgtgggcggctgccccccgcgcgcctaccactcaagttatcaacacccaaaaaaatagacctcaccccacattaaacggatttgtccggccgttgaggttaggattgcgagcactgggcaatttgcaaagcaaatgaaaggtggactaaatggcccgccatctggcaaagaggtcctactcttcagccgctcccacaaccaagctcttcatcgacggcaagttcgttgagtcgaagacgaacgaatggattgacgtgcacgatccggccaccaaccaagtggtcacccgcgtgcccaaggccacacaggcggagatgcaggcggcccttgagtcgaacaagaaggcttttcgctcgtggagcaaccagtcgatcctcacccgccagcaggtgatgttcaagctgcaggctctcatcaaggagaacatgggtgagctggccaagaacattaccaaggagcagggcaaaaccttggccgacgcagagggcgacgtgctccgcggccttcaggtggtggaacattgctgcagcatcccatctctgcagatgggcgaaaccgtagccaacgtggccagggacatggatacgtactcactagtgctgcccctcggagtaaccgctggcgttgcgccgttcaatttcccggccatgataccgctgtggatgttcccggtggccatcaccaccggtaacactatgctgctgaagccatcggaacgtgtgcctggtgcaaccatgttgctgatggagcttcttaacgaagctggctgtccgccgggtgtcgtcaacgtaatccatggccaacatgacgctgtgaacttcatctgcgatgctcccgaaattaaggcagtgtcctttgtgggctccgaccaggcaggcaagtacatttacgagcgggctggcaagaatggcaagcgggtgcaatctaatatgggcgctaagaaccacggcatcatcctgggcgatgccaacaaggagaatactttgaaccagttggcaggtgccgcctttggagctgctggtcagcgttgcatggcattgtctacggctgtctttgtcggcgatgcccaggcatggattcccgatctggtggagcgtgcccagaagctgaaggtaaatgccggccatgtacctggaactgacgtgggtcccgtgatcagtgccgcctcacgccaacgcattaatgacctgattgagtctggggtcaaggagggagctaagcttatcctggacggcaggaagataaccgtgcccggatacgaggatggatactttgtgggaccaaccatcctaagcgatgttacgcccagcatgaagtgctacactgaggagatctttggccctgtgttggttatcctgaaggccgacaccttggacgatgccattggcattgtaaatgccaatccttatggaaatggtaccgccgtattcaccaccaatggagcggcagcccgcaagtttgtcaacgaaattgatgctggtcaggttggcgtgaatgtgccaattcccgtgcccctgcccatgttctcctttaccggaactcgtggctctttccgcggcgaccatcacttctatggcaaacagggtatcaaattctacacccagacgaagacggtcacccagttgtggcgcaaaacggatgtgacccacacccaggcggctgtggccatgcccaccatgaaataggcagaacctgaaaagattctggagaagattcagatgaaatgttccacgtattgaatttctggatgcttgcacacaggacgtatttagaaactagatacaaagaaattattgcatttatttgtgtgcctgtttattagatttaagacgatttgagacgaaacgtgtatcttgaaaataattgtatgtaaatgataacaattaaacgattattatgtaaagaaccgtttgaatattttctttgaaaagtaataagtttccgtagaataaaaccatttatgttttaggtgtttgtattcacccaaagcaacg

SEQ ID NO: 27372 - protein, 511 aa, DROSOPHILA
MARHLAKRSYSSAAPTTKLFIDGKFVESKTNEWIDVHDPATNQVVTRVPKATQAEMQAALESNKKAFRSWSNQSILTRQQVMFKLQALIKENMGELAKNITKEQGKTLADAEGDVLRGLQVVEHCCSIPSLQMGETVANVARDMDTYSLVLPLGVTAGVAPFNFPAMIPLWMFPVAITTGNTMLLKPSERVPGATMLLMELLNEAGCPPGVVNVIHGQHDAVNFICDAPEIKAVSFVGSDQAGKYIYERAGKNGKRVQSNMGAKNHGIILGDANKENTLNQLAGAAFGAAGQRCMALSTAVFVGDAQAWIPDLVERAQKLKVNAGHVPGTDVGPVISAASRQRINDLIESGVKEGAKLILDGRKITVPGYEDGYFVGPTILSDVTPSMKCYTEEIFGPVLVILKADTLDDAIGIVNANPYGNGTAVFTTNGAAARKFVNEIDAGQVGVNVPIPVPLPMFSFTGTRGSFRGDHHFYGKQGIKFYTQTKTVTQLWRKTDVTHTQAAVAMPTMK

SEQ ID NO: 27373 - DNA, 3431 bp, DROSOPHILA
gaatgatgtacagggataagggcgatcccctgaagataattctgtatccgcacgacgacgatgatgtgagcacggagtgcgccatcaaaaccatggactgcgatgagcccattgactacgatcagaatctgaaggatccggatcttaatgttattttcgtacgcggaccgaacctatcgaaggtgttcaatgagctggagaagtccgcggaggagttcgagttcgtgacatcgccgaaccgcccgcactttaagatcaccacagtggggatcatgcaggcggtgttcagcgtcgaagtggcaaagacgagtcccatgatgatgatgtttaactgcaaacagacggtggtggctcgctacaagagccagcagatccgcatgaccaacaaggcgatgcagtcggccaccaaggtggccattaaaacgaactccgttggcctcctagaactgcatctggtaatgcagggcgatagccaggaggagatattcattcagttcttcataattcctttgctcaacactgattaaaccgaaactactaggtagctaataaaatagaactttaaaatattgctaaaatcttgaaatcatgtaaatctaattgaggtctgtagttagcgtgtgggtcaattgttaatgcttctcatgcaaatataagatggattcagcattcagttgagtacttaaggtggccttggaacgatttgatattactttataatactttaaatgacgtggactcccggaggagaaagttgcatcgccatttacaatgactctgaagaagagggcatgataatggtacgctgctccaatgaaaacaactttatttgtcagacagaacaataaagaacattgaatatgtttatttctatttgttcaatgcactgcacagtgtgaaagtaaacagaactacaatcgaacagtagctgataagtcagctatcaataaatacattaggattccgcatcgatagattttccatccgattccgggcagcgatgatgccggagagattcagcttcgacttccgtccgatcgatcagtactggacgagagccaaaggcgcgtgcagcaacacgaaacgcggaaacatgtacatcctggcatcgctggccctgatcctgctgcacctgctggtgctgcccatctacctgtacctcacctggcaccacaagtactggcgcaagcggggattggtcacggcgcggcccctgaccctgctgggcacgtatccgggcctgctcacccgcaagagcaatctggtcttcgacgtgcagaagatctatgagtgagtacttccaatctctagtcataatgagatatgtaactatataatcccagtaaatacaaggggaagcaccgagctgttggcgtctttgtgacccgacagccgcagatcctggtcctcgatccggagctggcccacgaagtgctggtgagtaactttcgctgctacaaggactctctgcaaagctcgtacctccggcatgccaagtgggacaagtacgcgcgcctcaatccgttctgggcatccggacagtcctggaggcggctccgcacggacgcccaggctggtatctccggcagtcgcctgaggcaggcctacaatatctgggagcagggaggtcaaatgctcaccgagtacatgacgcaacaggtggcggagaagaacaatattctggagaccagagatgtgggttctattcacatctgagcagctataagtatcgtatcctcataaatcaattttgcagctctgcttccgatacacggcccatgtgatggcggacttcatctggggcatagacgcagggaccctaacccgacccatggagcaacccaacaaagtgcaggagatggccagcaagtggaccagttacgccttctacatgctgaccctgttcatggccaccattgtggcgccctgcagtcgcctgctgttgcgattccgtttctatcccaaggagaccgacgagttcttctccaacctgaccaaggagtccattgagctgcgactgaaggctggcgattccactcgcacggactatctttcgcatctgctgcagcttcgggatcagaagcaggccacccacgacgatctagtgggtcatgccctgaccgtgatgctggatggctacgatacttcgggaacagctcttctccatgctctgtactatgtgggtgactactttttaatatacccaatagaccaatctcatagtacatttttttagttggctgaaaacccggcagttcagcagaaactgcgagtggaaatcctcagttgcatggcatcggagaagagtctcgactttgagaagctctcctccttacaatatttagagcaagtgatctatggtaagcatatatatcggctttgccaatttcaccatattatatatatagtaaaattgttgttttatttatgagtcgaactaatgtcccgtcagttgactaaggacaacgccaagaaataaaaaatagtttttaggagaaatagtttcacgactttattctttggatctcagcttaagactaaaaatcaaatgcaaattggattgaggagaagcctcagtatttgaacaatatttgtatttcgggagagcctcgctcttgggttcttaagattaggtagcgttgaaagagggcagtcaaatctgcttaggtcaggctttaggatgtttacaagaacggctgcgctgccaaagataaacgaatgctgcgcagctgggatacgttatggaaaattactagagtgcattactgatttctttgaaataatggaagtggctggtttggaccacccaaatacgtcactccccttcccttaaagagaagcctatacttgggctgggattgatggatatagtgtgggaaatggagtttcttctatttctgtttggtggggggtgttttgattttgattttttcttattttaagttttgcatacagcatcataaatggtttaaatgatacatatcttaaatatgagtacaacaaaattagtgcgattattacaatgatcatttgtatgtaaagtgtaatattgttctctgaaatcatctcaacaatgtcgttgtgttttacaatttttatttttgttatattaagtggtgtgtatagtggtgtcaaatctatttctggttctaacagattttcacttaaaattatattattgatttctattttgcattgcgttactcttatcattttgtttccttctatttttattttattaattgaattttggcaattttggttaagaattgtttgggttaagttccaggttacaattgtgtttggttctatgtattttattatttcgttcgtgtgtactggcttaaaattacaaattggatttaagtgtttaatatgggatgcccagcgtataagaaaatttgagcaggtgtctgtccagtagtgtcatg

SEQ ID NO: 27374 - DNA, 1260 bp, DROSOPHILA
atgatgccggagagattcagcttcgacttccgtccgatcgatcagtactggacgagagccaaaggcgcgtgcagcaacacgaaacgcggaaacatgtacatcctggcatcgctggccctgatcctgctgcacctgctggtgctgcccatctacctgtacctcacctggcaccacaagtactggcgcaagcggggattggtcacggcgcggcccctgaccctgctgggcacgtatccgggcctgctcacccgcaagagcaatctggtcttcgacgtgcagaagatctatgataaatacaaggggaagcaccgagctgttggcgtctttgtgacccgacagccgcagatcctggtcctcgatccggagctggcccacgaagtgctggtgagtaactttcgctgctacaaggactctctgcaaagctcgtacctccggcatgccaagtgggacaagtacgcgcgcctcaatccgttctgggcatccggacagtcctggaggcggctccgcacggacgcccaggctggtatctccggcagtcgcctgaggcaggcctacaatatctgggagcagggaggtcaaatgctcaccgagtacatgacgcaacaggtggcggagaagaacaatattctggagaccagagatctctgcttccgatacacggcccatgtgatggcggacttcatctggggcatagacgcagggaccctaacccgacccatggagcaacccaacaaagtgcaggagatggccagcaagtggaccagttacgccttctacatgctgaccctgttcatggccaccattgtggcgccctgcagtcgcctgctgttgcgattccgtttctatcccaaggagaccgacgagttcttctccaacctgaccaaggagtccattgagctgcgactgaaggctggcgattccactcgcacggactatctttcgcatctgctgcagcttcgggatcagaagcaggccacccacgacgatctagtgggtcatgccctgaccgtgatgctggatggctacgatacttcgggaacagctcttctccatgctctgtactatttggctgaaaacccggcagttcagcagaaactgcgagtggaaatcctcagttgcatggcatcggagaagagtctcgactttgagaagctctcctccttacaatatttagagcaagtgatctatggtaagcatatatatcggctttgccaatttcaccatattatatatatagtaaaattgttgttttatttatga

SEQ ID NO: 27375 - protein, 419 aa, DROSOPHILA
MMPERFSFDFRPIDQYWTRAKGACSNTKRGNMYILASLALILLHLLVLPIYLYLTWHHKYWRKRGLVTARPLTLLGTYPGLLTRKSNLVFDVQKIYDKYKGKHRAVGVFVTRQPQILVLDPELAHEVLVSNFRCYKDSLQSSYLRHAKWDKYARLNPFWASGQSWRRLRTDAQAGISGSRLRQAYNIWEQGGQMLTEYMTQQVAEKNNILETRDLCFRYTAHVMADFIWGIDAGTLTRPMEQPNKVQEMASKWTSYAFYMLTLFMATIVAPCSRLLLRFRFYPKETDEFFSNLTKESIELRLKAGDSTRTDYLSHLLQLRDQKQATHDDLVGHALTVMLDGYDTSGTALLHALYYLAENPAVQQKLRVEILSCMASEKSLDFEKLSSLQYLEQVIYGKHIYRLCQFHHIIYIVKLLFYL

SEQ ID NO: 27376 - DNA, 3725 bp, DROSOPHILA
tacacatttatttataattaaattttatcatagatgttatcaattattctgtataaaaattatgtactttggaattaattgttttatttttccatagttccgtttctatcctaaacatatcgatttatatccttaaaaagtccatttgatatataattctgtattttttccaattatttctatcctgccttgattaacttcctgcaattaattggcagtcgtttagcttttagaattagaaccactcccgttgcgcgatcaattgccactgagcaatggaatttagtcgtgtgccatttttgatcgaagcggctaatttaagttggcgatgctagttagtcgccccctccttgacccgattagatctcacgtgaatcagggcaatcaatatgcataaaatagcaatctctcattgtttcgaatatattaaacgagttttcccagcacggtgtgtgtgtgtgtgtgtgtgtgtgtggaaatggaagtggatataacaacagcttgacagttggataaggtcgtgtaaaattgatgtgaaagctgaatagagcgcattggtaaactgataaatcacatataattgttaacagtcatagaatttgaagctaataaagtttgaacgaaaccggtttccaagcgaaaataattatttagctaacacgctcctaaattatgcgattaaggcagttcaaataaataaatgtgaggctattaaattaaatccaatggaagtgactttatagccgataactatttttattattcaaccgggtaaagaaattgtgaataaaaaaaattattgaatatataataaattttatgcaaatacgtttattgaatatatttgttataatcatatcggtataacttgttgtcttctgcaactgctgataaacattctttataaataaaatgagtaaatactgtttagatacaaagacgaatgcttttatttgatagtttttgtaaaattcctttcatttacatttgaaaacattgattagaatcgatttacaaatacagttgtgatactatcgccatcattgtaggaggagtatggaacaactgattgcataactccaagcattcgattccacagaattctctttgcatctctgccccagaccagatcgaagtggttaaagttttcattcggaacgagatacttttccaccacattgggcaacctgttgaaaagcatgtccacatcttccggcggagctatccaatcgtttttggcataatagattgccaccttggccttgactttctccagttcataaggcggtggggacaggctgccataatgcaggaagttcaacagtccgtagtcaaactgctggaatttcccagagttcctcagctggccgtagtggtgcatctgcctgatggatgcaccggccggagtgtgacccactacgatcggcaacatcgtttggttcacttgctggccattgaaaccgaaaagaataaagaagagactctgacagacactgctggaaatgatatcccggcaggcataacgcttgaactgatcaatcacactgttgctgggcaggaactcattgtagccagccgcgcttaggaaggactaaaaccagatattagttaaaatgtataaaagtgtaaacaaatcttaaacgtacggcaactgcagtatcctgagaggccaacaaattcacaatgggactacggcaatgggacaggaaggccactggagccaatgcctgcatcataacgatcttttccatgtactctggtctttcgctggccaaaatccagaagatagttgatccctgggagtgaccaatgtagtgcaactgaccgaatccagattgcatcagtatgtaatcaatgatggcaggcagatcgaaaatgcccatctcatggaacgaaaagttccagaaatcggagtcttcggcggagtaacgaacatggcgtttcgtataggtattaccccgcacattggccatccagacgtcgtagccctgctcgtacaacatgtatcctttggaagaaaatcattctgagtgcacttaaaaaacgaatgaaattcgattgtacctaaggaactggaaggacccatcatcacccaggtatcggaactgtccattagtccgtggaccagcagcacaggcagggctccaggacgtgcgatcctgaagagtcccaataagtagccatcgtcactctgcactgtgtaattctccgccgggtatccatatttggaaatcaattgtatctgcaaaaacaggagaaacaaacacggcttaatataactattcgctagagatttgcccttaaatactttgagtgtacgtagtattgagtgtacgtagtatttagaatacatgagattataaaactatgaccaatcagcgagtaatccgacctttatagtaagagctataacctagaaagctatatatgtacttacactcacacaaattgtgtctatatctacagatgttttataagtcgaaatataatgcactatattaatctagatttttagatctggataaacttcctatgctttattccaaatgttactaatcgttggaacccgaatgatttttgaacttaccgtattcaagtgtgcatcttctaaaactgatgaaggtatagccagttgaaaaggattgaaaaatgcattggcttccagctggaataggcccaaaaagaaggtccatataagaaatttcgaagacgatgatagagacatctgactttattagagacaaactttactaatccgatgtatacaagttccaagtggaaactgaagcaagtaaaattttgggatactaaaaaagattgtacgtaggcaataaaagtgcaacactttaacctatgaataaaatttacatttaccgcttgggtctcaacttaaatactttcggaaataaatatcattcatgtaacttaagcaaaaagtttgttgcttagcaaaatcgaattaaaagatatatactaattttcatatcaaaaaataggaatagaaaagatgggaattaatattaaaaatgtattaattgtaagttgtttttattggcttttatcgttgtaaaattgttgtaaatcgtcttagtttctactaaacaataaatacctaactaataataatatactgtgaataactaaattataaccatagttctattcccctttagataattgaattctcatgatttcgcattatttccagcattcgatcccacaaaagttcccgggcatcgatgccccaaatgaaatccaagtggttgaactccttgtcgtccaccagatatttctccacgacattgggcagcttgcggttcagcatttccacatcctccggcggagccagccaatcgttttggccataatatagtgccaccttggcccgaacattctccaggtggtaggatggcgggtcaatggttccgtagatccagtggtttctgagccatccgtgatcatactgccggaaaccgccagatctgttgagctgtccaaaatgctgcatctgcttggtggaggctccggccggagaatgacccacgattaccggcagcatagtctcgttcagctggagcttgtcgaatccggtggtcaggaagatgacgtttgaacaaatctctttcgtaatagtggtctcgtcgcagatgatccggttgaacatgctgatgaactcattcttaggcaaaaactcgtgaacgccaatcagcttgaggaccaactaa

SEQ ID NO: 27377 - DNA, 1164 bp, DROSOPHILA
atgtctctatcatcgtcttcgaaatttcttatatggaccttctttttgggcctattccagctggaagccaatgcatttttcaatccttttcaactggctataccttcatcagttttagaagatgcacacttgaatacgatacaattgatttccaaatatggatacccggcggagaattacacagtgcagagtgacgatggctacttattgggactcttcaggatcgcacgtcctggagccctgcctgtgctgctggtccacggactaatggacagttccgatacctgggtgatgatgggtccttccagttccttaggtacaatcgaatttcattcgttttttaagtgcactcagaatgattttcttccaaaggatacatgttgtacgagcagggctacgacgtctggatggccaatgtgcgggggatcaactatcttctggattttggccagcgaaagaccagagtacatggaaaagatcgttatgatgcaggcattggctccagtggccttcctgtcccattgccgtagtcccattgtgaatttgttggcctctcaggatactgcagttgcctccttcctaagcgcggctggctacaatgagttcctgcccagcaacagtgtgattgatcagttcaagcgttatgcctgccgggatatcatttccagcagtgtctgtcagagtctcttctttattcttttcggtttcaatggccagcaagtgaaccaaacgatgttgccgatcgtagtgggtcacactccggccggtgcatccatcaggcagatgcaccactacggccagctgaggaactctgggaaattccagcagtttgactacggactgttgaacttcctgcattatggcagcctgtccccaccgccttatgaactggagaaagtcaaggccaaggtggcaatctattatgccaaaaacgattggatagctccgccggaagatgtggacatgcttttcaacaggttgcccaatgtggtggaaaagtatctcgttccgaatgaaaactttaaccacttcgatctggtctggggcagagatgcaaagagaattctgtggaatcgaatgcttggagttatgcaatcagttgttccatactcctcctacaatgatggcgatagtatcacaactgtatttgtaaatcgattctaa

SEQ ID NO: 27378 - protein, 387 aa, DROSOPHILA
MSLSSSSKFLIWTFFLGLFQLEANAFFNPFQLAIPSSVLEDAHLNTIQLISKYGYPAENYTVQSDDGYLLGLFRIARPGALPVLLVHGLMDSSDTWVMMGPSSSLGTIEFHSFFKCTQNDFLPKDTCCTSRATTSGWPMCGGSTIFWILASERPEYMEKIVMMQALAPVAFLSHCRSPIVNLLASQDTAVASFLSAAGYNEFLPSNSVIDQFKRYACRDIISSSVCQSLFFILFGFNGQQVNQTMLPIVVGHTPAGASIRQMHHYGQLRNSGKFQQFDYGLLNFLHYGSLSPPPYELEKVKAKVAIYYAKNDWIAPPEDVDMLFNRLPNVVEKYLVPNENFNHFDLVWGRDAKRILWNRMLGVMQSVVPYSSYNDGDSITTVFVNRF

SEQ ID NO: 27379 - DNA, 3343 bp, DROSOPHILA
ggactcagacagcaaacaattaagtttgcatctatggagtgacacttttattttcttgtggtttgcaggcacaccccaaaaaaggactcacatatatgcacacacacacacacacatacacacatgcacggtgtcagtggcaatttcgggttttttggcaaactgcacggagtcctggaggggacttcccccacttcgaagtgtcagatgcaatggagttttaaataaaatgtacttgcaataaatttgcagcagctctatagaaatatattatcagcatatgctggcagctactgtttttttgttttttttgttttttttttttttggcacgccacaagcctcttgtccgatttaaatatttaatctgatttcatgtttcagtgcgtttcatggtaatttacaataagtctgctgttgagtgagtcagtgcgcaaagaaagcaacaaaatttcaaatgtatttacaacagcttttgcattcggaatatttatgcattcaagtgacgttctgcactttaattgggcccacaataattattttaaggaatcacttggtcgacgtttaagccaacttggaagttatgcccaagtaattttggccttaataactgtggtgtttaaagcttcttaaagatgctagagtttctacgcaacaaagctagcaattcaatgtaacaactcaaattgatttgattttaattaaataatgcaaaccataatgataattattggtgattaagccacttatttattgcctatcatatagtacgtggatatatatatatatatacaatttgctacattgagcatttaaaatccatatttttaagatttaagtaggcagtatacataaaaagcattactagctataaaaggagtgcaattagttaactaaaacattctgaggtactcttaaaaaccaattaatttaaacatttagataacacagaaaaggatggccttaatttttggattgatttaatattaaatatagtactcctacacttcgccattgtcaacttttcgcattagttctatcatgcgatcgttgagaacggttttcacatcatttccccaaatgaagttgatgtggttgtacaaaggatcgggaaacatgtaatcgagcactacatttggcaggatatcacgtaatcgaaccacatccttgtcggatgttagacgatcgtttctactgtagtacaatgccactttgcagtcgacattagtgagtttgtactgtggcggagtgtcgacgccgtggtttcttcgattctcccaggtgctgtagtaattgtacttgaaaaacccaccgctgtggatctgctggccatagtgctccagagacttaaccgatgatccggaggatgcatgtcccgtgaagagcggaagaaggctggagttgaattgtgcgtagtccacgcccatggcttccatcaggaaataggtgcaggtattctggaagacgaagctgcagatcttatgtatcaggcttcgccacacttcgttctccggcggaaattcgtatattccaaacgatctggcaataaactgaaaatcaaatagtgttagttgattgatattgattgataatatttattaatatttactcaccactaatggtctcaaatacttcacaaaagtgagtataatcggtgaatcgatgtagtcccaaaagacaaccggagccagagcctgcataagtttgatctttttcatataggccgatctctcactgcccatcacaaagaaggatgtagttccctgtgagtggcccacatagtggatctgttcgaagtccttgctccttgcaagaacgtaatcaatggccgccggaagatcgtacactccgagctcatggaaggagaagtcccagaactgcggctggtatcgatgatatcgcttgtgcttccgggaatacctatttccccgcgtgtttagcaaccaaacatcgtatcccatatcgctaagcaggaagcccaaggatctttcgggacccagtatcacatatgccaccgagctgtccagcaggccatgtaccaataacacgggttgtcctccgggcttgggaatccgatgagccgtaaggacgaagccatccttggcctggatcttatgcgtttcagcaggataaccatacttcttgatcaaatccggctgggtgagtattctcaaatatatattttgaattatatataattattgtgtgccattaccgtgatcagattggcatcctccaatatagttttgtcgaccttaatcaaatcgccggaagcggtatcacagaaaatgaaaaggctaatcaaaatgccatagcagtagtttaaatgacagcttttaagcattttgcctcctaaaacttaacttcgatctcagcaatttgccacatgcactttgaaatgcgggaattaatttaagccaacaaaattggccaatcaattactttgcgctcggatctgattgtgttaatagtgcatttggaaaattgttttaagttgcatttaatcgacgtgagaaaggtttttttgatgcttccatttttcaggcattttagtttagtttctcagatttagttaagttgtattgcacagtaacttaaaatttctttcttctgtattacattttattgcagtttattatatatcttttattatcacaggtacctttattctaatttatttgatgcacaagcgagttttaagttggcagtcttttttgtttattagcattttaaagaaacgtacacatttatttataattaaattttatcatagatgttatcaattattctgtataaaaattatgtactttggaattaattgttttatttttccatagttccgtttctatcctaaacatatcgatttatatccttaaaaagtccatttgatatataattctgtattttttccaattatttctatcctgccttgattaacttcctgcaattaattggcagtcgtttagcttttagaattagaaccactcccgttgcgcgatcaattgccactgagcaatggaatttagtcgtgtgccatttttgatcgaagcggctaatttaagttggcgatgctagttagtcgccccctccttgacccgattagatctcacgtgaatcagggcaatcaatatgcataaaatagcaatctctcattgtttcgaatatattaaacgagttttcccagcacggtgtgtgtgtgtgtgtgtgtgtgtgtggaaatggaagtggatataacaacagcttgacagttggataaggtcgtgtaaaattgatgtgaaagctgaatagagcgcattggtaaactgataaatcacatataattgttaacagtcatagaatttgaa

SEQ ID NO: 27380 - DNA, 1221 bp, DROSOPHILA
atgcttaaaagctgtcatttaaactactgctatggcattttgattagccttttcattttctgtgataccgcttccggcgatttgattaaggtcgacaaaactatattggaggatgccaatctgatcacgccggatttgatcaagaagtatggttatcctgctgaaacgcataagatccaggccaaggatggcttcgtccttacggctcatcggattcccaagcccggaggacaacccgtgttattggtacatggcctgctggacagctcggtggcatatgtgatactgggtcccgaaagatccttgggcttcctgcttagcgatatgggatacgatgtttggttgctaaacacgcggggaaataggtattcccggaagcacaagcgatatcatcgataccagccgcagttctgggacttctccttccatgagctcggagtgtacgatcttccggcggccattgattacgttcttgcaaggagcaaggacttcgaacagatccactatgtgggccactcacagggaactacatccttctttgtgatgggcagtgagagatcggcctatatgaaaaagatcaaacttatgcaggctctggctccggttgtcttttgggactacatcgattcaccgattatactcacttttgtgaagtatttgagaccattagtgtttattgccagatcgtttggaatatacgaatttccgccggagaacgaagtgtggcgaagcctgatacataagatctgcagcttcgtcttccagaatacctgcacctatttcctgatggaagccatgggcgtggactacgcacaattcaactccagccttcttccgctcttcacgggacatgcatcctccggatcatcggttaagtctctggagcactatggccagcagatccacagcggtgggtttttcaagtacaattactacagcacctgggagaatcgaagaaaccacggcgtcgacactccgccacagtacaaactcactaatgtcgactgcaaagtggcattgtactacagtagaaacgatcgtctaacatccgacaaggatgtggttcgattacgtgatatcctgccaaatgtagtgctcgattacatgtttcccgatcctttgtacaaccacatcaacttcatttggggaaatgatgtgaaaaccgttctcaacgatcgcatgatagaactaatgcgaaaagttgacaatggcgaagtgtag

SEQ ID NO: 27381 - protein, 406 aa, DROSOPHILA
MLKSCHLNYCYGILISLFIFCDTASGDLIKVDKTILEDANLITPDLIKKYGYPAETHKIQAKDGFVLTAHRIPKPGGQPVLLVHGLLDSSVAYVILGPERSLGFLLSDMGYDVWLLNTRGNRYSRKHKRYHRYQPQFWDFSFHELGVYDLPAAIDYVLARSKDFEQIHYVGHSQGTTSFFVMGSERSAYMKKIKLMQALAPVVFWDYIDSPIILTFVKYLRPLVFIARSFGIYEFPPENEVWRSLIHKICSFVFQNTCTYFLMEAMGVDYAQFNSSLLPLFTGHASSGSSVKSLEHYGQQIHSGGFFKYNYYSTWENRRNHGVDTPPQYKLTNVDCKVALYYSRNDRLTSDKDVVRLRDILPNVVLDYMFPDPLYNHINFIWGNDVKTVLNDRMIELMRKVDNGEV

SEQ ID NO: 27382 - DNA, 2648 bp, DROSOPHILA
aggtatgcaaaaggtttggaaaatactccgaactatcgcatttatttcatgaagcagccacacgactatttacattaacataaatatgtacatacaattgtacatttaagtcatttaagtgtataggaatatacccttgcagagagtatattgattccagtaaaaaccttgatgcgcagtgtgggagacattaaagtatatacatacatatattcttgatcagtatcaaactcagtgttcatcgccgtccgtcgtcagtccctcagtttaaagctgcatacagatctgcacgaaagtttttcaaaagtcttaggtagtttataagtcgggacgggccagattatatcatttcttcttatccttagatgaaaaaaatcaaggatatgtgcgccctggtacccaattcttacctaaacacctttccgttgtgtgaaagcttgcttaacgtacatttttaatgtattttttattatcgttggcagatagacatcaatgcaaaatggtgtgcaacgaatgtgtacaaattgcccgaattacatctcatcaggtattttaaaatttacgagcgcatttgatcggcaacatttttttcttgttatttaccaatttatgtattttacatattattttaagtttggatacacgtagttaaattattgtactgctaccttcaggcatcttaaacaattatatatttgaggagggaaattaataatactattgtattgattcaacgttaacgaatttttacatatttacaagggtaaatatttgtcatgttcctatattaacaatcaagatagttgttacaacagcgttctaaataataggtcctgtcggtggggcctttttagtcttatatttatgtatataatatgtattttttttatacatatagaaaatgtagtttgggcgaaaatgaagcatacttttaggctgacagattcagtgcatttttttttcttataattaaatttattttttaaggcatacggggaaatcttggagcccctttgtgtccttcttttctattatttctgcccatttgggcgcgccggctaactatagttagctttttctagtttatacagttataatacagtacataacaaacacatataataaataggttttttgataagcgtcagcttctgctgacccttgtcaaaggagatcgggaaatgagatccctcggttgccttctgttgagcctccttggtgggcgagatctgttaagagcgctggccagccgatttctgtggcgctccagcctgtcatggtacctgctcgagtgctggtttatctcgtcaaataccgttgcgagtttcaggtctctgtgcagggtggtgtttcgcacaaaccactcgcagccggtgatgagtcttgctaccttattttgaatagcctggatcctttttatttggctgtcgcatgccaagacccagatttggcacccatacttccagtttggtgctaatatctgtttgtaaattgtcagcttgttggatagcgacaatttactgcgcgaacaaagtagccagtagtgcctcgccaccttagcacgtagtgcattttgaacagtagtaatcaaacaaatccgaaatttgagtatgttaggacttactccatacaaaatagcttgagtcatcagtcaccttttaatagttcaagaaaaaatacttcttgttaagaatccgtaacagtaatacggagagggaggggggattttactttacttttagagggaagatttactttgtttactttttaaagtcatattatgccttctcaaataccttcttttactaaaaatattttcttggcctctttgctgattgacttcattctttataaccaacaattggttcatacagcaaaaaaaaaaaaaacgttagcatggtctgcgtgaagtcatagcatgtacattttgacttttagccttctacttgtagagccgagcgctgaactcccaacaactcgatgagtgaaacaactctgtagtccattgaatgctagacctgaatgttgggtgcagatacatttagcattgtgcaaaaaatttgcattggccggtagctgccaacgctccgcttgaaattttgattaaatttgaaaaaggaatggcccaagaggggccgcacctttagtaagtcaattttggattgttataatgcatcatcaatttaaaaattagctcaaaacaattgctcgctttttgataggatcacaaatatttaaattggcccccaaatggggctgattgggtggggcggaggatggcactcctttctgttttaaaaaacgcgaaatgttggtatttcacttaataaccaggtaaacagcctgttggctatttaaaaaataaataaaataatattacaatgttaaacttgtatttctgagtaccttatttttgtccacaaaaaaattatacccagcacgagaacaattcatgtttgtgtctggcccgattaaaaatcagtaagcgagccatcagcttttgatgcctgttggtctaatctggctttccaaggtatgttgtggatcgtttactgacttttgcaagggctgtcgttattttcacaaattcgctacaaatattgcacaccaacgtattggactggtgggtctggttgcattcttattga

SEQ ID NO: 27383 - DNA, 648 bp, DROSOPHILA
atgactcaagctattttgtatggagtaagtcctaacatactcaaatttcggatttgtttgattactactgttcaaaatgcactacgtgctaaggtggcgaggcactactggctactttgttcgcgcagtaaattgtcgctatccaacaagctgacaatttacaaacagatattagcaccaaactggaagtatgggtgccaaatctgggtcttggcatgcgacagccaaataaaaaggatccaggctattcaaaataaggtagcaagactcatcaccggctgcgagtggtttgtgcgaaacaccaccctgcacagagacctgaaactcgcaacggtatttgacgagataaaccagcactcgagcaggtaccatgacaggctggagcgccacagaaatcggctggccagcgctcttaacagatctcgcccaccaaggaggctcaacagaaggcaaccgagggatctcatttcccgatctcctttgacaagggtcagcagaagctgacgcttatcaaaaaacctatttattatatgtgtttgttatgtactgtattataactgtataaactagaaaaagctaactatagttagccggcgcgcccaaatgggcagaaataatagaaaagaaggacacaaaggggctccaaga

SEQ ID NO: 27384 - protein, 167 aa, DROSOPHILA
MTQAILYGVSPNILKFRICLITTVQNALRAKVARHYWLLCSRSKLSLSNKLTIYKQILAPNWKYGCQIWVLACDSQIKRIQAIQNKVARLITGCEWFVRNTTLHRDLKLATVFDEINQHSSRYHDRLERHRNRLASALNRSRPPRRLNRRQPRDLISRSPLTRVSRS

SEQ ID NO: 27385 - DNA, 2792 bp, DROSOPHILA
taaatcaattttgatctcctctgaagatggtagcgatccgaataatgagaaggtgccatcggatgagtctgatgtggatcggaccgtcgtctgcgccaaagattcgctgggaagtttcggcgatgattccgacggcaaggaggacgatgacagtaaggagtcgatttacctatcttcctactccgattactatgattccgcggatgagcagctcaatccgaagacttatcgcgctcaggtgtcagaggacgaagattagacatattcatttgttgctacatttgtaccaattttctaaataaatcgcatactatatacgtacatactgcacttcatatatattttctctaaattttttggaaatacttataaaacatgtttaatcattgtaaaattttcattaaatgtttatctcacaagaacgtgatttcttacgctgcgttaagtttttgccagtcattatttcgtgttctctttcgtgttctctttcgcatggaataccttagagttgtcaaaattatttggtgaaatggccagagaataattaatcggccacaaataattggaatagctatcatcacaatttacaaccaaatacatatctattataaataaaaaaatgaatatatttcaaaaaaaatatatttatgctaccagagctgtaaattgtataatttattatgaaaaaaagcactaatacttattatgccagccgaacataataagaattttagagtctagagttcccatttgcaaggacatgacaaagccctggcaaccctttttaaaaaaaaagacgatgactttgcagtctacaagtcacatttctgatttggcgtgaggacttcagttgattcacatctcggagcggatattacttaatattatataaattaaaatataaatttgcaaagcacagaattttcaaggtgagcatttcaagagaattcttttccacgcactttacccatacaagttaataggttttcttaacaaaacaatggatttcaacaagcgacagaacatggaggaggtggtgcgcatcggaggcaaaggatctatgcgccgcaagcataagagaatcccatcagtagctgcggtcgatgagaagcgcgtgcaggcgacattggccaagataccgttaaagaatatcagcggaatccatgagttgaccatcgagttcaccgattccagtgaggttgtggtagtcatgcccaaggttcagggcatctctgccaatggtttgttagttgttaatggcgatttcgtgcgcaaatcgtcaacagctggcccatcgaaaatggccaaagcagccaaggcacccaaggcacccaaggcacccaaggcacccaagacacccatggcacccatggcacccatggcacccatggcacccatgacacccaagccggaagctttttccgtcaaaaagccagaatcagaggaaaccattaaggtggtggccaagaagcccaagaagctgcgcaatcgtgttcgtcctcgcaacaagaaggtccaaatgatgctctctaaaaacaatgaggaagcagccatggctggcggggattcggagccgaagcttagcaatggtaaatcaattttgatctcctctgaagatggtagcgatccggataatgagaaggtgccatcggatgagtctgatgtggatcggaccgtcgtctgcgacaaagattcgctgggaagtttcggcgatgattccgacggcaaggaggacgatgacagtaaggagtcgatttacctatctttctactccgatggctatgattcctaggcggagcagctcaatccgaagacttaacgcgctcaggtctccgaggacgaagattagacatattcatatgttgctagatttgtaccaatttgctaaataaatcgcatactattaacgtacatatacctcgcataccttacatgttttttctctagaatttcttagagttagtcaatattatttggggaaatggccaacgaatgattaatttgctaaaatcgtcttgcattgttataagccgcaaaacaaggcacaaaaaccgaaaatccttctaaaattaagtgatgtttattaacataattcctgttcacatttagttaaagattggaaaagttaataaactattgagtcgcttaaagatccatttgatctcttgaatgctttttcgtgccgcatttcttgaacgcattaaacaagaaatccgagcaaaattaatttagtaaacgtttaagaggaaatgccacgcccctatttacgttccacggtggcggaggtggaaagggcggcaaaaactaatctgcgcctcgaaaaatgtacgaaattaatctgcacataaattaagcattaaaatttaatatatttgtttatggagcctcaaagtgcgatggtgttggtagggtggagctggcggagcacacgagtgggcgtaccggatgtgctgtatatgtggaacatgaaatgtgtgtatatgtataagtgtgtagtgtatggtgtatggtgtatggtgaatggtgtatggtgtgtgttcttagtggtaataaataaatagcaaaaaggtaataaaacagatagcgaaaaaggaaaaaacggaaaaacatcccggggggatgtggaatctgccaactggttgcccattatcgtattagcacatgccaccagtgattattatgaggtgtcctccctctgctccaggtcctgccacagctccttttcctgctcctgctcctgctcttgctctcccccgtatcctttgtctatgcatgcgtgtataattaatttt

SEQ ID NO: 27386 - DNA, 792 bp, DROSOPHILA
atggatttcaacaagcgacagaacatggaggaggtggtgcgcatcggaggcaaaggatctatgcgccgcaagcataagagaatcccatcagtagctgcggtcgatgagaagcgcgtgcaggcgacattggccaagataccgttaaagaatatcagcggaatccatgagttgaccatcgagttcaccgattccagtgaggttgtggtagtcatgcccaaggttcagggcatctctgccaatggtttgttagttgttaatggcgatttcgtgcgcaaatcgtcaacagctggcccatcgaaaatggccaaagcagccaaggcacccaaggcacccaaggcacccaaggcacccaagacacccatggcacccatggcacccatggcacccatggcacccatgacacccaagccggaagctttttccgtcaaaaagccagaatcagaggaaaccattaaggtggtggccaagaagcccaagaagctgcgcaatcgtgttcgtcctcgcaacaagaaggtccaaatgatgctctctaaaaacaatgaggaagcagccatggctggcggggattcggagccgaagcttagcaatggtaaatcaattttgatctcctctgaagatggtagcgatccggataatgagaaggtgccatcggatgagtctgatgtggatcggaccgtcgtctgcgacaaagattcgctgggaagtttcggcgatgattccgacggcaaggaggacgatgacagtaaggagtcgatttacctatctttctactccgatggctatgattcctag

SEQ ID NO: 27387 - protein, 263 aa, DROSOPHILA
MDFNKRQNMEEVVRIGGKGSMRRKHKRIPSVAAVDEKRVQATLAKIPLKNISGIHELTIEFTDSSEVVVVMPKVQGISANGLLVVNGDFVRKSSTAGPSKMAKAAKAPKAPKAPKAPKTPMAPMAPMAPMAPMTPKPEAFSVKKPESEETIKVVAKKPKKLRNRVRPRNKKVQMMLSKNNEEAAMAGGDSEPKLSNGKSILISSEDGSDPDNEKVPSDESDVDRTVVCDKDSLGSFGDDSDGKEDDDSKESIYLSFYSDGYDS

SEQ ID NO: 27388 - DNA, 2825 bp, DROSOPHILA
cgagtgaaatcaaaatcaaatgcgaaatgagcacaggctgaaagcagcgacgtcggcagcgcagtggctgcgcagtttcgctttttgccagtctccattctctcttccttctggctctccgctccttgattccttgatttttccttgcgcgctcggtttgttgctatttttccgtgtcttttcggggggttgttgggttggtgtgatttgtttatcggcgggctgggcgggggcggaagttcctcgaattctgggttaacgcagcacaacaatttttgtttatcgctgagcaaaggcgccggtaacggtaaacttgagagcgacgaaatcagtgaatgtgccaagagagagagagagggaggtgagagtgcagtgagtgcgcagagagagaaaatcgttttttagaaaatatatttttgatataatttttaagcagttaaaaatgtttacccatttaaagacatccgttaatcttggtttgaatttcatccgtttgcattgttgcttcttactcacgtaacatatttcaaagcatactttttggattgctaataattaaagaaaatttaatgtacgtaaatagctggaaaagttaaattaataattattttcatgtgcactttttttaagtaatatattctttaatatatacatacctaaaaaccctataacaacaccaaaatttaaaatagattatttaatttatgttcggaaaactatccaaaaatagttttcgatatccaagtttcgttatttatttttgcttttgtcgctgttttacatactttttgcttatacaaatgtttcaccgtaatagtcaacccatgtattattattcaaaataaaataagctatgtttcattgagagattatacgattctgttatcagagccaaatatatttcgttataaaaatatgcgtctgtctagtttttataaaaatttgctagttgaataggtaaatgcaagtgtggaaggcttcgtcacaattcgattaactctcagtacttaatgagggaatgcacttttccatccagccttttgcgaccctccagtccaactagttccatgaccaccaggctctccacgacaacgccacccaccttgccgatgagttcagtggcggccaccagggaaccacctgtggctagtagatcgtcaacgacaacgactttttggccgggcttgatggcggatttttgcagctcaaaggtgtcctgggataattaagttgaaagcataaacatctttgtgcttgggaatagtaagtaatatatttgggagtactcacaataccgtactccagtttgtattccacggaaaccacttctcccgccagcttgcccttcttgcgaatcggagcacatcccaggcccagctcggtggctatgaggagattaaagaggaagccccgcgagtccagtcccacgatgacctccgcctcgggagcactttcccggatgtgatcaacaagcaaatcgcgcaagtacacacatgccttcggatcggtgagggctccgaatatgtcactgatgtttaatatgaaaacaaatgattttacacattaacaacctgataagggtccatttgctcgcccataatcatcatcgcagcactattagtgctccaatctaataacctcgagtgacgataactcaccggaacagaatgccctcctttgggaagttcggatactcgccaatcttgctctttacatagtctagcttgtcttccgcgctgattgaggggctcatttttctacttttatgtttatttatttattaacttagttataagggactttttacatgggttttctgactgtagcgctacgtgagtgcgtgcccaactgcggattgccgtacggaacagctgataagtcagctgatatcggggaaggtggttgctatagatgggagatatgccacacgatgaacggtcgtgttgagttcgctgcgcggtcgatttgaaattgaggtggataaggtgctgtggggacttttaaacgctttgaaaatataaattcggaaaaaattaatataatgccaaatcgtcggtatttcactattgaaagcaatcaatataatttatgggttttgatttagttaactacaaccactcttctctttatgatatatattgatgatatgatatttcgtatattttctgtgtatttccacatttatcttagagttctaatgtcggctagctatttcaaaaccaaacatttggtttgacatttgcttgcacaaagaaagcagttcaatgaatgcggcaaacatcctgcaggtagacaagaggcattaagaaacctcccccgacttttctctgggtctttctccagatctcgaggctatcagatagataagtggagaaatctcagtaattctttgagggaaagacattgaatgcagcactgtttatcgagctaaatgattgaaaagaaatgccaacaattttcgctgcacttatcaaaggcgggccaagatcgggaactctcacctggactccatctctctctctctctcttgttccctctttctctcggtggcccactcacacaggcacgcaagtgaatgtgagtatctgtgtgtctgtatcttagactcccaatgccaagaaagattcagttcgtttctcagcgccgaacgcgacggttcagttttattggtttcttcggaagaagcggatcgaattcgaattccttgcccgcgatttttaataattaatgcaaactcgcgaacaatagtagtaaattaaaataacaacaatagtccggaggaacagctaaaaccgaaacctgttctcgaccaacgtaagcagcga

SEQ ID NO: 27389 - DNA, 621 bp, DROSOPHILA
tacagtcagaaaacccatgtaaaaagtcccttataactaagttaataaataaataaacataaaagtagaaaaatgagcccctcaatcagcgcggaagacaagctagactatgtaaagagcaagattggcgagtatccgaacttcccaaaggagggcattctgttccgtgacatattcggagccctcaccgatccgaaggcatgtgtgtacttgcgcgatttgcttgttgatcacatccgggaaagtgctcccgaggcggaggtcatcgtgggactggactcgcggggcttcctctttaatctcctcatagccaccgagctgggcctgggatgtgctccgattcgcaagaagggcaagctggcgggagaagtggtttccgtggaatacaaactggagtacggtattgacacctttgagctgcaaaaatccgccatcaagcccggccaaaaagtcgttgtcgttgacgatctactagccacaggtggttccctggtggccgccactgaactcatcggcaaggtgggtggcgttgtcgtggagagcctggtggtcatggaactagttggactggagggtcgcaaaaggctggatggaaaagtgcattccctcattaagtactga

SEQ ID NO: 27390 - protein, 182 aa, DROSOPHILA
MSPSISAEDKLDYVKSKIGEYPNFPKEGILFRDIFGALTDPKACVYLRDLLVDHIRESAPEAEVIVGLDSRGFLFNLLIATELGLGCAPIRKKGKLAGEVVSVEYKLEYGIDTFELQKSAIKPGQKVVVVDDLLATGGSLVAATELIGKVGGVVVESLVVMELVGLEGRKRLDGKVHSLIKY

SEQ ID NO: 27391 - DNA, 2741 bp, DROSOPHILA
tctccagaagtttgtagtttggtgtttgaattttaaattccgcgatgagtcttgctttaagggtaggccaatcttcgatgttcggaagtcccaaagatcgtgtaatttgtccgtccaagttcctttcgatggctcccagtagaatcctctgttgtcggacatcatttgtttggtagagcgaaattacgtaatccactctgctgataaaggtgtgaagggtttctggatcacccttgaatggcaataatgtctttaagctgccgacgggcttcggcaaggtttatgtcgctcagcgcaataattggttgtgacatttttattgtaaaatttttaacttttgtgttttattttttttgttttgtttcggattcaatgttattattatttttaagctttctagtttcacttggttgtgtttttttgttttgtaaatttttgtgttgtattattaaaattctatattgttttaatttttttatttttatatgttggttttaaaacttagttgcctttggacttaatatttttgtttcggtatttcacttccacttattattggataaccgaattggaattataatccaagttgaagagttttcacgaatttattttgggagatgtttcgagcactggactataaaatttaacttattttccactcgaaggttctttttttttcggatacttttgtatcctaccgactgcgccagtaaaattgttgttttatttatgagtcgaactaatgtcccgtcagttgactaaggacaacgccaagaaataaaaaatagtttttaggagaaatagtttcacgactttattctttggatctcagcttaagactaaaaatcaaatgcaaattggattgaggagaagcctcagtatttgaacaatatttgtatttcgggagagcctcgctcttgggttcttaagattaggtagcgttgaaagagggcagtcaaatctgcttaggtcaggctttaggatgtttacaagaacggctgcgctgccaaagataaacgaatgctgcgcagctgggatacgttatggaaaattactagagtgcattactgatttctttgaaataatggaagtggctggtttggaccacccaaatacgtcactatatattagtgggatggacgcagttttaataggcaatttaatatgcgtttttttatgaggtagttatattatatttcttgcctaacttcgtcgttattaaaaaaggtaactaggatagaatagcatttaatgaatcgtctaatgctatgtcttcatctgtgggtctcgtcggaggagtcggctccactcgcaactgctccattttcgtgtagaactttgggcacttttgaagaaccttggagtattccgtgaatatttgaaaggacgccctttggagcagcgtttctcccatatgattggaggccagtatttttgccaagttcttgtagtcccgctgcataaggcaatcccgggccagtcgtagtttctcgtacgcagtggatcgtcgaacgctgaagtaaaactcgttactggccggaggagcacaggatgggttttggttcacccaaaagccatcttcgggactggtggcgatctcaagcgtgcgtttcaaaacatttgcgggtatccttctggctggaaaattctcaccctttattttacgcggtgcagttttcaaaggcgatggcttctcatcttttgttttcattttatatggcgaaagcgaacataaatgcgtcgcgaacacaatgcgtcgtgctaacagtgataggcaatgttaacctgtttcacaccaatatcgataggcagtgctgcccgctgagctatcgattacccgcagccaatcgatgttttgattcgtccgatatcccaaaaagcaatattttccgcatgcaaccaaaagcgaaataataaaatgttgcctgtgtaattgtacttccgaagttttgtcgatttgaatagtctctcaggcgtcgaaggaaccccatttgtccaaaaggacgccgtttgtcggagaaatctacttcgcagccggaaaattcacaggaagtctatttgccttgagttcgcaagttgccaatttcttgacgaccccagtgcaaaagtcgcaaaaatattacgaatatttgctggtaatcatttcaagggtacgtatcgaaatacaaactgcaatcccttcccttaaaggaaaagccagcaatcaataaccgatctccacgcccaggactaagcaaagccggtgcgacgaaagcagggcaggatcaggagagcaggagcggagtggagatcctgctggcagcaggggccctaagctatgagtgcggccaagaagtacaagcccatggacacaactgagctgcacgagaacacagagaatattgccgcctgcctgaagaaggccgagaacgtcgcccccaccgctgctgccgcctcgagcgtgggccgcagtgccttcgctgcccaaaacatgaattctgcgtccaccaacggcgagcgcctgccaaacttctccaagctaggcggcagccatggcgagatccgcacggcttcaactacctcaaatctcctcaatcgcatgggggctattcacaacagcaagcctggcgatgtcaagaagatagtgattaagaactttaagggtaggtcccgtctagatctcaactgtttgtatactgcatgattcaacttccttccttccttccttagataagcctacactgcccgataactattccaag

SEQ ID NO: 27392 - DNA, 741 bp, DROSOPHILA
acgcatttatgttcgctttcgccatataaaatgaaaacaaaagatgagaagccatcgcctttgaaaactgcaccgcgtaaaataaagggtgagaattttccagccagaaggatacccgcaaatgttttgaaacgcacgcttgagatcgccaccagtcccgaagatggcttttgggtgaaccaaaacccatcctgtgctcctccggccagtaacgagttttacttcagcgttcgacgatccactgcgtacgagaaactacgactggcccgggattgccttatgcagcgggactacaagaacttggcaaaaatactggcctccaatcatatgggagaaacgctgctccaaagggcgtcctttcaaatattcacggaatactccaaggttcttcaaaagtgcccaaagttctacacgaaaatggagcagttgcgagtggagccgactcctccgacgagacccacagatgaagacatagcattagacgattcattaaatgctattctatcctagttaccttttttaataacgacgaagttaggcaagaaatataatataactacctcataaaaaaacgcatattaaattgcctattaaaactgcgtccatcccactaatatatagtgacgtatttgggtggtccaaaccagccacttccattatttcaaagaaatcagtaatgcactctagtaattttccataacgtatcccagctgcgcagcattcgtttatctttggcagcgc

SEQ ID NO: 27393 - protein, 159 aa, DROSOPHILA
MKTKDEKPSPLKTAPRKIKGENFPARRIPANVLKRTLEIATSPEDGFWVNQNPSCAPPASNEFYFSVRRSTAYEKLRLARDCLMQRDYKNLAKILASNHMGETLLQRASFQIFTEYSKVLQKCPKFYTKMEQLRVEPTPPTRPTDEDIALDDSLNAILS

SEQ ID NO: 27394 - DNA, 9262 bp, DROSOPHILA
gcatgtaacatcattatttagctaaaaataacttaaaatcctcaaacacatttagtttcactcatggtgactccgtcatatattgtttaatcgcactcattgttatatgtcatttgtttaatcggagtcaccgttaccaagcactattatcggaaagtatagaagtgcgatatataaacaaatgcgttcggtttaaagtggggagtgtactatgtccaactaatattaacaccattgatattagcagattaggctggaataacgttcagaatgctctgaacttgtgttagccgagtccaaaacatactgattcgttatcggagcgacacgcttgactttccccatccgaaatccagtgtccatatcagttggtatatagcttatgtatgtacattctgaacgaaatacacatgcattcagttctgataatgaatgccagcggccctagtcgagtatatgttcggttcgtggagtaacaatccactcagtgtcgaccggcatttgcgttgaaaaggtgtgttctgttctcggagagattaaaatagcgaattcagagtgttttttttgggtaagccagctgttttctgtgcaccgactggatatgcttatttatggtgcaattaggttgcgccatttagtgaacaaccagttgttttcgttggaaacgagtattactcttttgcagttgtgccaaaataaataagtgtttgaaaaactgttacgtgtttgcatagtttaagtttaccgctatggaaagttacagactgaacgacattagcaaacactggattagcagtgacatgaaccaagattaacttaacacttactattgttttacaaataaaacgaaaacttaaatgtttacgccaatagactgtagttacatcccgataatttttaaagaaccactttaaactttattattgtcgaaatttacgactgtagctcgtcttatattaggcgccctttggcactttttagctacaaattcgaagcccagcgcggtcacactggcagcaagtttcgcattcagatccgatccaaatcttgaaatatacaagttttgttgtcgcggtgaacggttgtcaaagcgcgtcaactgcatgcgtttatatcttttttcttcctgctgacggtaccgaaaagtacacataattttaacaacaaacagaagacgcacaaccgaaacaacggtagatgcgtaacgaacgaaagtgaaagagtgtcagtgttgtttacatttgccgtgccacccgctcccgctcacgacccctttccctttctcctgaaacgcagaaccagaaccagaaaccgaaagtccaattgggatcttcacatcacaaccggaaagtcaacaacaacaacccgagcagctccaatccgaatccgagtccgacagaatggccaattttgacgatgtgagtgtccaattaggcaatttattgcgagcgagagaaagagatgtgtaacgattattaactttaactgacacatatgttgttaaatgtatgaacgaaacacacacagacgaactccgtgcacgtaacgaacattaagcgccttattttagtttgattttgatttgatttttatttgaatttttcgccgcttcgtcgttatcctcccgtctgtatgcgtgttgcatgttgctattgctattgcgtatgtgaaatcgcaactgcctcctacgaacaaccatgacaacaactacaacatctacaacaacgttggtcggactggaaactccaattgggatggctaacgaaaacaacaaaaacaacaacaacgaccagacgttgcaacgcgcccgccttgccttttccagtggaaagaccaggaatgtcagctttcggtgagtttacttttatttcggcactttattcgcttgctgtcagttaattttttgcaaaggctcctcgtcttggccaacatattgcgttaaaactgccgcttgagtggagattgtgtcatatatttcgctgattacattggttgggaggatctggaaagtggaagtgggttaacttccagcaagcgggactggaattaaaatcgccgtggaagttatttgaaatcttcacatcttcattctattccgcttttgttttgaatttcattgatttgtgatttaattttttttttaatttatttaactcgatgcggagttttgtataatttgacatttatctcttctttggctttagatgacttcttttaatcgcatagtttgattttaatatccacttggaaggtacatatatttttatcatttgtagtaatgggcaatattttaacattttaatatatgtacattattttccatgcggcttggaggtaggattaagatttcaggcattaagtccccacaccgagcttttatgcgaagtgatttcccaatccgctggccaccgtatctctgtttgcttttatgactggggggccattacaaagccattgcggcagggcagtcagcgaactaactatgtacgtacatacatacgatctcggctcggggggcataataacttttcatggctattgttgcattggggccaacgaaaggcggagatctcaatccgatcccaccgactttcacacgcaatgcaagctttgacctttgagccacacgccctcgagcttttcacgccgccgtagtacatgcgtgataagaaccaaagatagtggagcagagatgctaaagtctagttgtattccgttccgatatgcattaatgagcccgcggcggaactttgactccgtcaagtggttgtactttgaatgcaattagacggcggcggacggaattgtggcatgtaaccggaataattgccatttccacgtcccgaccgaccgaagcagcactcatccgccaatgggcatgatcgcgaactcatacctcatatacgtttatggatatgctaatggacaaagaggccgagggaaatagagacggagcagagaccgacgaaaacaggcgatatacccatacccgccgatatctcggtattttgagtgcgaagtgtgaaacggaagtgcggaggaatctcagcccaaggctgctggccgctggccgtttggttccatgatctttcaaatagatccggacaaacgaacacgttctatcgccgtctgcgcctccggctacttctactccactaatataatcagctagctattcaaatagatttgccgaacaagaaccacagaaaatcttacgacttgaaaagttggtttgtatggtatgatgtacatatgtacaactgttggactttgattgaccaagttcgatcgatgtattgactcaattaaagcaataatttcaagcttatagatacttattgaaagagacgatccattagaaacggcaattcaatacacacaatttccataagccattactttaaacgtttaagcatcgtaatagttttagaacgtgaatgtgaagtacatacttacttacttacttgatattaaaagtccaatgactctgctcaataaattaggcattgcgcttaatgaaagcacttttacattcaaagatccctggggtcaattgtatgcaacaaacataaaagtgcgctaaattagcgtaggcagggggattcgaaaggttcatctgcatggtcggttatggattgttgtaactttggaggacttaggtcatagccaagctgccctgtagttggaaaacgagacactatattggtcgccgagcggctaattgctttatttatattcacgacgatcggcgatcggttgtccgcttatggctttatgtttgtcatgagcaaataaaataattcaattaaattgcaagtgcaccccgaggggctgttcacctgctgctgcggatcaccttgactcgctcgcgcctccgcccactgctcctcctccagtgaggcataatcattggattgggtcaaattggagcatcgcagcgggctgtcaagccggtttgcatggttctaatccacaggagcttcaagctggtgctgtagttgagtcatgccagttggagcatcagaatcgtggagcaatcgtggaatctcataaccggccgtatagctagcattgaccttccccaagcgcctctcgtgcattgtgattagtattgattttgttttggtctttgtttcgcgctcctaccgcggaacttgtcccatcatcatcatcatcatcatcatcatcatcaccatcatcagcatttgtccattaattattgctcatttttggatttcgttttccgctctttttcagacgcaagcagctggagaatttgctgcgttgctatgaggagcacgagaacgagatcatcagcgccttggaggcggatctgcgacgtcccaagcaggagagcctcatcgtggaaacggaattcatgaagaacgacatcaggcacatcctattccagctcgacgagtgggtgcagtcggagaaggtgagccattacccccccccccccccctatacattgttgtgctcaatctctttaatgcttcgctttctggctttctgccctgctagccgcccaagtcgtttgtgaacatgatggacgacgtccagatctacaatgaccccttcggagtggttctggtgatcggcgcctggaactacccgctgcagctgctgctcgtgccagtggcttccgccatcgccgccggaaactgtgtggtgatcaagcccagcgagattgccgccaactgcgccaagttcattgccgatgtcattccaaaatatttggataatgtgagtcttgcctctgctctgtgctctgtgctctgtggtctgaatcatctgatgaaatcagctgctgatcttcaagcaccgcatcgttttgacataaagtaggggtctcacattaacctgtttccacggaattctataaaatttgcatttagttaagaatttgttgaatgctcagctgtgaccgaaacgcacggactggaaatattttgggtcaggagggggtttacaaattgttttgaacagatcacaatgttcacaagatgtatatcgtttgcaaagttcaagtttccctcggccactgaatgattttccctcctccaggattgctatccagttgtctgcggtggacccagcgaaacggcggagctgctcaaccagcgtttcgactacatcttctacacgggctccacgcgcgtaggcaagattatccacgccgcggccaacaagtacttgacccccaccaccttggagctgggtggcaaaaggtgagcacgctttgatcccccttaatttggagctaactaaccggtcggatgtgttactttcagcccctgctacattgacaaatctgtggacatgcgcactgcggtcaagcgcatcctgtggggcaagctgattaactgcggacagacctgcatcgctccggactacatcctctgctccaaggaggtgcaggagaagttcatcgtggaggccaaggacgtgctgaaggaatggtacggcgagaatatccagagcagtccggatctaagccgtgtgatcaacgccaacaacttccagtgggttaaacgagtcattcaaaagtgatatgattgcttaaatgtgttctatcctaggcgccttcttggcctaatgaagtccggccgcgtggccgtcggaggtaactacgatgccagcgagcgtttcatcgaacccaccatcttggtggacgtgaaggagaccgatcccatcatggaggaggagatcttcggccccatcttgcccatcttcaatgtggagagtgcctacgatgccatcaagttcatcaatgccaggtatgccagtctgtggcccaatcaaagaccaagatgtcccttgtcgttgccccccttaccatttactcaccatttatacacgaaaccaagctacaacaacaaacaatgtccgattcgcaatgtttttctcttagagagagtccacttgtcctgtacattttcacgccgacagcagaggttcagaatctgttcataaacggcacccagtcgggcggactgtgcgtgaacgacacgataatgcactatgccggtaagaatcccacctcggtcaaccctaaagtcgctccaatcgagatgctaatggctgtggattatgataataagtgcggccactcggcgtgtagtccgttgcttgcttctctactcgtctacggttttggcttctcccgatctcccgatctcccgatctccaatccccccggttgaacctgtttctgatagcttgctaagtgctaagtgcatacctgtaatttatagagtcttgtttggtgacggtgattataattattcttgtacagctccgtctagtagatgaactaagatcgcaggtcgcgtggattttaagtacctaaacctcatacactacacacattacccattcatctgtatatatgtcatagatgtttgcagatctgtttgcatatctattggttaaagctgtatctcaaaagttcgatattgtgtggcacagatctgcaaatgctcgcatgtttgtctttcccatgttacctttgttctttcgaagccctcaacgatgtccgaggaagttgagcttcagctagagctacgtacttaatcagaatatccgttctccgtaaatagagaaaagccgcttgtaatttacgtgttctccaactcgaataagctagttaaggagttcaggcggagcaccaccagcggcggattctccagcaacgaaaccataatgcactgtggaggtattttgctatgataatgtacatatatacctagatttagtcacacatcgcaatgagtcttgtgtagtgcacccgaattcaaagttacaccctttgtacacgaatcttagcgcactccagcaatccgaatttgaaatgcaaattccgggcattctaggcacttgaccgcatcgagaatccggataaacacagctgaatatccatacgtaaaagcaaagctttcgagcgatcacatactatgcacattgttttaaattttaatttgacggagtgttgaaattcacatgtacataaatacacgtatattattggcttttagagattttgtttagcacttaagcgcttgattgagtatggccaaaagtaaattaacaataagatggttataatattgctggtgatagaaaataataatgggtgtggctaaacataagttacttatttcgacttttatgtggtattctatcaaatcgaatgagaatgcttgttatttgcaaaacccgcaagttgttttttcttaactactaaccatttgcaaataacaatatattcctggtggttggctagtcgcacttattattcccccgtttcgcagttgatgtgctgcccttcggaggcgtcggcatgagcggcatgggcagatatcatggaaagtacggcttcgagaccttcacgcacaagaaatcttgcctgggcaaggacttatccccgttgggcgagaagttgtcatcgtaagtaatcgagttactcaatgaattcgtgtgattgatggctctactcccctgcagagctcggtacccaccctactcggaccgcaagggatcgctgctctcgttcctgctgcgcaagcgccgtccgctgcccaacctgcatctgagccacgtgctggccatcggactgggagtcggattgacggtgctgaccaactactacctacaggtaaggaaggtatagcaagccagctgcagtcgctccgtggtgcgcattaaaacgagaatttcttccatgcatccacgtcactgggaaacacacgcaatacactcaatacatgacactaccatcattcctcaaatacacattacccgccgcttgtacacaattgcagggcaagctgttgtcgaagtagaaactacatatgatgcgagccggagctgggtgagcctgcgccagaggattcccaatcaaccaaccacttaatattgtaattgtttgcaataaatgtttaggcgtaggcataactaacttcattgcacattcagacaactcacataatagaaactactgggccatctggtgttgtattttacactgcaatatgaaattatatatatttgaaatcgtcgacaaacgcctgcaattttgtactttcagaaaagctcaactgattaatgggccgagaacttttttctttttatacgcatatcggtgggtgatgtgaagctttggatacttcgatatacatatagttattgttatttagttgctatttaatacaaatgtgaatgctgtaatgtaatgtacgacaaataaacagtcaaaaatgaacaattgatttttaaatttgaaattcgggtggagcggtgtgaccagcgctgacggaaaacggtcgcttttcaacactactggcggctttacgatctcccgaggtgtgtacacactggccggcacaggcaacttctcttgttggtcacactggtgtgcgttttttgtcaatcatttgctgctgaaaataaattaaaaacacaggtaaaatggccgcgcgcggcgatttgattgcacagttcattgagatcaccggaaccgacgagaacgtggccaggttctacctgtccagctgcgactgggacatcgaggtgagctttcgcccaaccggcgacaacaatgatgcagcaaaagcacaaagttctaaagcattcaataattgtgcgaactatacggcttcagcacgcgctgggcaactactggagcacccaggcggacctgccggttccggtgccgacggtgggccacgcggacaaccccaaaccaaagccgacatcgagcagcggagcaagtgcatcggcatccgctgctggggccaccaagagtgcggactcagccgtcgctacctcgtcagcttcggtggacatcgccccggcagcgaccaaggccaagccaaagtaagcgataagagttgcaaggttcgcgataaatagtaatatatttcctctccagattcgcaacgcttagcgacatgtcgaaggagtcgtctagtgacgatgaccagcaggccttctatgccggcggctcagatcgctccggtcagcaagtgctgggcccgcccaagcgcaagaacttccgggagcagctcaccgacatgatgcgttctgcgcaggagcaaaacatcgcagaggtggggccatcaaccagcagcggcagtgccagcggaggatctggcggtgccgtctggggccaaggcatgcggctgggcatgaccgataatgaccacacggctgtgggcaccaaaaaaccggctgcgaccatcgaaaacaagccggtggtggt

SEQ ID NO: 27395 - DNA, 2504 bp, DROSOPHILA
cgcggtcacactggcagcaagtttcgcattcagatccgatccaaatcttgaaatatacaagttttgttgtcgcggtgaacggttgtcaaagcgcgtcaactgcatgcgtttatatcttttttcttcctgctgacggtaccgaaaagtacacataattttaacaacaaacagaagacgcacaaccgaaacaacggtagatgcgtaacgaacgaaagtgaaagagtgtcagtgttgtttacatttgccgtgccacccgctcccgctcacgacccctttccctttctcctgaaacgcagaaccagaaccagaaaccgaaagtccaattgggatcttcacatcacaaccggaaagtcaacaacaacaacccgagcagctccaatccgaatccgagtccgacagaatggccaattttgacgatacgttgcaacgcgcccgccttgccttttccagtggaaagaccaggaatgtcagctttcgacgcaagcagctggagaatttgctgcgttgctatgaggagcacgagaacgagatcatcagcgccttggaggcggatctgcgacgtcccaagcaggagagcctcatcgtggaaacggaattcatgaagaacgacatcaggcacatcctattccagctcgacgagtgggtgcagtcggagaagccgcccaagtcgtttgtgaacatgatggacgacgtccagatctacaatgaccccttcggagtggttctggtgatcggcgcctggaactacccgctgcagctgctgctcgtgccagtggcttccgccatcgccgccggaaactgtgtggtgatcaagcccagcgagattgccgccaactgcgccaagttcattgccgatgtcattccaaaatatttggataatgattgctatccagttgtctgcggtggacccagcgaaacggcggagctgctcaaccagcgtttcgactacatcttctacacgggctccacgcgcgtaggcaagattatccacgccgcggccaacaagtacttgacccccaccaccttggagctgggtggcaaaagcccctgctacattgacaaatctgtggacatgcgcactgcggtcaagcgcatcctgtggggcaagctgattaactgcggacagacctgcatcgctccggactacatcctctgctccaaggaggtgcaggagaagttcatcgtggaggccaaggacgtgctgaaggaatggtacggcgagaatatccagagcagtccggatctaagccgtgtgatcaacgccaacaacttccagcgccttcttggcctaatgaagtccggccgcgtggccgtcggaggtaactacgatgccagcgagcgtttcatcgaacccaccatcttggtggacgtgaaggagaccgatcccatcatggaggaggagatcttcggccccatcttgcccatcttcaatgtggagagtgcctacgatgccatcaagttcatcaatgccagagagagtccacttgtcctgtacattttcacgccgacagcagaggttcagaatctgttcataaacggcacccagtcgggcggactgtgcgtgaacgacacgataatgcactatgccggtaagaatcccacctcggtcaaccctaaagtcgctccaatcgagatgctaatggctgtggattatgataataaagaaaagccgcttgtaatttacgtgttctccaactcgaataagctagttaaggagttcaggcggagcaccaccagcggcggattctccagcaacgaaaccataatgcactgtggagttgatgtgctgcccttcggaggcgtcggcatgagcggcatgggcagatatcatggaaagtacggcttcgagaccttcacgcacaagaaatcttgcctgggcaaggacttatccccgttgggcgagaagttgtcatcagctcggtacccaccctactcggaccgcaagggatcgctgctctcgttcctgctgcgcaagcgccgtccgctgcccaacctgcatctgagccacgtgctggccatcggactgggagtcggattgacggtgctgaccaactactacctacagggcaagctgttgtcgaagtagaaactacatatgatgcgagccggagctgggtgagcctgcgccagaggattcccaatcaaccaaccacttaatattgtaattgtttgcaataaatgtttaggcgtaggcataactaacttcattgcacattcagacaactcacataatagaaactactgggccatctggtgttgtattttacactgcaatatgaaattatatatatttgaaatcgtcgacaaacgcctgcaattttgtactttcagaaaagctcaactgattaatgggccgagaacttttttctttttatacgcatatcggtgggtgatgtgaagctttggatacttcgatatacatatagttattgttatttagttgctatttaatacaaatgtgaatgctgtaatgtaatgtacgacaaataaacagtcaaaaatga

SEQ ID NO: 27396 - protein, 561 aa, DROSOPHILA; identical to SEQ ID NO: 23268

SEQ ID NO: 27397 - DNA, 5360 bp, DROSOPHILA
ttaattaattactttaaaacattagggacttagattggcatttatacaaatcaaagtagctcttttcgtacttgtaattcaaaacctttttctgttcttttttataccatactatcactttaaagtggttttaaccaaaatgcatacatttcgttttttgtttttcgttttccttgtctgcgtccgctctttgtttttttaaccaaagtaaatctgactcagggaagtcactcaaaacatgtttgcctgagctctcgtattccaaatggaactccgggaaaaatatatgctcgtatacactcaaaagtggctcaaaactgtatctattcgtattttgatatacacaataataaaactgctcgaagaactccaatctgttacacaatgcctggtcattgtttacatttagcttacttgtgtgcttatatgcacctatacacatactatgtgtgtagataaaggatggcttatcttatcactgacgaaacagcggagcatgcaagaatgctgtttgtctttgtacattggcttcgattaagtagtcaaaaaggaaaacggtaaacggcatgcatagctttgcctccgcactctctaatctctagggtcggacgttatgacctgtcctgctttgataaatcttttctatatttcgtttatttcgcatacttccctacttatttcaaatgcactaatgcgaaaaacattattttttcaaatcaaacggtcaagtgtgcttctaatgaaatctccgaaaaggtctatactcctcatacatttctgcagtcggcaaaaaaggaggcacatactcgtagaaatttttcatcgctgtgtatatggatttgtaaatggtataaaaagcatgtatcagtatcagtgtcagttctcttcccgctgctctcattgggctctctgggttgagcagttttcgagcctctcgagttcgagttcaccgagttcgagtcgcggcggttcgcccactcagtttgcccacagctctgaatgcgagcgtaacgatcgcaagccgcctgtcttacagtgaagtgcattttctcaagccgcttccttgatttgtatttggttggacaacagcctataacttgaacccgtctttaatgcccgtatctctgtgagagtgagtttccaatggcgatttggcgagtgcgcgtgtgcagggcaccccttcctgtgttgtcgtccggagaggattcgcgttgagtggaacagccgtataagagtggttgggctagcggatttaaaggaatgtgggtgctgtgcctttaagttaggactccttgtgactcgggatacgagagaagaggctggatcgcgagatatttctaaaaatatatggcaatgaatggggatatacaaaatgtatctgcacgaaaactcatatgctcgccagatgtttagcttgagtaaaaacttccttagaatttccgtttttattatttctgttttattatttcaggttttaatcagagcttctttcccttaatgtaatttcatgtgtgtatttgcgcaatgttcgggctccaattaacagtgctctacaagtttttctgtttttcagtttctgtttttttccccttttcgtttttaataaaaacattttgaagtttgattacactctttcctatatctttcgattctattacctttatatattggcctagacgcgaggtttcatccacttgagagtgaactattagatttcttatattaagttgatgtcttgcgaatttgatactctccttcggtgcctcagacacagaagtcgaggacgaagctttaaaaaacacacgacccgaacaactagacatactttcgaaaactggtgattgccgttttttgcataagaacgctttttgttgtttcgtcaaattggaaaaatattggtttttctttaggtgggctttagacttcgctttttcgtttgcaataaatatttttttaagacgtctgcgtctgttctttgtgctgtaattaatgtagttaatcggggtgcgcaacaagatgtgataacctgctttcgtctgaaaaatctcagatagttcgccatctttcagcaacaaaatgtttctctcaaagacgaaaggcgtttgtgtaagactcaaggggcccaagtcaccgccatgccgggcagagcagcaatcggagatcatatttgccaattcagcaaactcaaatttgcctgattgaattagatccctcgcatgcatgatcttatttagcgcttcctgcttagttctccttaccatccgttcgcgatatgaactacacctgtccgattcgctgtgcttcaccaggatgtgtctgcagcggagctggtcattgaagtcagagtagtctccaagaatggcgccccaggcattcctatccttttctcggtggtggcttggaggcagtgtgaagtgtacctttctggtaattgtgtcgtagaaatagcactccttggtactgtgagctatgcgctcttcccatccaaagggcagcttgtttggcctttcggaagtacgttcttcagttaggttcgatagcccactgtccccatcaccataggaggcgcttttcacgttaacactcgaatatacgcttttagagctcgcgtcaaagcaaccccaagagtggtcacaaatctgatctccatttttgccatcttcttttttaaatatatcaaacttgcatagcgccggattcttggagttcatttttgcacaaactagacggtgtaggtatttatgtgacaagtgtaggtactgaataggttactgctttgaaccaaagtcttaaagaaaaataaagcaatgcattcttgtttgttttacagctcggctttaaagcatatatttttaattatattttattttcatgactttattgtttttaggtttccgaaatagttatgaatcttatactggctttaaccacggctctgcacctagttttggtggtattggcgcacaatccgctatcaactcgtggcgaaagcctttctgatggcatacgtctggtcatggaaaagaggtcgggcgatgtggtacacattcgtccagctcggggcacactggaggccgaaacagtcgcatccacaacaaatagtgacacccaccgcaccaggaacaatcgtaagccgaacaagcctcaagagcactctcagcaggttggggcccacaagtcgggatctagaaaactagtggttgcggaaaatggcggggcactgtcatcacaactaccacaaccaaatcacaagcaaggccacaagaacactgataagcaacaacgaggagggggatccaagcagcagcgaggacatagccaacatcatggaggaaataggaaagggcctaaggcagcgactccagagaatggtaagccttaggactgccacgtcagaattcaaatagtttttaaatgcaaagtcttatatttgcttgttaacaggatcgacttgccgatacgcaaagagcgcttggtccaattgtgatcacaagaccaacatgcgttcacgagtcctgtccctaaggaaaggagagcaaaactgcttgcccacgcggaccatacaaaagaagtgcaagaaaggtgcgcgcggtaacttctatatgtatcataatcctacacagcgcctccccaaaaggggaacgtagtagaatcgggcattcccataaaagagcaaggcggtgtcattgccggcttaatgggtccaaaggtcacaaaatgcaaaaatcactcttgttgacccatatacaagaatgcttccttctggggaggattgtgctctcttcgacccacttcgaggttctccccgccacagcttcgtttcgtttcctaggaaatactgcagttcctgttcctaacaatgcagcgagtgcatccttcataatagcaaatactttccaaaattaatttgaaattttgcgtacttccttcggtaggctgccgctatgaaaagggtgaatggtctcaatgcgtcggaggacaaataaccagagaggataagttggaaccagaggcaactggcggtagtgatcaaaactgcaatcctgtgcgtaccgtcagcaagaagtgtaaagcaaatggcaattccagtggaggaaaacaacacggccagagtcgtcgaacaaaagagcaaaagcaaaaggataagggtaaaagtggtgaatttgacccctttgtgaaaagtttgatccaaattctctgtttacaggagccagtcacatttcgtcttgataatgaaaattatttattttatacgtatacggaagcaacatttttaatattaaataagcgatttttaaatgctagcccgtacggactacttgaacaacaataaagaattggccttcttagggctaaatgaaagcactcttttagaaattcttgaaacaaggctttcacaaaccccaataccgcgaaaacctgcacaaaatgagacctgttattgagtaatcaaagagcattgatagaactgttagttggctctgagtttttatttaatattagacgcgacagtaaaataaccgtctgcgacaaaatttaattaacattacacaaaagaaaacgttacctctaactcggcttggtaatataaagatgttaaatttaatagtgtttctttacttaactgcaagccccctttaaattgatcgatctttcgaggcaaatcttcaagttaccaatgtctttaatagccattgaaagggtgttatgtggctggcccaagatttgccgcaaacttattgtaacgtcgcggtcgctgacctccggcttgcggcgggcactggtcaagcagccccgtaaaggcggagatgttggaaaacccggaatggagcttgggcgctgttcgtgctttggactccgtgtgaacctcagcaatgcatccgtcgtatacgttggccaccgacgctactcgacgtacgagaagacgtctacgcaaattttaacgaagctctttccacaaacctctgaggagtccaacgacgaggaaagtcgtgagcggcggaaacttgaggaggaggaggagcagaaggaattggagcgggcatttaggcggatgaaactgggctttgggcttttcggcataggtagcatgttgttctcgttttgggctatatatttctatggaaggccgtccttggatgagcacggaaatgaagtaatcgacgaatttagttgtctgccacagatgcagcagcttatgtggcggacatggaagtcggtgaaccgctttcaacggtttttcaaagagccgtcgagaaaaaagctgcttcctgatccccttcagcccccctacgtgcagccgccgtatactttggtacttgagattaaggatgtgctggtacatcccgattggacctacg

SEQ ID NO: 27398 - DNA, 1117 bp, DROSOPHILA
tgcgagcgtaacgatcgcaagccgcctgtcttacagtgaagtgcattttctcaagccgcttccttgatttgtatttggttggacaacagcctataacttgaacccgtctttaatgcccgtatctctgtgagagtttccgaaatagttatgaatcttatactggctttaaccacggctctgcacctagttttggtggtattggcgcacaatccgctatcaactcgtggcgaaagcctttctgatggcatacgtctggtcatggaaaagaggtcgggcgatgtggtacacattcgtccagctcggggcacactggaggccgaaacagtcgcatccacaacaaatagtgacacccaccgcaccaggaacaatcgtaagccgaacaagcctcaagagcactctcagcaggttggggcccacaagtcgggatctagaaaactagtggttgcggaaaatggcggggcactgtcatcacaactaccacaaccaaatcacaagcaaggccacaagaacactgataagcaacaacgaggagggggatccaagcagcagcgaggacatagccaacatcatggaggaaataggaaagggcctaaggcagcgactccagagaatggatcgacttgccgatacgcaaagagcgcttggtccaattgtgatcacaagaccaacatgcgttcacgagtcctgtccctaaggaaaggagagcaaaactgcttgcccacgcggaccatacaaaagaagtgcaagaaaggctgccgctatgaaaagggtgaatggtctcaatgcgtcggaggacaaataaccagagaggataagttggaaccagaggcaactggcggtagtgatcaaaactgcaatcctgtgcgtaccgtcagcaagaagtgtaaagcaaatggcaattccagtggaggaaaacaacacggccagagtcgtcgaacaaaagagcaaaagcaaaaggataagggagccagtcacatttcgtcttgataatgaaaattatttattttatacgtatacggaagcaacatttttaatattaaataagcgatttttaaatgctagcccgtacggactacttgaacaacaataaagaattggccttcttagggctaaatga

SEQ ID NO: 27399 - protein, 279 aa, DROSOPHILA
MNLILALTTALHLVLVVLAHNPLSTRGESLSDGIRLVMEKRSGDVVHIRPARGTLEAETVASTTNSDTHRTRNNRKPNKPQEHSQQVGAHKSGSRKLVVAENGGALSSQLPQPNHKQGHKNTDKQQRGGGSKQQRGHSQHHGGNRKGPKAATPENGSTCRYAKSAWSNCDHKTNMRSRVLSLRKGEQNCLPTRTIQKKCKKGCRYEKGEWSQCVGGQITREDKLEPEATGGSDQNCNPVRTVSKKCKANGNSSGGKQHGQSRRTKEQKQKDKGASHISS

SEQ ID NO: 27400 - DNA, 4936 bp, DROSOPHILA
ttccacatgcccggcttgtagtcgcgaatgcgcgacttcttgaacgagtccctgtaattagccaaattgggtagagattgcgtactccccactccagtcgcagaataccctgcacttacgctctgccaatgcgcccgccaggaattgtgggtggcagcttgcccttcaacatcgtgcgctgtaaactcgacattgatccgattgtcttcgctgtggggtcaacaggtggtgctcctacggtgcaggtgcaagtggttattcacacagtcgttgctcgcaattatccgttttcgaaaacaaaaaaatagttccaattcaacgaagaagtattgcagtgtgaccgtaatcgagaaaaccgtaactgacgccagctggcagcgctggttcaagagctgcacttggcaatgcccttgtctggcaacgcctaaccgcaacagtcaacatttcaaattccaaaacggatattttaggcttttgcaatcaaagacgaaaatccgtaccatactgaaacaacaacagttgtatattttaatgtttgtacattttaatcaattaagtattttaaaagtttatctacgaaaaaattgatgagctccccgaaacacttgtaccttatcagctttgtaaatacttcacattaatggcaaaataataagcaaggtaataacctttcgcaaagtggatgtcaaaaccactttttaaagcagacaaaatttggaaaccagttttttagaatgctaacaagaaagaattcatatgctatgaagatgtttgacccatttaacggtaaagacagctagttataaactaacaaagctctcaacaagttcctactgatacacacagtgcaacatcgctagctgggaaactggtgttctataaggtctccgagcatttatatttcagtaatgctactgataaggaagtatcactttattgttcatagtattccggactaagcaaaaacggaaacggaacgggccggattgctcagttgcttgatggaacgcgacgtgctcacaccgaaaactagaactcctctctgataagacggcaccaagttaatttgacctcaaacagagaaagataaggcattgttgggtatgtatcggcaaaagtgtaaaaatcttgacaaaatcctttatatctgtgtttattctggtatgtaaacaaaaggtaagctcaatacaggttaagtttatggtttcgagataagataaatgtcatgtttgtcattaatggtctatttagattatgcggcagtaagtttaagcggtagtacttttgaaaaacaattaccagctaagaactttattgccaaataatttactattagttgggactagacataaacatcaatttcgcggataaatattcaaaataaaatctttatccattgcgcatttcaagggttaatgcttctgcaagcctggcaactcctaaataacagctgttggctatagtcctctcgctcccgcacacccttccttttcatttaccggcagaaattgcacttttgtacttgttttttgcccaattaagcggtcaaattggcgtcaatctaatgttttagtgactttgatgccgtttccccaactgataaccgcaatgttagtacatcactttgtgtgctaatagctatttggacatattgataaggtgagatgggttgataagctaatttttgcacaaccacaggtgcaattgtttttccctttgccacggctatttgtttacgtatgtaaatttgtttttgcccataaatttagattaaccagttgcgacacgtttacggttcgtcgactgcgaaaataatgggcattattaaagtttcacccgcctgcaggtgaacatgactgccaacgggaacggaactgctcaggatttgggtgccggcattgaaatcgtggccccacagaagctccagccggaatccaaggtttacgggcgcgtgcagcaattgaccgcatttttcaaacaacaattcggagcgaatccggactttatcgttcgagtgccaggaaggtgagcagttccactcgtggtgcacatctatagtcccttatcgatgatatctcctccttctcctagggtcaacatcattggcgagcatgtggactactgcggctattcggtgctgcccatggctgtaagccagagcattttccttgcagtggccaagaatcctagtgatagccagcttcaactcagaaatctcgaggaagcgaagtttacgggctacgatgccgatctcaaaacgctcaggtgggtgaatcagaaacatgataattaccgaccttaagcactagaaaattttccatttaatttgttataataacaatgtcaccttgaaggcggtatctaaacgaatttagaaatgataagtccaaatatttttttgctattttagaatcgagcttccaaagagtggtggacccgcttggtataactacttcttgtgcggcatcaaaggaatacaggagagtctgggcagccagtggaagcccattggcatgcgcattgctgtggacggtaatgtgcccttggcggcaggactctccagttcgagtgccatggtcagctccgctgtgttggccaccgcacacgtccagggcaagaaactagatcgcagggagctggcttccatttcggccatgtgtgagcagtacattggaacgcacagtggtggtatggatcaggcaatagcctatttgggcagagttggctgcgcccaccacatcgagttccatcccaagctcaagggcactccggtgaccttgccagcgggcaagtgcttcgttgtggccaacagtctggctcaaaagaacaaggctgcttcgtcggactacaatgaacgagtggtggaatgccgattggccactagatggctggccaagcgcaagggcttgatcaactgggaggatattgtgcgcttcattgatctagaggaggcgtgccaaatggataatgagactttcgagaagttgattaaggacaacttaacgaagagcaactacacgcgagcggatatctgcaaggagttgggagtcaccgaacaggaactggagaccaagttcctatccgccaacactcggcacatggagcagttcaagctgcgtcaacgtgctctgcatgttattcagggtaagttaatcatttacaatcaggatttcacatttaatctgaatcattacgtgtacattaaatttattgatcaccaaatgaataattacagtcaattaataatacgttgacattcatttgttgtccgaaagatttaaactcttagcaaataatattaaattgcaagatcagttaataacattgtttccgcctaacagaatccggtcgcgtggccaaattccggaaaatttgtgaggaactcgccggcggagccaataaggaaggtgcaaaacagctgggtgagctcatgcggcaatcccacgagagtttaagggagctatacgaatgctctcatcctgatgtagagcgcctgattgccatatcgaaccagcagaacgttagcgcccgagtcactggagctgggtaagaaaaccgatatcctagtgactctatgaatttaatcaacattattctttttcagttggggcggttgtatagttgccatgtgcgattccatagaagcagctgatgagtacataaaggttttgaagcgcgattactatgctcaattgccaacacatctcctggagcgtcatcagcccaacaactttagcgaagtggtctttgccactctaccaggaaacggagccgagttgtatatacagtgaacgcttgtgtagcattttaatccaacttttataccaaaatcatcctatcagtcactataatcaaacggtcatttatagaaaaaacatttaatatgtagagtactatgtacaatatattaacaatttacaagctaaaatacaacaaggcacgtggggaacggaactcatctggcatcgtgagttctatctgctactcagatagccggcgttcttgaagagcttgtacacctgttcgcgcggtattttctccgcctcacgatgtaccactgccatttccttcttcgtgagcagtgattccttggccagattggcagcgatcacgggatcattgtagaaccgcgcactcttcgacagctcagccggcaactcagactcccactgggcatttcgcaccaccgagggatgggcatcggctgttgcatatccctggtacggattggccggttcgtaagcgtgcgcaaccggcagacccagcgcctggtggtagaagaactgggcccgaaccgaactcatggccagaagcaggcatccagcgagcagcgttacttggcaggcggtcggcatgattggctgctggaggggagaaaaggagcaggagctggcattattgtccaacgttctaataaagcgatacggacagatttattgccgctggtcagtggcagtttttaatctacaagtcggctgtcagtttcgtgcgtcataaattatgtacgggaaaatcaattatcgcatatggccaatggagtgggcaacgcggagatcttggctcaaactgttacagttgctaatccatgaacttttttgcaacttggaactggcttttttttattgataagaattggactggccgcgaactaaatggcgagctttatttgtcaagcgtagagtgctccaatttggtcgcaacaaagcaatcgtagcttgagatataagtacagtggtctctctagaactcttttgagattttaattgcaattgggtaatttgctataaggattggtgaaaatattattttttattttacgttataatgacattatcgaagatgcatttaccaaatgtattaattaagaatacgttagcaatgaaattgatttaaatcatgatcatcctttttaggctttgatatattcacttcgaac

SEQ ID NO: 27401 - DNA, 1726 bp, DROSOPHILA
gatggaacgcgacgtgctcacaccgaaaactagaactcctctctgataagacggcaccaagttaatttgacctcaaacagagaaagataaggcattgttgggtgaacatgactgccaacgggaacggaactgctcaggatttgggtgccggcattgaaatcgtggccccacagaagctccagccggaatccaaggtttacgggcgcgtgcagcaattgaccgcatttttcaaacaacaattcggagcgaatccggactttatcgttcgagtgccaggaagggtcaacatcattggcgagcatgtggactactgcggctattcggtgctgcccatggctgtaagccagagcattttccttgcagtggccaagaatcctagtgatagccagcttcaactcagaaatctcgaggaagcgaagtttacgggctacgatgccgatctcaaaacgctcagaatcgagcttccaaagagtggtggacccgcttggtataactacttcttgtgcggcatcaaaggaatacaggagagtctgggcagccagtggaagcccattggcatgcgcattgctgtggacggtaatgtgcccttggcggcaggactctccagttcgagtgccatggtcagctccgctgtgttggccaccgcacacgtccagggcaagaaactagatcgcagggagctggcttccatttcggccatgtgtgagcagtacattggaacgcacagtggtggtatggatcaggcaatagcctatttgggcagagttggctgcgcccaccacatcgagttccatcccaagctcaagggcactccggtgaccttgccagcgggcaagtgcttcgttgtggccaacagtctggctcaaaagaacaaggctgcttcgtcggactacaatgaacgagtggtggaatgccgattggccactagatggctggccaagcgcaagggcttgatcaactgggaggatattgtgcgcttcattgatctagaggaggcgtgccaaatggataatgagactttcgagaagttgattaaggacaacttaacgaagagcaactacacgcgagcggatatctgcaaggagttgggagtcaccgaacaggaactggagaccaagttcctatccgccaacactcggcacatggagcagttcaagctgcgtcaacgtgctctgcatgttattcaggaatccggtcgcgtggccaaattccggaaaatttgtgaggaactcgccggcggagccaataaggaaggtgcaaaacagctgggtgagctcatgcggcaatcccacgagagtttaagggagctatacgaatgctctcatcctgatgtagagcgcctgattgccatatcgaaccagcagaacgttagcgcccgagtcactggagctgggttggggcggttgtatagttgccatgtgcgattccatagaagcagctgatgagtacataaaggttttgaagcgcgattactatgctcaattgccaacacatctcctggagcgtcatcagcccaacaactttagcgaagtggtctttgccactctaccaggaaacggagccgagttgtatatacagtgaacgcttgtgtagcattttaatccaacttttataccaaaatcatcctatcagtcactataatcaaacggtcatttatagaaaaaacatttaatatgtagagtactatgtacaatatattaacaatttacaagctaaaatacaacaa

SEQ ID NO: 27402 - protein, 444 aa, DROSOPHILA; identical to SEQ ID NO: 11019

SEQ ID NO: 27403 - DNA, 3383 bp, DROSOPHILA
actggactttctccagatcttcgtctagagaatatggcaatggaatgcgccaaatgtattgctcaccgcgtactgggcaaaaaaaagtgtactttcgttgaagtaaacaaagaaaagcacaaaacatgaaacttttgtggataacagacgcacacatcgccagctgtctacgtagtcgcttacacgcacacatcgcatgctcacaaactgaggtgtattggttgcaggcactcggtgataatatagacacactatttaattgggctttgccgtttaagtcgtctgtttaattcgttaattggtcacctggcggctattaagcccccccgaccatcctgattcagccacatacacattgctatatataacaggttgctatttataagcatcccgaaatattccactgcatctctaggctaatctcaatggttacgcagtcaactagcagaaggttacatgggcgtttcggcgaaggacatgcgatgacgtcgccaggatattccacactcacccacgaaaatattgacccggtccacgccggtcttctcctccacggtatcgaagactttggtccacggcttggaagcatcgcgcagcgatttgctcacgtcatccttgtagccgtttaagaactgcttcacctgagtggccattttgcgcaaattgtttttaaatatatatagtcaatcaaaaatatgtgacgccgccgactttccagatgccagtcgatagtttgtgcttgcgcctatcggtgccaaatggactattgacaatcgaagacatgatgcgttattgttcgcatctatcgccgcctatcgataaggagaggtcatactaaaattgcaatactggcggctttttctttttcacagtaaatatttgcaaacagcaaataattattttaagcttttattagaaaggtaaatatgttatgcagcaaattacataagaaaaaaaacttatagcagttgacgtgcattcaatggtaaactcatgggatcatttttgatgaacaattttattatttataaaattataaattttaggattgtcacatcgtgggacttaacaattgtatgcgaggatttacagtaatctagttggctccatgaggactggactcttcagtttctgcgctgggagaaaacataacgatctcgcaaatggagcaacttttcaaaaaacacaaatgtcaaggtggtgtgtggagcactacgaaagtatatgggccaaaagcccttgtacatcccatggatcccttcggttctccagattttagtgaaacagtccaccaagcccttgtacatgagtccacgccccttttcatccactggctggttgtacatccgtgtggtgagcacatcaaagggcgaattggccactgccacaagggttcccgacgataggccggcacagaaggagaggagaaccggatgggtgatccagcctttatccttcagaagggacttggctttgggaaaggtgccgatctgtacactggaggccacaagcgttcggttcaagcttggtaaagcagcgcgccagaatcctgaaatgccattggtccggtaaatatgcagcagggcatccatcatcgaagtatgcttgtgctgaaagcctacggcaatggactgaaccgcctgggcatgctgttgggcctttatctgtaatggagggagatcagatgggaagctctagcggatctactcaccatgtagaaggggctggcgaaataggtgcccgtgcagccgcccagagctccaaagaacatgccccgatagaaggatatggagccatccgcattctgcaagtatcccagctccaatgcgttcgaatatacacttagcctaccataaggaaagggtatttacactgcaatttgcttagggtaactattttcaatgatgaacgtaacgacttatcttaaatgtccattacttcacagtgttagataagataagcatgcatttcacattaattcatggtgcttgtaattacactacttagcattgcataattttacggccacttttatataaactttgtttaaatctacctctaatattcgtataaagttcaaagattttgatgtttatggatggcaacaagtgtcctttacaatgcacttgcctgaccgagttgaggacaaattgataacataatgccggagcgagacccttctccaaagcaaggagtccgtcgttgaggactatctgcagcatggcctgggggagatgcctgtagggcttcacataggttcctcgggcagccaactctccctgcagctgcatccgcgtcttgaccacatcgatgggattggtgaacaccaccgcacccatcgctgccgttccgcccagcacgaaatccgacttggtcatgttttcaccccaaactttggatttggttgatcttacgttaacattttgtttactctttggtcgacagaccgattgttacatttatcgaattaatggcatacattttaatgctttaatgatttaaatgctcacttggcggaataatttaaatatttgaactcttgtatttggtgtttaaaaattaaaattcgcttaagaaagaaattagtatttgtaattaatgaattttttattcaaaaatattggtaaaattcttattgaattattaattagtgaccaaaacaaataaatcactttgagaaaaggtcataatacatttattattgcttgttaaatatcaacattaatttatcgatagttacacgtatggatatcgataatttcgcggacggttaagaatggattataaggactttacttaaccacgctcgtagccaaagaataaaatataaataaatacatttttattttctcttttaacttgtttaaatctttacttaccctcttcagaggatcaaattgaaattgttattttgatgaaatatccgggaaacggatatgctactagaacgtaacttccaaatactaagctaacgaaagtaaaacaacttcgtatggttttgcatttcaaagagccccgctcgtgttaaataattttcgtttagtagtgaagatcgtacttttccctcagcgcaattagttcgtcaaagaacaaaagcaccaacgtggaatatggagcactcctcagataaatgggccaaaagcccttgtacaacccatatacaccctccgatcttaggatcgtaagcacacaatccaaccagcccctgtagtaaatgccacgaccttgggcatcaactccctgattgtaaagacgagtggtaaccacatccaatggagtgattgccagcgagacaaatgacccagcggctaagccagagcaaaaggacaggattgtgggatgagttaccactccgttttccttcaacaaactcttggcctggc

SEQ ID NO: 27404 - DNA, 1330 bp, DROSOPHILA
aaaacatgaccaagtcggatttcgtgctgggcggaacggcagcgatgggtgcggtggtgttcaccaatcccatcgatgtggtcaagacgcggatgcagctgcagggagagttggctgcccgaggaacctatgtgaagccctacaggcatctcccccaggccatgctgcagatagtcctcaacgacggactccttgctttggagaagggtctcgctccggcattatgttatcaatttgtcctcaactcggtcaggcaagtgcattgtaaaggacacttgttgccatccataaacatcaaaatctttgaactttatacgaatattagaggtagatttaaacaaagtttatataaaagtggccgtaaaattatgcaatgctaagtagtgtaattacaagcaccatgaattaatgtgaaatgcatgcttatcttatctaacactgtgaagtaatggacatttaagataagtcgttacgttcatcattgaaaatagttaccctaagcaaattgcagtgtaaataccctttccttatggtaggctaagtgtatattcgaacgcattggagctgggatacttgcagaatgcggatggctccatatccttctatcggggcatgttctttggagctctgggcggctgcacgggcacctatttcgccagccccttctacatggcccaacagcatgcccaggcggttcagtccattgccgtaggctttcagcacaagcatacttcgatgatggatgccctgctgcatatttaccggaccaatggcatttcaggattctggcgcgctgctttaccaagcttgaaccgaacgcttgtggcctccagtgtacagatcggcacctttcccaaagccaagtcccttctgaaggataaaggctggatcacccatccggttctcctctccttctgtgccggcctatcgtcgggaacccttgtggcagtggccaattcgccctttgatgtgctcaccacacggatgtacaaccagccagtggatgaaaaggggcgtggactcatgtacaagggcttggtggactgtttcactaaaatctggagaaccgaagggatccatgggatgtacaagggcttttggcccatatactttcgtagtgctccacacaccaccttgacatttgtgttttttgaaaagttgctccatttgcgagatcgttatgttttctcccagcgcagaaactgaagagtccagtcctcatggagccaactagattactgtaaatcctcgcatacaattgttaagtcccacgatgtgacaatcctaaaatttataattttataaataataaaattgttcatcaaaaatg

SEQ ID NO: 27405 - protein, 124 aa, DROSOPHILA
MTKSDFVLGGTAAMGAVVFTNPIDVVKTRMQLQGELAARGTYVKPYRHLPQAMLQIVLNDGLLALEKGLAPALCYQFVLNSVRQVHCKGHLLPSINIKIFELYTNIRGRFKQSLYKSGRKIMQC

SEQ ID NO: 27406 - DNA, 7782 bp, DROSOPHILA
aaatgtcgatagacgccacgacctatcgatagctggacagtgtcatctctaacatttacgacgtgttgaccgggaaaaaatcaaaagaagccagcaattgcttttaaaccacgaaccgctgaacaagtacggagtttgtaaaatacttaatattagctaagtccgtgcgagcgtagccaaacaaggaaactaattccaacgctgccgtgacacaaacttccgtacgaaattgaaagtcaaatgaattctgtacaaaactgtgtgtgtgcgtgtaattcaagcgtcaatttgtcgatgataaaatttgcctgcgcctaatgtacacatgtctgcgtcttcgttgagcatatgagcctgtgaatgtgtgcgtatcggtgtgagcgtcgagcataagaaagcagcacaaaacaacaacaacggcagcagcagtaacaacaacagcaagaaggcaacgacgctaagagaaagagagaaggaagggaagagcagagcataatcggactccattttacaaggcgaaaaaaggagtaggaaagagcgcaccatggccagtttccagatccaccaagacatgagcaacaaggagaatccgggcattaagattccggccggagtgaagaacaccaagcagccgctggccgtaattgggggaaaagcggagaaaaatgcgcttgcgccgcgggccaatttcgccgtgctcaatggcaacaacaatgtgccgcgtccggccgggaaagttgtaagtaccgttgccgatttcccgtacatccagtgcctaattccaatgcagctgcctttttatatttttatggtggtgggatcgtcacaccactgcgaccgtgcgcatgtgtgagatctcctagtggtggtggtggttttctctcccttacctctcccctaccatcccatccttttcacttctccatcttacgttactctcttcttagaacgaccaatgcacttacttgcgcctaacctagaaccttaactaacctagaaaaagacacaggccttgcaattacgcgcctttttgatgatttgcaacaacaaagcgaagcaaggagggcaaaagcaattgcgacatgcaacgcacacatgcgtataggtgcacacatacacacacacacgagcaatacgggaagccagggaaaggcgcgcaacttaaagttggatcgatttatggggggggataatcattttatttcttttttgcttactatattaaggatgcatatgtaaaaggaattatctttgtgtttttacttttataatcccactgcaatattacctaatataaaattattacctaatatagtaagttgaccatattgttgaatttgtcttcttcgtcttctgttccttccagcaggtcttccgtgacgtcagaaatcttaatgttgatgagaatgtggagtacggcgccaagaaatcgaatgtggtgcccgtggtggagcaattcaagaccttctccgtgtatgaggacaacaacgatacccaggttgcgccatccggcaaatccctggcctccctagtcgacaaagagaaccatgacgtgaaattgtaagtttccatctgtcacttggtaagccgcaaacaaacttttgtttgttttttttttcactccattcagcggtgctgggcagaaggagctggtagactacgatctggattcaacacccatgtccgtgacggatgttcagtcccccatgtccgtggaccgctccattctcggtgtcatacagtccagtgatatcagcgtgggcactgaaacgggagtctcgccaactggaagagtcaaggagcttccgccgcgcaacgatcgccagcggttcctggaagtggttcagtaccagatggacattctggaatatttccgggagagcgaggtaagctaaaccagggacataaacataggcttcaatatgatattattagatgacttcctcacaaaaatatttcaaactcacaaactcgctttcatcgcgtaatcattgtcaaagacaatgatattttttaactagtaactgaagtggacaacttttatcaggtcgagttttccttgattatcttccagggtattgcagtcatgttttctggcataaatttggaattttttcccaaggtatcttgcgttttcaatgtgttactacttacttggccatgtgcattgtacttttctgtgcagacgcaggcagacgtaatttcttaggggaagtcggaccctgtcgcaccctccgttggcattcccttcacgcaacgctgcctctttatgggttcatgggtacacttattcccgctcgcgggcacatgtttgttgggcgggaagcgaaacgcttgtctgtctgcgtccgtctcatcctttgtcgttgttgttgactctctttttctcattcgtccaaagtcgtagaacactcggggtaccaatggaattcgacttgcagagggaggttgactactattgtagtttgtttcctacgttagtaaataaaagattaaaaattaaaataagtttaaaaactaaaaaaaaaattaaaaccaaaaaagttttaaaattgataaagaatttaaaaaactagaaaaccaaaacaaataaaaaaaatttaaaaatattttaaaatcgatagttaaattacaaaactcgaaaacaacattaaataatacaaaacaacaacacaaggattaggttttgtccagaatgggcgtattctttattttcccttgatatttcagtttttactagagatgggtttttgtctttttttttttttaaatttttaaatatttgaaatgctttgtttccaacatgaacattataatttcgtcgtgaagattcccaacaaagattgtatttttaaaatagtacaatgttctggacgcctatggaaagttgctgcacaagaaagtgaggcagctttctaatcgcatccagctcattattctcgaatcgtcttggttgggaacttcaatacaatcccactaacgtgagttcttgttgaactgatcgtaaaagtcatcggagacggcattggttaggcccacaagggcttccttgcgctggcgatcctgctccacggccaacttggaattcgcccgcatcagctcatcgaattccgccttacgtcggcgatcatcctcgatttggtgaaggaccagggtgcggtccatattaatggagtattgctcccactgtttgtccatcatctgggcctccgtcttgcgctgaatagacaaacgaagctgctgatcttgtccaagacgaaacacgcgaagttcttcgggcgtcatgccgcgatacatgaaggcaatcttcttgttcggatcggtgcgcgattgagccacatccggattttcagttagcatatcgctggagagcatgttatagatctcggccatgtcatcctcgtacttttcacgcttttccctttcgcggtccaattgcttctgcttggccatgttgatattgaactgacgcactcgctggatgacttggttgcgcatctggtgatcagacttggccatctcctgcagatgcttgtctctgcaaccaacgttgtccatcaacacattatcggcctgcttgcgagcatcctccgccctcttacgctcctgcacttgctgatccagccaggctctttgctgctcccgctgccgctgctttctgtcagagttatagaggtcctcgccttgaaagatctgggcactggacacgcccagcgaaatgtcattgtcggcgactcttgttggacgtgccttcttcaagaaattcggatcatttaggtcgaattcgcggcgctgctccttgcgctgatagcggcagcgataatagttaagatccgagtccaccacacgctgttttttctccaactccatttcctgggccaggatcagacgcttctgcagctgctcctgttcttcaaatttcttgtcgcactccatctgggcggttcgctgcttctttttctcaagtatttggcgatccagcatttctaggtcgagctgtgaataggaatattcggcaatgaagctcacccagtctgcagatgcatacttaccccgtaaagacgctgtttggcattaaaaatgcgccgcttccgctcatcttcgtactgctcccgcttctgcagcttcatcgcctcgtcgagatcctgcttggtgcatataccgattttgagcgtcattgtgccggagttagttataaaagatgttcaactgtattcgaggtcgatatgtctgtctcttcttgttagtaggatgtggatatatgcctgagttgactttgtttgcccggttgctgggtgctttgtttattgtttgcctctactactacctctgtaacctactagttacagactatttacatatatctataataatttcatgggagttaactgccttaatataaaacaaatgctgatgtatgtacatatattcatgtcaatcgaattctttaatttttgcagctcgagtcgcttgacggttccaataatcgttaaagcgaccataaaataatcacctaatgtacatattgcccatatatatgtacatatatgtaggtgtttggcaaagaaatttaagttcgaactgggaatttcgatgcgactcacgtactacgaaataaccaataaataaataaaaatcggttaactccctcccccagctgttgtttgccacttctcctatggtatttatacgcttgatttgatgactgtacggctttttctcccgtgaaatttgtacatttttgacaccttcttaagatgaaactgggaacgggtagttggttgccagattagagtgtagaaaaggcataagctatatatatgcgaatcctaacctaaagtattaaaagtttggcttagtaatttttgttaggccgggtaatctaatcggtttctaatcatttgtttgcatgtgtttgcatcttccagaagaaacatcgccccaagccactctatatgcgcagacagaaggacattagccacaatatgcgctccatccttattgattggctggttgaggtttccgaggagtacaaactggacacggagacgctctatctctcggtcttttatctagatcgatttttgagccaaatggcggtggtgcgctccaagttacagctggtgggcacggcagctatgtatattgccgcgtaagtattcttgatagtccggtaataatggtgtgtgtattcatggggtttatttttttatttttcagaaaatacgaggaaatctatcccccagaggtcggtgagtttgtcttcctcaccgacgacagttacaccaaggcgcaggtgctacgcatggagcaggttatcttgaagattctctccttcgatctgtgcacaccgactgcttacgtcttcatcaacacctatgctgtactttgcgacatgcctgagaagctgaagtacatgacgctggtaagctattgccaatacaaaagaaaaaagaaacaaagccgaaacttaacttaatgtttacctgacacagtatatttccgagttgtcgctcatggagggagaaacgtacttgcaatatttgccatcacttatgtcatccgcttcagtcgcactggcgcgtcacattttgggcatggagatgtggacgccaaggctggaggagatcacgacttacaagctggaggacctaaaaacggttgtgttgcatctgtgtcacacccacaaaacggcaaaggagctcaacacgcaggccatgcgggaaaagtacaatagagacacgtaagtcgcaaacactagatagccgaagaatgagcccgtgttgaccaaatgtatttcttaacagttacaagaaggtggctatgatggaatccgttgagatgagcaaggacgacttcgatcagctctgtgaggcttacaattgcaagcagaaagaggatgagcaccagcagccggatattaatactaaatcgaacgtgaatttgttttataagttttaagtgttttgagccgctgtcatggccaaattgtatattagtttagtgtttccatgtaacattatgtagttttagttataagtgtacacaatggatcaattgcagttcggtcgcagtcagccagtcgtataaaagcttcgcattggttggccgattgacaagctcccgttgcaagtgccggacaattttatatgtaagccatataaaagatagttgccaaaatatacgcgcttaacaacattcgcgtctgtccacggtgagagcttgtcatgccaagcgggagcagtaagaacttcggcagtcttaaaaactatccgattagccaattgaaattggaggaagccaccggacacaacatattagtgctgcttatgctaacgatattttatatttcaacctctttatgttaagtatgtatgttttcgtgtttataaattgaaccatactaacgtatacaatgtgtctaaagcagaaacagctagcttcgagaattattttaccatatttatatattactatttactccgtaaatgttctgtgaactccaaaacaaatatatacacaattttaacaaaagacaccaaccgcccagccaggacggaataaaaaactcacactgatcgtgctcagaacggcaggcagccgtggaatgttgctaaactcttgttcttgtaatcttgtaatcttatacgcttactaaatgtttactaaacttagtctagaccatcttgcgaccacatatgtagctagaatagagcgctgccgaaatgcgtacagccagatgatgggtcttactttacacttaggtttatgctaactaatccatttagtttgataattccattgaccatcgcatcgagtgttttgtgctcgccagccgaatattacctaaatatccaatattaagaattcaataaaactttgaaagatgcaagcaaaagaggtggttgtacttgtaccattatttgtgtgtcacgtcgttgggtcaaacaaaataaataaataaacccagaagtaatattcgttatttcaattgtatacattacatttttgaaagaattattaaccatagccgctctaaccatttgattttttatagctgcgtcacaagtacatgcgggagctggccaagggagactccgattggcaaagaatggtggagatgcggtttttggctccgtacctgtgccacaagtaagggagtctgagtggtcattattattattagaaaaccttctagctcttatagtttctgagatctcgacgtggacatggttagatcaactcggctattgatcctgaccaataatatatgtatatactttatcggaaacacttccttcttagatagattacttttcaaggaatctattatgtgtatccttttactctacgaggcacgggaattttatatctcggaatttaggcaacgcgcgagctccccagtggaggtgcatgagctgactgctgcgtttgaagagataagcatggtgcccccaggcagcccaattaatcaaccgattgactcgaatcccctgccagtggaccatataagccccgctacgtcgttccaggaatgcctgagggcgacttttcgcttcttgcagagcacggtgtataagaaagagttggattcggccttgctgggtttggaacaacaatatatactgagattaggaaaaagcgcaaaacaacaacaacagcagcagcaacaacaacagcaaggaggcaacgaaatttcatgatttttgtgggatatcaatagatattggttcccaataattgaagtataaaataagacaaaatccttaaattgttaatttt

SEQ ID NO: 27407 - DNA, 2207 bp, DROSOPHILA
aagacacaggccttgcaattacgcgcctttttgatgatttgcaacaacaaagcgaagcaaggagggcaaaagcaattgcgacatgcaacgcacacatgcgtataggtggtcttccgtgacgtcagaaatcttaatgttgatgagaatgtggagtacggcgccaagaaatcgaatgtggtgcccgtggtggagcaattcaagaccttctccgtgtatgaggacaacaacgatacccaggttgcgccatccggcaaatccctggcctccctagtcgacaaagagaaccatgacgtgaaattcggtgctgggcagaaggagctggtagactacgatctggattcaacacccatgtccgtgacggatgttcagtcccccatgtccgtggaccgctccattctcggtgtcatacagtccagtgatatcagcgtgggcactgaaacgggagtctcgccaactggaagagtcaaggagcttccgccgcgcaacgatcgccagcggttcctggaagtggttcagtaccagatggacattctggaatatttccgggagagcgagaagaaacatcgccccaagccactctatatgcgcagacagaaggacattagccacaatatgcgctccatccttattgattggctggttgaggtttccgaggagtacaaactggacacggagacgctctatctctcggtcttttatctagatcgatttttgagccaaatggcggtggtgcgctccaagttacagctggtgggcacggcagctatgtatattgccgcaaaatacgaggaaatctatcccccagaggtcggtgagtttgtcttcctcaccgacgacagttacaccaaggcgcaggtgctacgcatggagcaggttatcttgaagattctctccttcgatctgtgcacaccgactgcttacgtcttcatcaacacctatgctgtactttgcgacatgcctgagaagctgaagtacatgacgctgtatatttccgagttgtcgctcatggagggagaaacgtacttgcaatatttgccatcacttatgtcatccgcttcagtcgcactggcgcgtcacattttgggcatggagatgtggacgccaaggctggaggagatcacgacttacaagctggaggacctaaaaacggttgtgttgcatctgtgtcacacccacaaaacggcaaaggagctcaacacgcaggccatgcgggaaaagtacaatagagacacttacaagaaggtggctatgatggaatccgttgagatgagcaaggacgacttcgatcagctctgtgaggcttacaattgcaagcagaaagaggatgagcaccagcagccggatattaatactaaatcgaacgtgaatttgttttataagttttaagtgttttgagccgctgtcatggccaaattgtatattagtttagtgtttccatgtaacattatgtagttttagttataagtgtacacaatggatcaattgcagttcggtcgcagtcagccagtcgtataaaagcttcgcattggttggccgattgacaagctcccgttgcaagtgccggacaattttatatgtaagccatataaaagatagttgccaaaatatacgcgcttaacaacattcgcgtctgtccacggtgagagcttgtcatgccaagcgggagcagtaagaacttcggcagtcttaaaaactatccgattagccaattgaaattggaggaagccaccggacacaacatattagtgctgcttatgctaacgatattttatatttcaacctctttatgttaagtatgtatgttttcgtgtttataaattgaaccatactaacgtatacaatgtgtctaaagcagaaacagctagcttcgagaattattttaccatatttatatattactatttactccgtaaatgttctgtgaactccaaaacaaatatatacacaattttaacaaaagacaccaaccgcccagccaggacggaataaaaaactcacactgatcgtgctcagaacggcaggcagccgtggaatgttgctaaactcttgttcttgtaatcttgtaatcttatacgcttactaaatgtttactaaacttagtctagaccatcttgcgaccacatatgtagctagaatagagcgctgccgaaatgcgtacagccagatgatgggtcttactttacacttaggtttatgctaactaatcc

SEQ ID NO: 27408 - protein, 336 aa, DROSOPHILA
MSVDRSILGVIQSSDISVGTETGVSPTGRVKELPPRNDRQRFLEVVQYQMDILEYFRESEKKHRPKPLYMRRQKDISHNMRSILIDWLVEVSEEYKLDTETLYLSVFYLDRFLSQMAVVRSKLQLVGTAAMYIAAKYEEIYPPEVGEFVFLTDDSYTKAQVLRMEQVILKILSFDLCTPTAYVFINTYAVLCDMPEKLKYMTLYISELSLMEGETYLQYLPSLMSSASVALARHILGMEMWTPRLEEITTYKLEDLKTVVLHLCHTHKTAKELNTQAMREKYNRDTYKKVAMMESVEMSKDDFDQLCEAYNCKQKEDEHQQPDINTKSNVNLFYKF

SEQ ID NO: 27409 - DNA, 5711 bp, DROSOPHILA
tcaggactggacggccgtttggccaggaccacgttcgttccacccggccagtgtgcctctgccactgcggcagggattcacggaacgcggagcagcagctccgtcgaagttcgccaatgcagagctgatgaagatacccaactttctgcacttgacaccgccggccatccgtcagcaatgcgaagccatcaagaagttctgcacgccatggccaaagggtctggagacagaggccaagtggcagcgccacttccccctggaggtcaccaccacagactactgccagagtttgcccacgatcaggaatccggaggccaggcgcgtcaccattaccctgaagctctctgacctgaagttcgatgcgcacgccagggataagttcctgcgcctggtgggcgatcgctacaacaaggacacggacctcgttaccttcgtcacggatcgctgtccgcagaagaagcagaactacgactacgccctgtatctgctcaccgcttgctatcacgaatcctttgtcaccgagccgtgggaggccaccaaatcggaggccgacatggaggtctatctgttcgagcgtaaccagtcgaaggtctccgccgagggaatcctcaactggaacgccaagaagggtgctccaaaagtggttcccagcaagtcattcgctgaatgcgtggagaaactgataaacgaaggcgaaaacgagtacaacttgggcaaatacaaggaggaggtcaagaagatgttgaacattgcctaggaaactggatagttgagtgaaccaataaagcgagaagttgttaaaaaataatcataacaagtatttgaatgttacaatatttatcttgttaataattttgaattgaaactgggcaaccatgtaatccccctttacgacgcccctccttcgttgtgaatgtccgaacagctgtttacaatgaaggcgtgcccgtgtgaatggcattagaacagcgccaagaacagaaccaaaaaaaccgaatttccgcggacgtggaagcaaacttttgttttgctatgctaattagtattttagtagttaataagtttattcaaccccgtttggatggagctttgagtagaatacagtcgtagagaggtgagaacaaactcctgataagaattcacctgctgatgacgtttcacctgattaaaattataaaatccggaattataaacaaagttagtcgctgaagtgtttctaagttatagtacattcattgacatatgtctgcgataaggtaactatccagcggatgttccttcagcgcagttaaatatcatttctattatcttaactttcgtattggtgaaaatgactcgccgcttatcttgtattttttgtatgtgcgacccaaaaagatacatatgtgcttacgtttctgaatttttctacttttctactattctctttcacccacagaccacgttgcagtgccgccagataaagagacaagccagcaaacatccgcagcacctgagctaacaaaccaatatcaccattaccgcgagatatacttcaccgacattaatggttgacgtagagacccgtagagcgcacacgtagccacggatatccggcaaagatgcggcgacccaatctcaagtggatagtgaaggcctcgctgctcttgttgatctcactgactctcttcgtactgataaccagctggatctcatctactccgtacaccaacaagccagtccatcatggcgtggagcccgtgcccgaaaaggctggcctttccggcgatgtcaaggtgaaggtgccagctataaagcaaccagaacctcagaaaccacaggaacccgacttcgaagaggatcctgagctgcagaagatcgatgagcccgaaccggtggaggaagaagtcgataatccgcatccggcggacgacgaaccgcaacagcagccccaggaggagctccaaatggctgcgccggcggacgcttcggtgaagaaggactggcacgactatactttcatggaaaaggatgccaagcgcgtgggcctcggggagggcggaaaggcatcgacgctcgacgatgagtcccagcgagacttggagaagcgaatgtccctggaaaatggatttaatgccctgctctcggattccatatcggttaaccgctcggtgcccgacatccgccaccctctgtgagttgttcatcaaaaagcacttagtttcgctaaatataggagtcgagataaggcagtggctcccaaaatgggcacttctctaatgtgacgctccaaatcagttttattttcaaagtcagataagaccattttgcttgcttgaaatgcttattattttatagtaggaagatattgaattaattatatcagtgcagtgatatctgttaacgaataatttattgccaattccaatttattttaatctattaattcaattgcagatgtcgcaagaaggagtacgtagcgaagttgcccacagtcagtgtgatcatcatcttttacaacgaatacctgagcgtgctgatgcgctcagttcacagtctgattaatcgctcgccgccggagctgatgaaggagataatcctggtggacgatcacagtgaccgcgaatatttgggaaaggagctggagacctatatagcggaacactttaagtgggtgcgcgtggtgaggctgccaaggcgcacgggactgattggtgcccgagcggcgggcgcaaggaatgccactgcagaggtgctcatcttcctcgattcccacgtggaggccaactacaattggttgccaccgttgctggagccgattgccctgaacaaacggacggcggtgtgtccctttatcgatgtgattgaccacaccaacttccactaccgggcgcaggatgagggagcccgaggagcgttcgactgggagttcttttacaagcgcctgccattgctgccagaggatctaaagcatccggccgatccgttcaagagtcccatcatggctggcggtctatttgccatttctagggagttcttctgggaactgggcggctacgacgagggcctggacatctggggcggagaacagtatgagctaagcttcaagatctggatgtgtggtggtgaaatgtacgatgcgccctgctcccgcattgggcatatctatcgcggacctcgcaaccatcagccgagtcccaggaagggcgattacctgcacaaggtgagtttagcagtagagaataaagagtaatctaaatggcgaatgggaaattgagccataaacgggtttcatccaacattaacagacactcccatttagtttcttaatttttttaagacctcataaaattcttttgtctctgaacttcgctagttcattttacaagtttttatttttatgtttttgtttttggcggataaacttggcgtgttggttctaattagaaatttatatgttgcctcttcgtggtatatctttatatctttgttttgtttactctggcatgtagctatccgaacttgacacattgttgtgaaaaatatttgcgcatatttaaaaaggggtttatggctttcgaagttaacttgattgcagccatggcaacaaattttatttaagatttcttcgccaacgatttcgcagtaattattattcttatcaaggcaatcaatcagttaattagacccatcgactaactcttgattactttgcagaactacaagcgagtggcggaggtgtggatggacgagtacaagaactacctgtacagccacggagacggtctgtacgagagcgtggatcctggcgatttgacggagcaaaaggccatccgcaccaagctgaactgcaagtccttcaaatggttcatggaggaggtggccttcgatctgatgaagacctatccgccggtggatccgccgtcctatgccatgggcgctctgcagaatgtgggcaatcagaatctgtgcctggacacgttgggcagaaagaagcacaacaagatgggcatgtacgcgtgtgccgacaatataaagactccgcagcgaacgcagttctgggagctgagctggaagcgagaccttcgcctacggcgaaagaaggagtgcctggacgtccagatctgggatgccaatgcgcccgtttggctgtgggactgccacagccagggtggcaaccagtattggtactacgactaccgccacaagcagctcaagcacggcacggagggcagaaggtgcctggagctgctgcccttctcccaggaggtggtggccaacaagtgcgacaccgacaatcggttccagcagtggaacttcggctcgttcaacaaaacagcgctggacaactactcgcaggacctcgtcctcagcctgtaaccgctgccctgcaatagtatcacttgccatgtacttagaacacttcgatgtaaataactaggctagataggttgtacggccgcttggccacataacaatttaccccgactcaagcgcacatatgcaacagaggatgcaacagagagtatctttaccttaaatatagtgcatctcaaaccaattccaaatgccacaaaaataatttgtagcgttacgtatgctttggagttttgtttggtttcaaacaggattccgaatatgctagtattagcctctaaattgtcataagtttgacaaccgtatgactttgtactccacaagaagtgttttccaataaagaatatttttaaataattatcagaagtgctggtatgggtatccccccgttgttgcaaatgaaaaatgcagtctggcgatcttaactttgttttcgttttatttaatattaatatctgtttgctttccatgcgcgtactttaaataaatataattacgtttttcatccatctcatccatccgcttcgtgcttcacaatctttatatacgttctcgggttgtatatcgttttacaatatgtatgtatctcgctatatcgtatctctatctgattctgcacccgaatgtcgctaagtcaggtgcgatatcttcgagctcttttctgatttctgagttctaatttctgatttcttatttccgcttattacttatgctgctcagtgttgagtgttaattggttttgtttctgctttatcatatgccaatatacgtatagtttatgtaaaaggtgtacgccgagcgccccgcgaaactcaaaagtcgttttggggtgtgtaacttaatgatggcaaaggatttgcttttatttgaaaatgataaaaaaagcatttacaaactataatagttgttgttggcttgcgtaatcagttaatcaattatcaattatcataagttatattaatatattatataaacatttaaatatttatcaaaacatgttttttcttgttgctcaaaagtcttcttcgctgccttacatttaaattacattacgtacagtttacatacgatctatatgtccgttcgtccaggatcatcaaggatcgtattatcaataaccgttttgcttatccttttcattccgctcttctgttttattttgtgcaaaatatatttatatgtatatgtagactaatttgatttgaaattcagttgcgctgccacatttgcattctaatctttaattgtatgttaccttttggatggatgcaaattattcattgagttttatacaacaattacaaatggttaggcaaataagtttagtattagttgttggttgtttagtgcttaat

SEQ ID NO: 27410 - DNA, 2630 bp, DROSOPHILA
ccgcggacgtggaagcaaacttttgttttgctatgctaattagtattttagtagttaataagtttattcaaccccgtttggatggagctttgagtagaatacagtcgtagagagaccacgttgcagtgccgccagataaagagacaagccagcaaacatccgcagcacctgagctaacaaaccaatatcaccattaccgcgagatatacttcaccgacattaatggttgacgtagagacccgtagagcgcacacgtagccacggatatccggcaaagatgcggcgacccaatctcaagtggatagtgaaggcctcgctgctcttgttgatctcactgactctcttcgtactgataaccagctggatctcatctactccgtacaccaacaagccagtccatcatggcgtggagcccgtgcccgaaaaggctggcctttccggcgatgtcaaggtgaaggtgccagctataaagcaaccagaacctcagaaaccacaggaacccgacttcgaagaggatcctgagctgcagaagatcgatgagcccgaaccggtggaggaagaagtcgataatccgcatccggcggacgacgaaccgcaacagcagccccaggaggagctccaaatggctgcgccggcggacgcttcggtgaagaaggactggcacgactatactttcatggaaaaggatgccaagcgcgtgggcctcggggagggcggaaaggcatcgacgctcgacgatgagtcccagcgagacttggagaagcgaatgtccctggaaaatggatttaatgccctgctctcggattccatatcggttaaccgctcggtgcccgacatccgccaccctctatgtcgcaagaaggagtacgtagcgaagttgcccacagtcagtgtgatcatcatcttttacaacgaatacctgagcgtgctgatgcgctcagttcacagtctgattaatcgctcgccgccggagctgatgaaggagataatcctggtggacgatcacagtgaccgcgaatatttgggaaaggagctggagacctatatagcggaacactttaagtgggtgcgcgtggtgaggctgccaaggcgcacgggactgattggtgcccgagcggcgggcgcaaggaatgccactgcagaggtgctcatcttcctcgattcccacgtggaggccaactacaattggttgccaccgttgctggagccgattgccctgaacaaacggacggcggtgtgtccctttatcgatgtgattgaccacaccaacttccactaccgggcgcaggatgagggagcccgaggagcgttcgactgggagttcttttacaagcgcctgccattgctgccagaggatctaaagcatccggccgatccgttcaagagtcccatcatggctggcggtctatttgccatttctagggagttcttctgggaactgggcggctacgacgagggcctggacatctggggcggagaacagtatgagctaagcttcaagatctggatgtgtggtggtgaaatgtacgatgcgccctgctcccgcattgggcatatctatcgcggacctcgcaaccatcagccgagtcccaggaagggcgattacctgcacaagaactacaagcgagtggcggaggtgtggatggacgagtacaagaactacctgtacagccacggagacggtctgtacgagagcgtggatcctggcgatttgacggagcaaaaggccatccgcaccaagctgaactgcaagtccttcaaatggttcatggaggaggtggccttcgatctgatgaagacctatccgccggtggatccgccgtcctatgccatgggcgctctgcagaatgtgggcaatcagaatctgtgcctggacacgttgggcagaaagaagcacaacaagatgggcatgtacgcgtgtgccgacaatataaagactccgcagcgaacgcagttctgggagctgagctggaagcgagaccttcgcctacggcgaaagaaggagtgcctggacgtccagatctgggatgccaatgcgcccgtttggctgtgggactgccacagccagggtggcaaccagtattggtactacgactaccgccacaagcagctcaagcacggcacggagggcagaaggtgcctggagctgctgcccttctcccaggaggtggtggccaacaagtgcgacaccgacaatcggttccagcagtggaacttcggctcgttcaacaaaacagcgctggacaactactcgcaggacctcgtcctcagcctgtaaccgctgccctgcaatagtatcacttgccatgtacttagaacacttcgatgtaaataactaggctagataggttgtacggccgcttggccacataacaatttaccccgactcaagcgcacatatgcaacagaggatgcaacagagagtatctttaccttaaatatagtgcatctcaaaccaattccaaatgccacaaaaataatttgtagcgttacgtatgctttggagttttgtttggtttcaaacaggattccgaatatgctagtattagcctctaaattgtcataagtttgacaaccgtatgactttgtactccacaagaagtgttttccaataaagaatatttttaaat

SEQ ID NO: 27411 - protein, 666 aa, DROSOPHILA; identical to SEQ ID NO: 3393

SEQ ID NO: 27412 - DNA, 2640 bp, DROSOPHILA
aggacagagggccttttaagccatgtcgctgaattcagtgtagttgggacatttgtttggcttttgagaggcgaaagtgtgagcaggataatggacgcccaagcacacacacacactcaggcaatcgcactcacatgcagattcgtgggctaggcaaccaattaagctttgtcaaattgtttggcatttgaagtgcagttggtaaatgggtggcattgggtggaaatgggtggaaatggctgccgctgcatcgataacttttcaccggtcacttttttatgatggtcttccaaacgagtgcacatttccgatttctttacgctcaagcacatttccaatcgattccaaagtatttcgttttaaaatccttctcttcattaagcgaaaaaatcaattgtcatcatgaatatgcaatttttagactatttatgggctctcagtgtttgcaggcgaaaaacataaaacttgtgactataattcgtagaagcaaatattaaactttgtttatttttttaaccattgataagttatctttgattttactgtctagctaacgcactacattatatatttacatacatccgcacgatgctctttcctttttccgcccgaaaggcgaatacatccgctgattttgttggcttgcggtccggattcaactttataaattgcaggcggtaagagacatgttgatcattatgaatatatccaaaacgaatagattttctccacagaaatgccgagcttttgtccaagggatatgagccaccgaaggcgatcaaaacaggcacctccattgtgggcatcatctacaaggacggcgttatcctgggcgccgacactcgtgccaccgagggacccattgtttccgacaagaattgctcaaaaattcaccaccttcaggatcacatatagtgagtacccagcattcgcttgatgcgcctttgaaaatggacccctacatatctgcattacccattcgcagctgttgtggcgcgggcaccgctgccgacaccgaaatgattaccctgacgaccagcgccgagctggatttgcaccggctgaacaccgaacgacgggtgccggtagtctgtgcgagcatgatgcttcgcaggaccctctttcgctaccagggtcacattggtgccgccttagtgatgggcggcgtggacacgactgggccgcagctgtactgcatctatccgtgcggttccaacgataagataccctacgcggccatgggctccggcaccttggcagccatgtcggtgctggagcacggctggaagcccgatctcgacctggagcagggcaagcagctggtccgcgaggccatctcggcgggtgtgttcaacgacctgggctccggatccaatatcgatttatgcgtgatcaccgcaaagggagcggtttacctgagaaccgatacgattgccagcgagaaaggcgagcggttgggcaaatacggcattaagcccaactccactatggtcacctcgatctccgtgctgagtctgcaggtcaccgatgagcgaatctatgcagtggatgatcaacagccgggcaccagtggcgttcagttggattcccagcaagcggatgaggaactgcccgaaggatcgcagactaaatcaccatagacatccataccatatatttcagttcgagcaaattaaccgttaaatagccacatggctttacataaatgttaatgcattcacagaatgcaaagattgcctagaaattctggcatcatgttgttgcttctgcgactctgggctgccaggaacatcaggcgtttttcctagggggcatagaatgtgcgggaaagttgtaaagttggtcatgcccactagagagcactggccaaaaattcagaacaaacgaacggaactcccgtggtatggcagtcaaataaatcaagagatgtgccagctcttttctcacagtgtagctggttgcgaatccgaacccgtcgcgtggcctagcattctgctcgaaaattgtttgaatctcttcgcaattcccaatggttggactgccatcaatccggcaaagcatctggggagtccttttggcggagaatgcggtgaatggatttgaaggaggccaggtgtttgtccgcccgtaatcgggatccaacttcactagcatcccatcaggcgatgaactgcgaggacgtgtaaataaggccaggaattcgaaatggggatgcacaagatacaggatacaggacttgggactagagaactggaactccggcggagaccagcatcattataagattatatcgcaagtccactccttgccacacatcctcatcctttggtggtgggaaaggtgactctgattttgttttgtcgactgtttgcctcggccacctttgccttgtgcccactatgcacaggtgctccagtacgcccatctgttgtctgtcgctccaaaacctttgacctcccataagccaccacccaccaccaccacatgtgtgcagattttaaattagatttctgtgtgcactccgagcatcctagccttgccttgcctcgccttttgctttacttgcgccacgcccgctttctttcgtgctgcaaagcccggttattgcggatgccatgtggtcctgattctcgtagggaa

SEQ ID NO: 27413 - DNA, 924 bp, DROSOPHILA
atgctctttcctttttccgcccgaaaggcgaatacatccgctgattttgttggcttgcggtccggattcaactttataaattgcaggcgaaatgccgagcttttgtccaagggatatgagccaccgaaggcgatcaaaacaggcacctccattgtgggcatcatctacaaggacggcgttatcctgggcgccgacactcgtgccaccgagggacccattgtttccgacaagaattgctcaaaaattcaccaccttcaggatcacatatactgttgtggcgcgggcaccgctgccgacaccgaaatgattaccctgacgaccagcgccgagctggatttgcaccggctgaacaccgaacgacgggtgccggtagtctgtgcgagcatgatgcttcgcaggaccctctttcgctaccagggtcacattggtgccgccttagtgatgggcggcgtggacacgactgggccgcagctgtactgcatctatccgtgcggttccaacgataagataccctacgcggccatgggctccggcaccttggcagccatgtcggtgctggagcacggctggaagcccgatctcgacctggagcagggcaagcagctggtccgcgaggccatctcggcgggtgtgttcaacgacctgggctccggatccaatatcgatttatgcgtgatcaccgcaaagggagcggtttacctgagaaccgatacgattgccagcgagaaaggcgagcggttgggcaaatacggcattaagcccaactccactatggtcacctcgatctccgtgctgagtctgcaggtcaccgatgagcgaatctatgcagtggatgatcaacagccgggcaccagtggcgttcagttggattcccagcaagcggatgaggaactgcccgaaggatcgcagactaaatcaccatag

SEQ ID NO: 27414 - protein, 307 aa, DROSOPHILA
MLFPFSARKANTSADFVGLRSGFNFINCRRNAELLSKGYEPPKAIKTGTSIVGIIYKDGVILGADTRATEGPIVSDKNCSKIHHLQDHIYCCGAGTAADTEMITLTTSAELDLHRLNTERRVPVVCASMMLRRTLFRYQGHIGAALVMGGVDTTGPQLYCIYPCGSNDKIPYAAMGSGTLAAMSVLEHGWKPDLDLEQGKQLVREAISAGVFNDLGSGSNIDLCVITAKGAVYLRTDTIASEKGERLGKYGIKPNSTMVTSISVLSLQVTDERIYAVDDQQPGTSGVQLDSQQADEELPEGSQTKSP

SEQ ID NO: 27415 - DNA, 3119 bp, DROSOPHILA
actttgtttaaatctacctctaatattcgtataaagttcaaagattttgatgtttatggatggcaacaagtgtcctttacaatgcacttgcctgaccgagttgaggacaaattgataacataatgccggagcgagacccttctccaaagcaaggagtccgtcgttgaggactatctgcagcatggcctgggggagatgcctgtagggcttcacataggttcctcgggcagccaactctccctgcagctgcatccgcgtcttgaccacatcgatgggattggtgaacaccaccgcacccatcgctgccgttccgcccagcacgaaatccgacttggtcatgttttcaccccaaactttggatttggttgatcttacgttaacattttgtttactctttggtcgacagaccgattgttacatttatcgaattaatggcatacattttaatgctttaatgatttaaatgctcacttggcggaataatttaaatatttgaactcttgtatttggtgtttaaaaattaaaattcgcttaagaaagaaattagtatttgtaattaatgaattttttattcaaaaatattggtaaaattcttattgaattattaattagtgaccaaaacaaataaatcactttgagaaaaggtcataatacatttattattgcttgttaaatatcaacattaatttatcgatagttacacgtatggatatcgataatttcgcggacggttaagaatggattataaggactttacttaaccacgctcgtagccaaagaataaaatataaataaatacatttttattttctcttttaacttgtttaaatctttacttaccctcttcagaggatcaaattgaaattgttattttgatgaaatatccgggaaacggatatgctactagaacgtaacttccaaatactaagctaacgaaagtaaaacaacttcgtatggttttgcatttcaaagagccccgctcgtgttaaataattttcgtttagtagtgaagatcgtacttttccctcagcgcaattagttcgtcaaagaacaaaagcaccaacgtggaatatggagcactcctcagataaatgggccaaaagcccttgtacaacccatatacaccctccgatcttaggatcgtaagcacacaatccaaccagcccctgtagtaaatgccacgaccttgggcatcaactccctgattgtaaagacgagtggtaaccacatccaatggagtgattgccagcgagacaaatgacccagcggctaagccagagcaaaaggacaggattgtgggatgagttaccactccgttttccttcaacaaactcttggcctggccaaaaactgcgatttgaacggcggacgcaacagtggcacggctcacattcgccaacgatcctcgccagagtccaaagacgccgttcttcctgtatatcttcctaatcgcatcgctcatcgaggcgtgctgatgctgataaccaacggcgatctgcttggctgcctgtgcctgaagttgcgtcttgatctagaatggaaatgtagctatcagtgatgccttatcttatcacggctagacattgtcacatattcgcggaagcagacaccttcagtgtttgatttacataatcgcttaccaggaagaagggactggcacaataggaacccacaacgccgcccaaagcgccccagaacatgccctttgcgaatgagatctcgcccttgttgttgtggacccaacccttctctacggcatgggtgtatatgctcaatctagagcagatagagagatagagcacatatgtatatttttggaaaactccttgtaggataacaaacagctttaacctaccgaaacgagtttattacaaactggaagcatagcgctggagccaatcctttttgcaagccaagaattccatcgtttttggccacagtcacaaaggcctggaagacactcttgtaaggctgagcatgagatcctcgggcggccagctctccctgtagttgaatgcgagttttgatcacctcgacgggattggtgaagacaccagcgcccatggcagccacgccgcccagcacaaaatccgacgtagccatcaatgagacgtccgttctgtatcacaatctagtgatcactaacgccacacttgcgataagctagctgcttaagacttgagagcaatatgcgttaaaatgtaacagttaaactggtttatttcaccaaaatattgcacggttaatggctacaggaagagctcttaaattagcttaatgaaggcacaagttggttctggggctttgctaatctaagagattggaactaggacattaagctaactcactaaagactaaagccagatttagacaaacaaattgtatgcggcggcacttgcatatcaaatttgtttatcaaagcttggcttaataataaaaagcaatgtgtatatttccgggtggtaaaaacgattttaacaattttgtacttaaattaatgctacctagccagtgatctttggggtcattgattactatactttgtgcgtacggcgaccagctcgtcaaagaatagcagcacaagggttgagtggggggcaatgcgcaagtagttggcccagaaccccttgtacataccataaacgccctctgatcgtaggattttcacaaagcagtcaagccaaccgcgataaagaagaccgcgtccttcggcgtctacgccctgattgtacagacgcgtggtgattacatctggcggcgttatggccaccgacataatggatccggctatcaagccagccgagaaggagttcaacgtgggctgggtcaccagatcgtactggaccaacagggctttggtcttaccaaaggtggctatctgggcacctgatcccaaagccgccctgggcaatgcggccacagatcctctccacagtcctcgtactccattcctggagtagatctgacgcagggcatctgtcatggaagtatgggcatgttggtagccaacggcgatttgcttggcggcttgtgattgcagctgagttttgatctggatgcaaaagaaaggaccataaataataatatagaaatatagacattgtacataagagaattga

SEQ ID NO: 27416 - DNA, 931 bp, DROSOPHILA
aacggacgtctcattgatggctacgtcggattttgtgctgggcggcgtggctgccatgggcgctggtgtcttcaccaatcccgtcgaggtgatcaaaactcgcattcaactacagggagagctggccgcccgaggatctcatgctcagccttacaagagtgtcttccaggcctttgtgactgtggccaaaaacgatggaattcttggcttgcaaaaaggattggctccagcgctatgcttccagtttgtaataaactcgtttcgattgagcatatacacccatgccgtagagaagggttgggtccacaacaacaagggcgagatctcattcgcaaagggcatgttctggggcgctttgggcggcgttgtgggttcctattgtgccagtcccttcttcctgatcaagacgcaacttcaggcacaggcagccaagcagatcgccgttggttatcagcatcagcacgcctcgatgagcgatgcgattaggaagatatacaggaagaacggcgtctttggactctggcgaggatcgttggcgaatgtgagccgtgccactgttgcgtccgccgttcaaatcgcagtttttggccaggccaagagtttgttgaaggaaaacggagtggtaactcatcccacaatcctgtccttttgctctggcttagccgctgggtcatttgtctcgctggcaatcactccattggatgtggttaccactcgtctttacaatcagggagttgatgcccaaggtcgtggcatttactacaggggctggttggattgtgtgcttacgatcctaagatcggagggtgtatatgggttgtacaagggcttttggcccatttatctgaggagtgctccatattccacgttggtgcttttgttctttgacgaactaattgcgctgagggaaaagtacgatcttcactactaa

SEQ ID NO: 27417 - protein, 304 aa, DROSOPHILA
MATSDFVLGGVAAMGAGVFTNPVEVIKTRIQLQGELAARGSHAQPYKSVFQAFVTVAKNDGILGLQKGLAPALCFQFVINSFRLSIYTHAVEKGWVHNNKGEISFAKGMFWGALGGVVGSYCASPFFLIKTQLQAQAAKQIAVGYQHQHASMSDAIRKIYRKNGVFGLWRGSLANVSRATVASAVQIAVFGQAKSLLKENGVVTHPTILSFCSGLAAGSFVSLAITPLDVVTTRLYNQGVDAQGRGIYYRGWLDCVLTILRSEGVYGLYKGFWPIYLRSAPYSTLVLLFFDELIALREKYDLHY

SEQ ID NO: 27418 - DNA, 17344 bp, DROSOPHILA
cgggaactggaggcccaactgcaggtggcacgcgaagccattcggcgggcggatgaggagcgggatcgctaccacaagctgcagcgcgaaatggagcagcgcaagcgccatcttctggataaggagcacgccctaaatctcaaggaggacgaactgggccaagccaccggcgcctaccgcctagccactagtcgccaacacttggccgagcagaaggctagggaggcggaccagctgctccaggccaagcttaaggtcatggccaagcgggcccaggaaatcgcggaaaaggaggcacagctggcccacgaacgaatgctggtggcgcaggatcgtatggctttggtcaatctgaagaagcagatttctcgcagcaggtgtgcaatctgcaaaatgggtgcggaatcggcggaaatcgcccagcgaagggcaaatgtaaatcccacagcagccaccgatcttcaactgcctcaagtgacacccagtcatgcggagctgctgcttaaaatgtcccaggaaccgggacaggtccagagtgacattgtggatcgaatgctggacgaaaacatcgaagcctcctaccgcaggatgtacaatgcgccccccagtagttcaatcgatgatcccgactatctattgacgttagctggtgggctggacgacgactccaaggtggccatggatcacggcctgaatgtggacgaagcatttatgtagatattgtggaaaaatttgtggaagcacaaataataacaactgagataaataaatgtattacttggcaattagtataagttttataaacaaactatgaagatacaagattacatatcgctcgaaagttaagtattttgttattcgttagaaactcaataaatttgaattgatggagtgaaacccggctacatgattagccaatactcaaacatctgttcgatgtatctttcatcgatagttgccaaacaatatcgattcgtttaccatcgctactgcttgttgcattccgttttgtgttatttcgtgctgttcgtgtttaaagttcttgcgcacaagataattgttttttttttattgtaaattaactgatttgtacataatatgtgatggtgcaagaaaatctaagaaaataacgttttgttcagtattttggtgttgcgtctattccgttttttgtcactgttttctgttcgtgtttgtgtatggtcgtttcgcatgtatgtgtgtaggtgtttaggtgtgtaggaggataaaacaactctcctaaaaacaaaaaaaaaacctttggttaagtttaaattaattgtgattcgtcaaatataacaacaaccgaggataaaagtgtaaaactattaaccggatggtctatgttcgtagccccgtcaagggaaaacctcaaccaaaaagagactagcaacgggtgtaaaaagcagcggaggtgacacctcaaaaagcaagtaagttggcaatatgcggatgagaatcacaaagcagaagtcaagtctgcatattaatgactatctccattattattttctttcgcccttccaccgatattcgttttttttaaattttattcttacgttctccggaataaattggcattcaattgggttcatttattgtttatgaatattgtttttaaaaattttttcgcaatctattgatttaccttaacctttgccgcacggaaccctctcttttgctctctcttcctcgcttcctattcctagccggttcgcattttcttatcttccattccgtccccgttcgcgacacggactcacacacacactagtgcttttgtgggtgtgtttatattaaacagctgtttcctatctgcatacgagattggcttcaatggggaaaaaatcaaaacgcttacatgctgacatatatatatacgtttatattgcatatattcgtatatatgtgtaaaatctgggaaatcagtactcgcagcattcattcacgcaaattgatgccgccgcttttgtttgtttttatatatttatttacaatcgcgcactcaattgcgcctttttgcgccactctgctgtatcgcaatcgcaaatttggagcgcttggatatggtttctatgtgcaaagtacacaagtatttaccacatttgtatgtacaaacaataagataaaatgttttgctgatgtttgtaccgaatgtcgaaactctgctaatcatacttaatatcatgcttgcataatgatgttcgaacttttctattagaagttgatattttttaaaatataaaattaattcctgtccctgccctggctatcacaaatccttgtaattacgttttaaatgcagttgtcatatccttttaaccatttcgaagcttacaaatctaataaagcgatcaatctgttctcccctattttctgaatttctgaatcattggtgcccgctaatgacggctcattatcgatcgcgaatattcctttgcaacttaaaaaaaaaaaactagtgataggcacccccactctgtcgcaagtggtcttccccccatcgaatgctatctcacctgttcttcgtccaggtactcatatagtaccattgccatttacactgcataatcacttttatcaccgcctgttcgttatcgcagagataagcaatcccaaaagcaaacacctttgttcaacaacaaataggcattggaagagaaaatacgaaaataattttaacaaaatttggaaatcgctcacattttgttctggttcccattcgcagctcaacggaccggacgctttagacgaggggataatgtcaaatcaagcgcatatcgactacgacaaacaattccaggatgacctggccaaggcgaccgccctgagtctagagcagcatgccctcgatgactacaggcgaaacaagaagtacggctccgggtatcagcaaagctccaccgttgctggccgagattaccaggcggcgcaacgtagtcagagcctacatcaaccacgacggcactcggaggtgcatcaggtggccatcagtccggagaatgcggaacgatcgcgcacaccgccggcccagggaacggataacgatctgatctgcttcgcaagtcccaccagcaagcagccagagagtagcagtccctttggcaaacttatagaggatctgcagcggatgcagccgaccaatccgcagtcggccctggtgccaatgggtccagttgcgtcggcttcgattcctcctcaatacggctttccacctcatcagcaacgtccaacggctgctcagcccacaccgtacggcatggttgcaggtggagttgttggtggaccggcttacggtgacctgcagttggtgccttaccaaccagctgctcagcaacagaggccactaaacagcgaggagctgcagcggctgtacagcatgcccgctcaaatggccgtggttccagtgccgcagccaaacgcctatatgtactatcccggagctgtggttactccatacacggctcccattgttcccggatcggctgcttttatgccgccgcagtatcccgcacagggatatggctttggaggtgcttacacgcacatggatttgcgtcgaccccaatcgcaaccagctccccaacaaacagcaccgacaacaagtcatcatcacagccaaccgtccaaccattccacttcctcccccgcagaggccaatggagtagccttcccagcgcgtcgccaagtgccctcgactgtcggggttagctctagtagccacactggaaacaatggtcattcctcggtcccacgcaggggcaacgatttgatcgacctcaaccacgaggactagtatgtatccactagtgttcagaaatgattagttcgtgtttttaacattcaaacatcctgctttgcagctcccgtgtgagtgtgctggaggcattcgatcccctgctaaacgacaatactggtaagcagcctcaatgttgtaattaacgtgtagctcccggtcctcgttgaaatccccccacatttttcgcaccgtaaactaaacttgaaatacagtcgaaaactcgtgtgttgcgatttttggccagagcattcatttgagctgcaaataaaaattattggcataataacattagtggatttttcaactcaatctctaggagagaggaatattaaattgaataggaacaagcacacgattttgtatttgtatggtatttactaataggttttattaattttatatttatcccattatttgtttagcaacaattagtttggctagatatacgagatcctttttagaattgcccgtagcaagttgtcgctcgcctttagttaagaattaaactgaatgtttccgtttctctatattgcagtgtcgaaaaagtaatccattttaattgtcctctactactatcagtactactactaccaaaaatgcaaaaaagcaactactttacacccacaacaactacaccatctaaagggtttcggttcagattggttcgtttcggaggcaatgacagattagtgtctataacagcacttacttagaccaccttattacacaaaaatactaaagtaatatatatacatatatgtatgtgccctcatatcgaaattcgtgccttccgctattgccggaataattttgaagtcagcttatatatcgatgtccaaaatgtcgtattcaactagttcgcaatgtttggaattggtttctatgtatattcccgcgactgaaaacttcaaaatttaaaagaatttaacgactgtcaattgaaaagtgatgaaatgagaagaattagtcacttctttttaataaccatgtattacgaaatgaacaaattgtgatttgctgctacatatatccattaatacacttatatacaaaaataaatacatacatatgtttaattctatcgtgtaccattgtgagagaacaaataaataatttcttaaacaaattgcagtctgttgttgttttattattcgtttagccgcttgcttccatttcccattaaaagattaaataacgcacattcacgcttctctaactaataattgacaatagatttgaagcttttcgagcatatgtatgtatttatttatttcattctggctagattggaaaatcaactaactctttactatgatttgcattcaagtcgttgcacttttgtcaaattacttgtacgcttaccctttttgttttgctggctttcaaagttcccgccaaagtagcaatgcatttcaaacagatgtatttaccaaacgcttttaaaataacgacgtgtttagcaaatagctttcccttttgtggcaaatgaaacagatgtatgggcaccagaggggacagatttagaatgaatataaacaaagcgatttaaaaatacacacttaggtacagtgattatacattgttagtacatacgctcttctttttaagaatttgatattcattttaatataggaaaccattatcatccgcaaaaactacattttgcgcttttttttaaacataaaccctttgtacttttgatatatacgaccttatttttaaaaaaatttcgaatgatattggttccactgtactgggtcagcgtgggcgacgaatgacagcaatcacaattagcttttagcgatggcactcgcctcggatttgttagcgtagatttgcgaagcgttctcgcattgccagtggtgctagtccaaccgatccacatcgcactgctgcgactttaggggccgtctcatttatttttggccacacgatgtgatgtgcccggattctcgcagtagtaggcctcggctctcgagcatatttgcataactactggcgatattcgcggtgtgaactggatttaacccggaactgatcatgcactcactacttgcaggcaacgacaccgcctccgacagcacttcctactatgcggaatacgatccctttgattttctgtacagcggagatgcagcaacccaatattccgatccaatgtatgaggcagtcaacaggtgggacaaaactgtggccaccgtgagtccgaatgttggtctaatcggttggcgccaagattttctgagccagccatctacatcttcatcgcaatatggtgttgcgccgccagaggagagtctgaagcttgcggagaacggatctggaactatctcgcctcctccgccgttgccgccccggaaccagcagtgctatgaatcaaaccaggcagccatgccggtctccaggcctcctcagtcttctgttttgacggacagctacacctccagcattccggccaacgtggtgctggaccggcggaaaacttgtacacgactgtacgaattgatcagcgaccagcgcactgatgatcccgaacttttggaattttaccacatggtaaaggaggtgagggcacgctatccgcatgacgatgcgcccaccaatgtgggacatgttgtggccgccgagtttaattatcactacatgatggacaccagcatcaaagtgattgtgcatccggctctaaatacacttcaatcaacggtcctggctgcgtccatgggcaaggaacaggtgaagggatatggaatgccagtaacattcacttgcgatagtaagtataatactaaaatgtttgaatgcctctctaatgtttgcattttgtccaaaagttgattcggttgtggcacaggtggtggcacaagctttggcctcgctggagggacaagtcaagggtaccgtcacagattatgcggtcaaggtgggtacattagattgaagatttttgcaaacggaaagttgaaataattctttattcacagcccattggtcttctggagtggctggcacccacctcgagactgagtcagctggagtgcgtgcacaatagcttccaattggagaaggatgtacatttgggcctgtgtcttagtacggcggcaaacatgcaggctattgcacgaactgagcgggatgatgagcacgatgcggatttgctgccggaacatcttcttcccaacgaggtggtgccaattgtgacctacgacaatatgatgatactcatcgaaacgctggagatggagattgacaagctggaatcggcggccgacggagtacccggacggagtgtcgtgagctgctccggagttgtccaagcagtgaaggccatatgcgcactgctcggttcaatcgacacaatggaaattgcacgatgtgttgccgatctgaagcgcatttgcgaggtggagcaaaagaagtactcgacgggcgctagcaacccagagattgtgagtgactatggtgattacgctcaagttgtactccgcccgcgctccatgctggagcagatcaaggtcaagtgcaacgagctgcgagatgcagtgcaagagctggttgaattgtatgcgaatgttttccgggtggcattctccgtgaagacgcccgattactcaacaagtaagagtgctaatgggaaacaaatttcctttgtttacttaacttatacgtacttttacagcacccatacccatttcctgcgtgtccaaaccaattgtggtatgcattagctgcctacacaggccgctgccgaattggaagttcgacgattattccctgtgcgtacaaatcgtttatggaacgcgcctgctgtcgaagccgaatgtgctgacctgctccaacgatacaagtggaggcctgtttcctcgtcttaacttcagtgcctggctgactttcgatcagcatcccatctgcactctgcccagggaggcgcgccttacgttcgtgttgtatggaaaacaggcggccagcgaaggcgaacccaacgccgatcagaatggagagaggcgtcaggtgaccactgaactgggttggtgttcgatccaactgtttgactttaagcgagtgatgatctgcggcccctacttactgtctttatggccaccaatgacggacaaaatgcttggaccagctccggctcgaggctgtcatccgcaacccgacttttgccccgttttgagcattgaagtacctccgtatggaggacgcattgagtttcctgagcaccaggaggtgccaaaacctgcaccacagttagtacagcacatatacaaatggttgaaaatagttctaatgtaatcttgtaatcctcgctagctacgattttgcctctctggatgccaatcttcaagaggagctgctggacaccgcagagctgggctacacaggagccacagaacgacgtgaagtgttctgggaaaaacggctctacctgcagagctatcccaatgccctgccaaaggttcttcatgccgctcacagttgggattatgccaatttgatcgatttgcatgcgctgctgcactcctgggcaccactctcgccattgcagtcgttggagttacttctgccacgatatccggatgctaaggttcgcgagaaagccgtggagtggatctccaagatgcccaacgaccagctcgtcgactttctgcctcaattggtgcaaagtttaaaacatgacacatacgaaggctcggcaatggctcgattcttgctgtccaaatgcctggagtcaccgcgctttgcccatcacatgtattggctgcttgtacacagtctgcctgacgatccccacaactctattggagcagcgatggtggatcaggagtatgacgagtctcaggttacccaggtccgttactaccgccggaacaaaatgatgctgcgtgctttaatggcgatttgcggcgaaaagatgcttcagcgatttatgtaccagcaccgaatgtgtcaggtaataggtttcttaaaacattgaagaaatcaccgaagacaagtctcgattttgccttattcatgattataaatgatatgttttgtgttcacagaaacttactactattgcggagtcggttaaagaggctaaggagtcgatgcgtcaaaaaagcctagccgcaggcatggacgaggtgcaccaagacttactggagcaacccacttgcctaccgctgggaccagaactggaggtaactggagtgagtgtgcgtaactgtagctactttaactccaacacgctgccgctgaagatcaactttgtgggacctgatgccgaatctttaccggctatctttaaggtaaatattcattcacaaatgatatgtataaactatataactataaactttcttagtgcggagatgacttgcagcaggatcagttaactatacagctaattaggattatgaacaaaatgtggttggccgaacgattggacctgaagatggtcacctttaattgtgtgcctacgggatacaagagcggtatgattgagctggttagcgaggcggaaacgttgagaaaaattcaagtagagtgcggtctgacggggtcctttaaggatcgcccgatcgctgagtggttaggcaagcagaatcccagtcctctcgagtaccagagtgctgtgcgaaattttacgctatcctgtgctggatacagtgtggccacgtatgtgctaggcatctgtgatcgccacaatgacaacatcatgttaaagacttcgggtcacttgtttcacattgactttggcaagtttcttggcgatgctcagatgtttggaaactttaagaggtatttaaattgatgaagtttttaacttttgaagacttttacatattatttatttcccacagagatcgcactccatttgtcctgacttccgacatggcttatgtcataaatggcggcgataagccctccacagactttcactatttcgtggacctatgttgtcgagcctttaatatcgtgcggaaaaatgctgatctactcttgcacaccctggcccacatggctacagcaggcatgccgggagtaaactccaatgctgtgcaatatgtacgacgcgccctattgccatctcaatcgaatcccgaggcagctgccacatttgccaagatgattcaatcctctttgaaaagctggttcacgcaattcaatttctttctgcacaatctggcccagatgcgtttcaccccagacgagggatcaggagagctgctatcgttcgtgccacgaaaatatacgtacgtttttgtatcctttagtttatcacttttatctacaaatgtctccggtttcagaatgcagcaggatggtcgcttgaagattgtaaaggtggtgtgtttccagaagcattacagcatggaaaagttttatatgtatattctggaagtgacgcgacatggacagcccgatccgacacatttgttccggtcatatcgggaattcacggaattccatcagaagttatgcatgcactttcctttggttaaactgcacaggtaagtttcagtttgtctaatttttagaccacaagtagtgttattagtttgattcgctttaaaaactaatgacattgataacgtgctgacttcttgtgtctatcaggcgcattatctagacattaaataatggcaaaaatgtgattcgttattgattcacctcccattggaggaaagtttgaacacatttttatcataaatggatttcctgccattactttattattttatgtagtcaacatgatatggcaatttttcagtgatatgtatgtacataaataggtcatagtcatttggctaaatttaacacatagaatactgtatttactaaggaagtcaagacttgcggcagtttcctgttttcggactagtcatcggtattgtttctaacagcgtttgtcctaagtgtcgcagtcatggagcgatgttggctgatagctcgtccaaagccattatcgtcatcactgtcttcctgggagacctgggatccgaataggctgggcactccagtattactcggttcaaaaatgatcgaacgctgcgtgggagttggctgttgcatcggctcatcctcttcagactcatcacctgatgttaccacctcagcggactggtagtactgcagattatccacatcaaagcggactttgagcgatttcggatcacgtttggcaggttctggagctgatcgtgctccctcctccccatcggtatcactggaactggagctgggaagctcttcaggttgatagcacgcaaggggagaagtactaccacgaacattgagggatctggctgatttggtagacctgggcgcgggctgaggagcttgacgctctgatggcaccaccacagccatttcctggcacaaggcctcgaaattggggatttcattgctctggttgacttgagaaccgtttatctccacctcattaacatccagatccgcgtatagatcctcaatgctcattacataattggatgtcttggacctttgttgcattacctcggtgtagtcgggcaatttctgaccgttctttgcaatatctagccgcatcagggattcgtaatctggtagatagggcagaccaggatcgtatggcggtggatttataatgggagctggcggctcaggctcgaatatatccattctcggctctataagctctagttgatggaacagaccctccacctgttccacatcgtccagtctgacggcagcctcattaagcgtcgcctccacagtgggcacttgctctaagctattcggatgcagagaccaattgggctctggcacatccaccacggcgtctaggttggcaaagttctcccagtcctcgtcgatgctcttgccaaatcctggtggactactggccgccggcagctgcagctgatccaaatccaggatgtcggcttcgttcatcacgaatgacgaacgtattcgcacgaaatcactgtcgtgctcaccttgtggtaattcaaggttttcaaataggccattttgaaaggtgggctgtatactaggagtcgcttccgcttcgggacttcctgctatgatttccacgacaaaagctgagtctgtattgctgggtcccccaaagggatcggtatcatttggtgcttgcggttcatctttcgattccgtttcttccttgggtatggctcccctatgaaccacagcggtaactgacatcgctcctcccaaaccatcatctggagttagtaactccggaacgggatcctcaggagtgagaatttccggcacatcatcaactggctcgaacttcacatagcggccgctgttcttgcttcgcaactgtgttggtctagtgggcgcagtcgttggttttacactaaacaactcgtacttttcagcaaagtgatcgaagttgggcattcccagttcgctaggaggctcgggagctgtgtcgacagaagctgcaggtcctgaaggcttggatgcagcagctcctctcatggtcctgggaggtggagcagggatggattctagtatcttaggtagtgaaactaccgaggcagtttcagctagtacttctgattgtagtggcggagaaggtggcttgcgggtaggtggagcggtgtagaattcatagtgctcactgtgcacctccagtcgttgtgcctccgacttctctcgataggaaactggtgattcttccgtggatttgggctgtcttgggctggcgccatatagttgcagatttggaacactgccactgatgaagttgttccctgcagggtaggattttgtttaaaaaatagtttccaaagtgaaaggtcgtcgaaccattcaatatcatttcgactgtagtttcaattgaatggttaccgtttcctatcttcacctgtcgttgctgatgccgatggccatgggctttcgaattcctcgagattgcgacgtcggaacactccatggacagcagtatcggtgccgttaacctgggaaattgcacaaattgtactttaggctattacgatatattcggaattatattagcaccgagcacatcagctgtggattcagctgtttgggctgatcacttgcatgcgtcaccagtggaagttctaagtggtttacacatgaccacagacacgccagctcagacgactattaaaacacgttcataggaaaggggattttgggttttgtttcgagctgtttaagaacatattatcatagatgaatcattaattattgaagttcgattatagtgtcgtcctaaccctgttcctttaagatacatttaacaattttgctctttgcacatcatttattggttttattcaatcgatttcctctttactatacacacttaggagtttgaatgaagaacacccattctacctgagattcaaataagtgaaagcttgcgatttgcattcctcacgcccccatcgctatcttcaatccccaacttacacactctctacaatcatatagccgcaacacctgtgaatgtttgtgtttgtgtttgtatttgccctgccttatcagaaccactcgtcgctggatcgctgagtgtcgtatatacagatacatatgtatgaatattggtatgggtatagctttccttgtggtggtatcggtatcacattaacctttattaactgcgtgcatcgggtgttaagttcttttgatttgcatacgcacctgcgattcgaaagctgcgtaacgtggcggcggttgttgctgctgctgattctgctgttgccgctgcacctgcgatcgctcgaaagtcagtcgccgccggaagccgaagaacttgatccccagcagcgcgaatatcagccccatgagcaacatggccgaggcaagcatggggccaacaacaagaacggcctgttgacctgctggggaatgacggggttggtgaaaagtgtgggcatctttcgagctggccacctaccttggcccacattcttcagctgggccatgtctttttgtctcaccagcaaatctgttggctcggcattctggataaagtcgctggttggcacagtcgccctttgttttgtggccaaaagtgtaatgaaacttcaccacgtcgctaatcggaccgctctcggctccgctaaccagctcgctcgtcgactgattgagcgctgacgttggcgcaacagcttttggcagcgtagtcgccgcttatcggagcgattcggcccgatatcgtttactcggcccgctcttctttcacccactatatggggtctgctgctctcggtctctttggttctccgattctccggttctccgattctacgatttggtgaaatcagtctgcttcattcgtcgatttatcagctattagcggtgttacctcggcgacatgggcagtgataagcaatcgcgaatttgtactatgatttgtcaacgcaccttgacaaaccactgactatataaaaaccatgaaatgtaataataacttgaccattttatcttcggtgataaaagccgccttgtaattgggaataatgtgatagtgtaaacatttaattatgagcttacactaccattttgaattgattacagcatataaagttctaattatttataatgtaattaacagcgtagcttatgtttataattagttttcctacgttgcaatttgaatgtttttaatatatttcagtctgccggctggtgtgcatgtgggccgttccaatatcaaatccgtggcagaaaaacgactacctcttattcagcgatttttgaaatcgttgttcgatgcgtccgaggaaatagcccattccgagctcgtttacacattctttcacccgctgctgcgcgatcagcaggaagccaagcttgggatgccgaagataaagggtaaattacgatgcactaatttccaaattgcattgcaatatatatatatacggattttgcagaggtgaagcaacaaccgtcgcgggataatccccacgagattggccaaatacgactatcgctgcaatatcaacgcggcgtacttactgtgatggtgggtagatggtagataaaccccattttgataaatattaatcgagcctatacgtattgcagatacaccacgccaaaggactgcccatgttacagggcggtcaggagcccaacacatatgtgaagtgctacctaaaaccggatcccaaaaaggagaccaaacgcaagaccaaagtggtgcgcaagacctgtgtgcccagtttcatggaaactgtaagcagagactgattatcctggattatctttttaatttgtatttataaatctttttagttggagtaccgaatgccactgaatattattcaagagcgccgccttcaggttacggtttggtcgcacgacaccctgcaggagaacgagctgcttggaggcttcgatatggatctgtcgaagtacgacctgcgacaggagctcgtcgactggtatcgcctgggcgcggtgtccaggaactgaccagatcctagggacgagctcttttgaacctcttgggacactctgcctaccgacaatcaggcctaggataatgcaatactaatatatgtttgtgcctgtcttctttcgatcgcaataatacttacttactcgaagtgattgtacattccatataccaatattaaaaataacataacagtagtagtattatttcgtaaaatgtgtgcctcaaatgtaaatattttataatgaccgcaaacaacattcttttggacatctgaatgtaattataactataaagtatagaacatgcttactctatttacatttaaaatcaatcaattttattgtgcaccttgggaattcagaaaatgaattatattggtagtttgtttgaatcgttctgtcgtcggcacctggctattgttcttttgaagtagttaaatataaaagttcagtattatggcttaaattctataagagattattaaaaaccttctagctcgctggtctgtaatatctaaaattaaaacttgcacgaagaataatcattactaacttttttgcacttttctaattacttaaagtaaaaagagaactaaaatttcctaaagaaattaggcattgcaagcagaataacgcacagatacagattctttctgattgtattttgtttctcacttaatattcacaaaattgctttcagtgtctcaatgagatggcatccaaagcaaactcctgactgcgtctaaaacaaatttacaaagttatagggaattactatcagagagaacaagaactaaaagtgtcttaaaaaattaaacgaatattgtaaaatatataataagagcacacacacaccgcaaacaacaaattatatttttatagaaaaaagaaacattcaaaagctacttctgcctgagcatttcaaatagtactttgatactgattaaaaactacctaagacgtatctgatgttttcataaaattataattaataggaaaaaattaaatttctgtaagtgttgaggaatcgtaaaaatgttagctggcggtaatcacttttggcacaaatatatgagcataaaaaaaggcatacaaccaatgcagttttgattataaaccgggtttgcaactacctaagtctgctgattcttctattcacatttacaagctaaaacgaatctacattgccttagaagtattatttttgttgaaacgtttgtaatatttgagaaacagtcagctgtgttccttctgtctgagttttgcttaaagcgttcaaattttgtgatattataaatttaaattgtttaacgagcaaacaccgaaatggcggctgccaacatggagaagggtgagctgatgaaccaggtgaaacaacagatcgcattggccaatgcccaggagatgctctcgaagatgacggagaagtgcttcaagaagtgcatccagaagccgggaaaatcactggactccaccgagcagcgttgcatttcgcagtgcatggatcgcttcatggacgcctggaatctggtgtcgcgcacctatggcaatcgtctgcagcgtgaacagtacaggaccatggaatcgttggagatgaccagctaggactagcagctaggattagcagctagattgcactcatcttgcaattaaaatcgaatttattttgtttgtgatccaatctcgagtcgctttttaatctactgacagtccagcccttaactgcacgcttatcgcagcagaggtgatagccggctgattatagggaatgcaattgcaagtgaagaccctcccggggattgagggtgctgtctatgggtctaagccgatagcttccagcttgatatgagcacttttcctgatcgttatcgtgtttggaatggtctcgttagctaacggatgagcaagtgctcggctcactggcccaaatgcagtttgcccggagacgccggttaacccagcactgaaatgtgtagtttcgagaccactctaatccattgcagcattttcaacaatatgcaaattcatcccgattttcttgccaactaactccgttgggttttttcttacattgccatttggacattg

SEQ ID NO: 27419 - DNA, 7191 bp, DROSOPHILA
attccgttttgtgttatttcgtgctgttcgtgtttaaagttcttgcgcacaagataattgttttttttttattgtaaattaactgatttgtacataatatgtgatggtgcaagaaaatctaagaaaataacgttttgttcagtattttggtgttgcgtctattccgttttttgtcactgttttctgttcgtgtttgtgtatggtcgtttcgcatgtatgtgtgtaggtgtttaggtgtgtaggaggataaaacaactctcctaaaaacaaaaaaaaaacctttggttaagtttaaattaattgtgattcgtcaaatataacaacaaccgaggataaaagtgtaaaactattaaccggatggtctatgttcgtagccccgtcaagggaaaacctcaaccaaaaagagactagcaacgggtgtaaaaagcagcggaggtgacacctcaaaaagcaactcaacggaccggacgctttagacgaggggataatgtcaaatcaagcgcatatcgactacgacaaacaattccaggatgacctggccaaggcgaccgccctgagtctagagcagcatgccctcgatgactacaggcgaaacaagaagtacggctccgggtatcagcaaagctccaccgttgctggccgagattaccaggcggcgcaacgtagtcagagcctacatcaaccacgacggcactcggaggtgcatcaggtggccatcagtccggagaatgcggaacgatcgcgcacaccgccggcccagggaacggataacgatctgatctgcttcgcaagtcccaccagcaagcagccagagagtagcagtccctttggcaaacttatagaggatctgcagcggatgcagccgaccaatccgcagtcggccctggtgccaatgggtccagttgcgtcggcttcgattcctcctcaatacggctttccacctcatcagcaacgtccaacggctgctcagcccacaccgtacggcatggttgcaggtggagttgttggtggaccggcttacggtgacctgcagttggtgccttaccaaccagctgctcagcaacagaggccactaaacagcgaggagctgcagcggctgtacagcatgcccgctcaaatggccgtggttccagtgccgcagccaaacgcctatatgtactatcccggagctgtggttactccatacacggctcccattgttcccggatcggctgcttttatgccgccgcagtatcccgcacagggatatggctttggaggtgcttacacgcacatggatttgcgtcgaccccaatcgcaaccagctccccaacaaacagcaccgacaacaagtcatcatcacagccaaccgtccaaccattccacttcctcccccgcagaggccaatggagtagccttcccagcgcgtcgccaagtgccctcgactgtcggggttagctctagtagccacactggaaacaatggtcattcctcggtcccacgcaggggcaacgatttgatcgacctcaaccacgaggactactcccgtgtgagtgtgctggaggcattcgatcccctgctaaacgacaatactggcaacgacaccgcctccgacagcacttcctactatgcggaatacgatccctttgattttctgtacagcggagatgcagcaacccaatattccgatccaatgtatgaggcagtcaacaggtgggacaaaactgtggccaccgtgagtccgaatgttggtctaatcggttggcgccaagattttctgagccagccatctacatcttcatcgcaatatggtgttgcgccgccagaggagagtctgaagcttgcggagaacggatctggaactatctcgcctcctccgccgttgccgccccggaaccagcagtgctatgaatcaaaccaggcagccatgccggtctccaggcctcctcagtcttctgttttgacggacagctacacctccagcattccggccaacgtggtgctggaccggcggaaaacttgtacacgactgtacgaattgatcagcgaccagcgcactgatgatcccgaacttttggaattttaccacatggtaaaggaggtgagggcacgctatccgcatgacgatgcgcccaccaatgtgggacatgttgtggccgccgagtttaattatcactacatgatggacaccagcatcaaagtgattgtgcatccggctctaaatacacttcaatcaacggtcctggctgcgtccatgggcaaggaacaggtgaagggatatggaatgccagtaacattcacttgcgatattgattcggttgtggcacaggtggtggcacaagctttggcctcgctggagggacaagtcaagggtaccgtcacagattatgcggtcaagcccattggtcttctggagtggctggcacccacctcgagactgagtcagctggagtgcgtgcacaatagcttccaattggagaaggatgtacatttgggcctgtgtcttagtacggcggcaaacatgcaggctattgcacgaactgagcgggatgatgagcacgatgcggatttgctgccggaacatcttcttcccaacgaggtggtgccaattgtgacctacgacaatatgatgatactcatcgaaacgctggagatggagattgacaagctggaatcggcggccgacggagtacccggacggagtgtcgtgagctgctccggagttgtccaagcagtgaaggccatatgcgcactgctcggttcaatcgacacaatggaaattgcacgatgtgttgccgatctgaagcgcatttgcgaggtggagcaaaagaagtactcgacgggcgctagcaacccagagattgtgagtgactatggtgattacgctcaagttgtactccgcccgcgctccatgctggagcagatcaaggtcaagtgcaacgagctgcgagatgcagtgcaagagctggttgaattgtatgcgaatgttttccgggtggcattctccgtgaagacgcccgattactcaacaacacccatacccatttcctgcgtgtccaaaccaattgtggtatgcattagctgcctacacaggccgctgccgaattggaagttcgacgattattccctgtgcgtacaaatcgtttatggaacgcgcctgctgtcgaagccgaatgtgctgacctgctccaacgatacaagtggaggcctgtttcctcgtcttaacttcagtgcctggctgactttcgatcagcatcccatctgcactctgcccagggaggcgcgccttacgttcgtgttgtatggaaaacaggcggccagcgaaggcgaacccaacgccgatcagaatggagagaggcgtcaggtgaccactgaactgggttggtgttcgatccaactgtttgactttaagcgagtgatgatctgcggcccctacttactgtctttatggccaccaatgacggacaaaatgcttggaccagctccggctcgaggctgtcatccgcaacccgacttttgccccgttttgagcattgaagtacctccgtatggaggacgcattgagtttcctgagcaccaggaggtgccaaaacctgcaccacactacgattttgcctctctggatgccaatcttcaagaggagctgctggacaccgcagagctgggctacacaggagccacagaacgacgtgaagtgttctgggaaaaacggctctacctgcagagctatcccaatgccctgccaaaggttcttcatgccgctcacagttgggattatgccaatttgatcgatttgcatgcgctgctgcactcctgggcaccactctcgccattgcagtcgttggagttacttctgccacgatatccggatgctaaggttcgcgagaaagccgtggagtggatctccaagatgcccaacgaccagctcgtcgactttctgcctcaattggtgcaaagtttaaaacatgacacatacgaaggctcggcaatggctcgattcttgctgtccaaatgcctggagtcaccgcgctttgcccatcacatgtattggctgcttgtacacagtctgcctgacgatccccacaactctattggagcagcgatggtggatcaggagtatgacgagtctcaggttacccaggtccgttactaccgccggaacaaaatgatgctgcgtgctttaatggcgatttgcggcgaaaagatgcttcagcgatttatgtaccagcaccgaatgtgtcagaaacttactactattgcggagtcggttaaagaggctaaggagtcgatgcgtcaaaaaagcctagccgcaggcatggacgaggtgcaccaagacttactggagcaacccacttgcctaccgctgggaccagaactggaggtaactggagtgagtgtgcgtaactgtagctactttaactccaacacgctgccgctgaagatcaactttgtgggacctgatgccgaatctttaccggctatctttaagtgcggagatgacttgcagcaggatcagttaactatacagctaattaggattatgaacaaaatgtggttggccgaacgattggacctgaagatggtcacctttaattgtgtgcctacgggatacaagagcggtatgattgagctggttagcgaggcggaaacgttgagaaaaattcaagtagagtgcggtctgacggggtcctttaaggatcgcccgatcgctgagtggttaggcaagcagaatcccagtcctctcgagtaccagagtgctgtgcgaaattttacgctatcctgtgctggatacagtgtggccacgtatgtgctaggcatctgtgatcgccacaatgacaacatcatgttaaagacttcgggtcacttgtttcacattgactttggcaagtttcttggcgatgctcagatgtttggaaactttaagagagatcgcactccatttgtcctgacttccgacatggcttatgtcataaatggcggcgataagccctccacagactttcactatttcgtggacctatgttgtcgagcctttaatatcgtgcggaaaaatgctgatctactcttgcacaccctggcccacatggctacagcaggcatgccgggagtaaactccaatgctgtgcaatatgtacgacgcgccctattgccatctcaatcgaatcccgaggcagctgccacatttgccaagatgattcaatcctctttgaaaagctggttcacgcaattcaatttctttctgcacaatctggcccagatgcgtttcaccccagacgagggatcaggagagctgctatcgttcgtgccacgaaaatatacaatgcagcaggatggtcgcttgaagattgtaaaggtggtgtgtttccagaagcattacagcatggaaaagttttatatgtatattctggaagtgacgcgacatggacagcccgatccgacacatttgttccggtcatatcgggaattcacggaattccatcagaagttatgcatgcactttcctttggttaaactgcacagtctgccggctggtgtgcatgtgggccgttccaatatcaaatccgtggcagaaaaacgactacctcttattcagcgatttttgaaatcgttgttcgatgcgtccgaggaaatagcccattccgagctcgtttacacattctttcacccgctgctgcgcgatcagcaggaagccaagcttgggatgccgaagataaaggaggtgaagcaacaaccgtcgcgggataatccccacgagattggccaaatacgactatcgctgcaatatcaacgcggcgtacttactgtgatgatacaccacgccaaaggactgcccatgttacagggcggtcaggagcccaacacatatgtgaagtgctacctaaaaccggatcccaaaaaggagaccaaacgcaagaccaaagtggtgcgcaagacctgtgtgcccagtttcatggaaactttggagtaccgaatgccactgaatattattcaagagcgccgccttcaggttacggtttggtcgcacgacaccctgcaggagaacgagctgcttggaggcttcgatatggatctgtcgaagtacgacctgcgacaggagctcgtcgactggtatcgcctgggcgcggtgtccaggaactgaccagatcctagggacgagctcttttgaacctcttgggacactctgcctaccgacaatcaggcctaggataatgcaatactaatatatgtttgtgcctgtcttctttcgatcgcaataatacttacttactcgaagtgattgtacattccatataccaatattaaaaataacataacagtagtagtattatttcgtaaaatgtgtgcctcaaatgtaaatattttataatgaccgcaaacaacattcttttggacatctgaatgtaattataactataaagtatagaacatgcttactctatttacatttaaaatcaatcaattttattgtgcaccttgggaattcagaaaatgaattatattggtagtttgtttgaatcgttctgtcgtcggcacctggctattgttcttttgaagtagttaaatataaaagttcagtattatggcttaaattctataagagattattaaaaaccttctagctcgctggtctgtaatatctaaaattaaaacttgcacgaagaataatcattactaacttttttgcacttttctaattacttaaagtaaaaagagaactaaaatttcctaaagaaattaggcattgcaagcagaataacgcacagatacagattctttctgattgtattttgtttctcacttaatattcacaaaattgctttcagtgtctcaatgagatggcatccaaagcaaactcctgactgcgtctaaaacaaatttacaaagttatagggaattactatcagagagaacaagaactaaaagtgtcttaaaaaattaaacgaatattgtaaaatatataataagagcacacacacaccgcaaacaacaaattatatttttatagaaaaaagaaacattcaaaagctacttctgcctgagcatttcaaatagtactttgatactgattaaaaactacctaagacgtatctgatgttttcataaaattataattaataggaaaaaattaaatttctgtaagtgttgaggaatcgtaaaaatgttagctggcggtaatcacttttggcacaaatatatgagcataaaaaaagg

SEQ ID NO: 27420 - protein, 1876 aa, DROSOPHILA; identical to SEQ ID NO: 12702

SEQ ID NO: 27421 - DNA, 2368 bp, DROSOPHILA
ttaatttctatgtgtatgcgtatcgatttaaatggttttttacctttatttatgtaattagtaggcttctgtattatttgtaaaaaattgtgagcgagtgttgtgctagcaggaggcaacctctagttttatttttaccctgtgtgcatttccagcatttgtttcgtactgttttagactccagcctccgcgtaacgtagcaaagaagtcggacaaaaagtgggacgcatatatcagcagcaacaatatttagttgttaatctagccctaattttaagtaatgcaaggaacccaattaacctaaaaacaaattagcgcaaagtttaaactgatgtttgggtatacgagatgtatgagataaatcctaaattccactaatgcagagattataaatataaaacaaaaaaaaaaaaacatttttaaatcaaatctaaagtatttttttgtacatgacaatgtgtttagaacgtggtgtaaagatctaaagaatgcataaactaattgattactataacaaacgaattgtacgacctaaaatgcctacacacaactgaaccacaagctaaaaagcggatgcatttatatattttcacgccgtcaactttgataaacgtatttaaacaaatctacaacagaataaacttgagctgcgcaataataataatttttaagatttacaaatagaaataaaggattaataaaatggcaaaacttaacgcatacaatttgtaccaaaaaaaaaaatgaaagaataatgaaaattcacacaaactaaataaagatttatatatgcgataaaagcaagaagaatgagaagaaaaaactatagagaatgctgaatcaaaataaatatcacgcaaaatcaaccacattaatgtttgtttttggtgcatgtttttaaatcttgtaacgttctaaaatttattgaattttagttcaatttcttctgtaaaatagatttgaactcgttcaaaaccgaacattttagaaaaccaaaacatttatgttctttgttcaatattgctctttattaaaagttaaaggcggtttaagatcgatgaagttgccgtcacgccttgctccaaatggagatgtctagccgcagcaggcgacgtcatcgtgcttgtgctgagcctgaacgtcctcggcgaagtgaacgctgcggaccaccgggtggtggtgatggtcatcgccaaccatgggggcctcgttgttcagttggggaagggctagaatgtatgggaagcagttaagtagagctgttgtcgagcgtaacccattgcaatccttgccagaggccatgaagaaggcgaggcccaggatgagagtgcacacgagtaggaacttcatggtaaagctggtttgttgtacagatggcttgcttgcttctgatgccttggaactgcacagactccctatttatacagaatgcggctcgataaaaaccgctccaaatatacaaaaacacttgtcgttgcacaatttgcgagcaactcgttagttatagatgaattgatattgaaatgtcgcttggtgtatttggcagcgatgggtaacgccattaacgaaacacataaagcttaacaattgatttcttttctttttgtttttttgtacaaaggagcttctataattaaacaaaatgtgtaggggagaaataagaggtactttaaaaatacgcttacaaagcgagggtgtccgaatcaacatgtaggaaaaaagaaaagggtaagggaactagcaattaactaaataaacgtcctggaagctggccggtgctcatgtactgttgttgttactttgccgcggcttgagtatcagcttccccgtgtcgtcacagctcatattaaagtctcccagtaccattcgcgttctcgatgtaattatttgcggagctatgactagtttctgtatgcccaggatgaacaggacgactgcggagagaaatgataaggtttacaaaatcagtaagtcagtttcaaaccaaaaaaattagattagattaaatggaagtgtttgttagctgaaaattcttaatcagttggactatcaatattgatatatacaaatcgaatttgataaagcgaagagctttgacaagattaaaggcaacctaatgttgctaaaatttggagaatgtacttatgtagtttgcatagatgtgatagatataaggagtgtattctactcaaaataacagtagaaatacctaaaaatttgaaattcttgattttgatcctttctttttaccgagtagcctgagataacctgatatatagtatcgacttgctctacgatatgattatatggatttaaatagcatggtatggcttggtattaaaattattctccatactaggtagaatat

SEQ ID NO: 27422 - DNA, 305 bp, DROSOPHILA
caacaaaccagctttaccatgaagttcctactcgtgtgcactctcatcctgggcctcgccttcttcatggcctctgcccttccccaactgaacaacgaggcccccatggttggcgatgaccatcaccaccacccggtggtccgcagcgttcacttcgccgaggacgttcaggctcagcacaagcacgatgacgtcgcctgctgcggctagacatctccatttggagcaaggcgtgacggcaacttcatcgatcttaaaccgcctttaacttttaataaagagcaatattgaacaaagaacataaa

SEQ ID NO: 27423 - protein, 63 aa, DROSOPHILA
MKFLLVCTLILGLAFFMASALPQLNNEAPMVGDDHHHHPVVRSVHFAEDVQAQHKHDDVACCG

SEQ ID NO: 27424 - DNA, 10219 bp, DROSOPHILA
catgacgagtattaggccttaagaaacttatatctgaagagcaagaagaattcgaatgaatgaaaaattatacctattggaaagggaaacgcttacgaagaaaaaatcaaaaagtttactggtctatataaacatgaacatgagttcaacgtatgttttcaagtttttaagcgcatattcgtgtttccttaatatttgtgtttactgagtttggtttatttagctttattattgttttactctccccgcttgtgctctaacaatatttatatctttcttttaataatttaaacacatttctacgcttaggcagtagtagttgtagataacccattgttcgcttagcttgtgcttaaatatagtttatataacatatactgatcaaatttgtttttaaataattacagccaatacggtcaccctcaccaccctttcgagaaggacgaatactagaaagcgacacagtgctcggttcaaatctataatttgttgcataatcattttatctttaatcgtacgaataaacaaaaatacaaataacgttctcgtcttccccctgattgtttcaatttttggagaactggctgaccaaataaatggttctcgtgtgcttttaatgaattgttaaaaaatcggttaatgcacctctgacgtataaatttgacacgagcgaacgatttacgtaaagtcaaaatatctaacaagtgtttaatccaagctgagcacaaatattttgcacagttgtttcttaataggtatttaaaagatatttactttgacgtatagtatagttcatacaatttgcttagttattgtattattcgtagaaacaatggaagtaccaaatgttctttgtcaaataaaattttgcaagctagacaagcatctacgcaaatagccaaaataataacgagacccccgtatcagagtataaaaggtttcaaattttaaatttggccaccagatctaattgatccgacacccggtttcttggaggatcatgcgcttgttcctcgtcgcggttttggccgcttatttcgcctacgtagcggcccaatcgcaatctaaaacggtaacagcagtggccactccagttattaaggcacagccatgttgtgaaagtgttcgacaaactctaattgaaatacgaaaagatatacgcttgtggctgctggacaggcttttcggaaaactacttcttttgcacgacggagaactcctcggcaatccaaattatgtgaattgtgtcaatggaaaaaaacagttaccactcttagatggaagctcaattacagatcactctgcatcgactaacactataaccaaaatcatcgatgatggactttcaagtcagactacctcctcttcggctccagtcgtagatgtaactcagggatcctcttcgaatggtgatggaaactctacgcagtcctcgacaacgacaacaactacaacgacgacatcttccgatggtggcgaattcaccacctcatctgaccccgttgtggaagtcagtcaaggaacaaatggcggtaacagctccactcagtcttcgtcgtccaccacaacaacgacatcttcagatgagggccaaactacctcctcttcggatcctgtcgtcgaagtagctcagggatcctcttcgaatggtgatggaaactcaacccagtccttgacaacaacaacaactacaacgacgacctcttccgatggtggccaatccaccacctcatctgaccccgttgtggaagtcagtcaaggaacaaatggcggtaacagctccactcagtcttcgtcgtccaccacaacaacgacatcttcagatgagggccaaactacctcctcttcggatcctgtcgtcgaagtagctcagggatcctcttcgaatggtgatggaaactctacccagtcctcgacaacgacaacaactacaacgacgacatcttccgatggtggccaatccaccaccttatctgaccccgttgtggaagtcagtcaaggaacaaatggcggtaacagctccactcagtcttcgtcgtccaccacaacaacgacatcttcagatgagggccaaactacctcctcttcggatcctgtcggcgaagtagctcagggatcctcttcgaatggtgatggaaactctacccagtcctcgacaacgacaacaactacaacgacgacatcttccgatggggggcaatccaccacctcatctgaccccgttgtggaagtcagtcaaggaacaaatggcggtaacagctccactcagtcttcgtcggccaccacaacaacgacatcttcagatgagggccaaactacctcctcttcggatcctgtcagcgaagtagctcagggatcctcttcgattggtgatggaaactcaacccagtcctcgacaacaacaacaactacaacgacgacatcttccgatggtggccaatccaccacctcatctgaccccgttgtggaagtcagtcaaggaacaaatggcggtaacagctccactcagtcttcgtcgtccaccacaacaacgacatcttcagatgagggccaaactacctcctcttcggatcctgtcgtcgaagtagctcagggatcctcttcgaatggtgatggaaactcaacccagtcctcgacaacgacaacaactacaacgacgacatcttccgatggtggccaatccaccacctcatctgaccccgttgtggaagccagtcaaggaacaaatggcggtaacagctccactcagtcttcgtcgtccaccacaacaacgacatcttcagatgagggccaaactacctcctcttcggatcctgtcagcgaagtagctcagggatcctcttcgattggtgatggaaactcaacccagtcctcgacaacgacaacaactacaacgacgacatcttccgatggtggccaatccaccacctcatctgaccccgttgtggaagccagtcaaggaacaaatggcggtaacagctccactcagtcttcgtcgtccaccacaacaacgacatcttcagatgagggccaaactacctcctcttcggatcctgtcgtcgaagtagctcagggatcctcttcgaatggtgatggaaactcaacccagtcctcgacaacgacaacaactacaacgacgacatcttccgatggtggccaatccaccaccttatctgaccccgttgtggaaggcagtcaaggaacaaatggcggtaacagctccactcagtcttcgtcgtccaccacaacaacgacatcttcagatgagggcccaactacctcctcttcggatcctgtcgtcgaagtagctcagggatcctcttcgaatggtgatggaaactcaacccagtcctcgacaacgacaacaactacaacgacgacatcttccgatggtggcgaatccaccacctcatctgaccccgttgtggaagtcagtcaaggaacaaatggcgataacagctccactcagtcttcgtcgtccaccacaacaacgacatcttcagatgagggccaaactacctcttcttcggatcctgtcagcgaagtagctcagggatcctcttcgactggtgatggaaactcaacccagtcctcgacaacgacaacaactacaacgacggacatcttccgatggtggcgaatccaccacctcatctgaccccgttgtggaagtcagtcaaggaacaaacggcgataacagctccactcagtcttcgtcgtccaccacaacaacgacatcttcagatgagggccaaactacctcctcttcggatcctgtcagcgaagtagctcagggatcctctttgaatggtgatggaaactctacccagtcctcgacaacggacaacaactacaacgacgacatcttccgatggtggcgaatccaccaccttatctgaccccgttgtggaagtcagtcaaggaacaaatggcggtaacagctccactcagtcttcgtcgtccaccacaacaacgacatcttcagatgagggccaaactacctcttcttcggatcctgtcgtcgaagtagctcagggatcctcttcgaatggtgatggaaactctacccagtcctcgacaacgacaacaactacaacgacgacatcttccgatggtggcgaatccaccacctcatctgaccccgttgtggaagtcagtcaaggaacaaacggcgataacagctccactcagtcttcgtcgtccaccacaacaacgacatcttcagatgagggccaagctacctcctcttcggctcctgtcgtagatatatctcagggatcctcttcgaatggtgatggaaactctacccagtcctcgacaacgacaacaattacaacgacgacatcttccgatggtgaccaatccaccacctcatctgaccccgttgtggaagtcagtcaaggaacaaacggcggtaacagctccactcagtcttcgtcgtccaccacaacaacgacatcttcagatgagggccaaactacctcctctttcggctcctgtcgtagaagtcactcaaggatcctcttccaatggtgatggaaactctacccagtcctcgacaacgacaacaactacaacgacgacatcttccgatggtggcgaatccaccacctcatctgacccccgttgtggaagtcagtcaaggaacaaacggcgataacagctccactcagtcttcgtcgtccaccacaacaacgacatcttcagatgagggccaaactacctcctcttcggctcctgtcgtagatatatcttaaggatcctcttcgaatggtgatggaaactctacccagtcctcgacaacgacaacaactacaacgacgacatcttccgatggtgaccaatccaccacctcatctgaccccgttgtggaagtcagtcaaggaacaaacggcgataacagctccactcagtcttcgtcgtccaccacaacaacgacatcttcagatgagggccaaactacctcctcttcggctcctgtcgtagaagtcactcaaggatcctcttcgaatggtgatggaaactctacccagtcctcgacaacgacaacaactacaacgacgacatcttccgatggtggcgaatccaccacctcatctgaccccgttgtggaagtcagtcaaggaacaaatggcgataacagctccactcagtcttcgtcgtccaccacaacaacgacatcttcagatgagggccaaactacctcctcttcggctcctgtcgtagaagtcactcaaggatcctcttcgaatggtgatggaaactctacccagtcctcgacaacgacaacaactacaacgacgacatcttccgatggtggcgaatccaccacctcatctgaccccgttgtggaagtcagtcaaggaacaaatggcgataacagctccactcagtcttcgtcgtccaccacaacaacgacatcttcagatgagggccaaactacctcctcttcgggtcctgtcgtagatatatctcagggatcctcttcgaatggtgatggaaactctacccagtcctcgacaacgacaacaactacaacgacgacatcttccgatggtgggcgaatccaccaccttatctgaccccgttgtggaagtcagtcaaggaacaaatggcgataacagctccactcagtcttcgtcgtccaccacaacaacagacatcttcagatgagggccaaactacctcctcttcggctcctgtcgtagatatatctcagggatcctcttcgaatggtgatggaaactctacccagtcctcgacaacgacaacaactacaacgacgacatcttccgatggtggcgaatccaccaccttatctgaccccgttgtggaagtcagtcaaggaacaaatggcgataacaactccactcagtcttcgtcgtccaccacaacaacgacatcttcagatgagggccaaactacctcctcttcggatcctgtcgtcgaagtagctcagggatcctcttcgaatggtgatggaaactcaacccagtcctcgacaacgacaacaactacaacgacgacatcttccgatggtggcgaatccaccacctcatctgaccccgttgtggaagtcagtcaaggaacaaatggcgataacagctccactcagtcttcgtcgtccaccacaacaacgacatcttcagatgagggccaaactacctcctcttcggatcctgtcgtcgaagtagctcagggatcctcttcgaatggtgatggaaactcaacccagtcctcgacaacgacaacaactacaacgacgacatcttccgatggtggcgaatctaccacctcatctgaccccgttgtggaagtcagtcaagggaacaaacggcgataacagctccactcagtcttcgtcgtccaccacaacaacgacatcttcagatgagggccaaactacctcttcttcggatcctgtcgtcaaagtagctcagggatcctcttcgaatggtgatggaaactctacccagtcctcgacaacgacaacaactacaacgacgacatcttccgatggtggcgaatccaccacctcatctgaccccgttgtggaagtcagtcaaggaacaaacggcgataacagctccactcagtcttcgtcgtccaccacaacaacgacatcttcagatgagggccaaactacctcttctttcggatcctgtcgtcgaagtagctcaaggatcctcttcgaatggtgatggaaactctacccagtcctcgacaacgacaacaactacaacgacgacatcttccgatggtggcgaatccaccacctcatctgaccccgttgtggaagtcagtcaaggaacaaatggcgataacagctcctctcaatcttcgtcatccaccacaacaacgaatgaagtatctttaaaggataatagaagccctaagtggaatagaacgacaaaaacttattcttcgagaactatcagaattccgaattcaggaagaaagttaaattctagttctagcgaaacttcaacaaccgtaacatcaagttcttcctcaaagccacagaccaaatattcttggtcaagctcttcaaagaaatcgaataatggtggcaagaataagaaatattggaccaagcggtggactaaaaaatcccgcaaaaataacaatggaagctccactattgttggagaggaatcgtctgactcactgacagatgctggagttgatgtcacccaaggaaatggtttaaacgatgagggaaattcgagtcagtctacagttacctcatctctgcctgttgtagatactagtgcagatgttcagaacagcgaatcaagcttaacatcaactgaaaacacaacaaaatactcgtcaaaatcatttaaggtccccaagtctaatggtcagtcgagtataagcgctagcaaaactacaaaaaccgtaacgacaagcacttcctcaacacccaacgttaagagctcatcaaagaaaacttccaatagtggaaaatcggtcaagacttcttcgaccactataacaacaacttcttcagatccgggccaatccagctcaattacacagggaattccacaaaacgatattaaaagcttaaaccaggtcaccacaacgacatcatctgtgagccaagtcggcgtaccttcttcacctgttgttaaagttaccaaggaaacctcagtaagcaaagatggaaagaccactcggtcatcaaccaccacaacaacaattaccacgaccaaaggaagtaatcagtcaggtactttaactcttcctgcggtcgatggcctaaagtcgtcaacgaaaactacaacaacatccaccaaaggaactaaattgtcagatatcttgtctctaccggaagttgatgccagcatagccgttaacggcgatgagtcccgctcagcatctattaaagatacaaacattttgtcaaagatagacttgagtctgcctaaactggatgccagcctaaatgttaatggtggaaagtcaagctcaaaatcctcaacaacaactacgacaacatccacaaagggaaataaagtatccttgtctctaccagaagttgatgccagcatagccgttaacggagatgatgcccgctcagcatctattaaagatacaaacattttgtcaaagatagacttgagtctgcctaaactggatgccagcctaaatgttaatggtggaaagtcaagctcaaaatcctcaacaacaactacgacaacatccacaaagggaaataaattatccttgtctctaccagaagttgatgccagcatagccgttaacggagatgatgcccgctcagcatctattaaagatacaaacattttgtcaaagatagacttgagtctgcctaaactggatgccagcctaaatgttaatggtggaaagtcaagctcaaaatcctcaacaacaactacgacaacatccacaaatggaagtaaatcgtctaaaattttgactgtaccgaaagttgatgccggcatatccatcgatggcggaatatcaggttcaacatcaactaaaactattaaaattacgtcaaagaactctgcagtacccaaggccagttcatctttcaaaactacgaccacaaccactacatcgaagacttcatcggtcccaaaaacagagtccaaatactcctggtctagttcgtcgaagaaaacgtccaatcctattcgtttaaccctacctaacatcaacgcaggtatttctgttggcggaggagattcttcgggctcctggtccaagctaatcaagaggagcaccagcagcgacgagacgaatgccagcgatggtccatctctttccggttctattgtaggtgcaggtggatctccagtctaatgaatcctggtctcaacgttcaaggattctcgggtgacagttccagtgcccagggatctccgggacattcgcattcgattgggccgagaacagtcaggaaacgatgctcagtcccaaaactcgaattcttggacccaaagcgcaacacaaggcagcgaaagcttggctaatggagcaataaccgccaatggcctaagcttggagggttcagggagttccggtggtgttgcaactacgataccaggtggctctgtcggtgtaaccggacaatatccatattggtggggcaacggccgttgggtgggtgttggagccaggcccagttggcgatatggatggcgtccttatggaagcgcttggggcggatggaacaatcaatattagagttggtccttgcgaatggatagggcccagattaaacggctcatgactttaatgtatacgattgtaaaatatatgcatacgaatattataaatcgtgtttaatttttttgttatctatatgaatactaactgaaaataactactttttaaatgcatacagatataagcaattttcgtcttaaataaattgggacagctcaaataagtacggcttagataagttattgagattaacctattgatggccaattaatattaaaaactaaaacatttaaattaaggtgctttcattttattgacagaaaataaatttcagatatgtacaaattgttctagaagaagaagtagaatttgtttccactaccgctgccgttgaaaaaccgtataaattccgtcaaagaccattgtggagcagaaggagattttgtcgtggtttcggaggcctcagtagttgtggtactttcggcgttggcgctcaaaatcgccaccattgcaaaaaacagaaaaataaatacaacctctgtcttcatcgctgggttgttggtagactagcatttttgctacgtttttagatgttttataccttttctaaataaatcgaatgttgttgtcccgcgataaatatttacacatgtgtttcagagcataatatctaatgacgaaaagtcagccacctataatttgtagacggcgtgaaagaaaacaaacattttctgaggttctctaaagatttgcgttgttcgtataatataattcacatttaaattataattaaaaaattattttaaaaaactgaaattcagaacatacaaaaaagcagtttatataaatgtaatatataataataataataataatatttataaaaatcctatagtgttaaaaagttcaatcagatcaaatacatttagcagcattcgttacaaattacatctctgatagggtcatgtcttcagtggacactttacataattgtttatgtcctcgctaatctcatggt

SEQ ID NO: 27425 - DNA, 7761 bp, DROSOPHILA
atgcgcttgttcctcgtcgcggttttggccgcttatttcgcctacgtagcggcccaatcgcaatctaaaacggtaacagcagtggccactccagttattaaggcacagccatgttgtgaaagtgttcgacaaactctaattgaaatacgaaaagatatacgcttgtggctgctggacaggcttttcggaaaactacttcttttgcacgacggagaactcctcggcaatccaaattatgtgaattgtgtcaatggaaaaaaacagttaccactcttagatggaagctcaattacagatcactctgcatcgactaacactataaccaaaatcatcgatgatggactttcaagtcagactacctcctcttcggctccagtcgtagatgtaactcagggatcctcttcgaatggtgatggaaactctacgcagtcctcgacaacgacaacaactacaacgacgacatcttccgatggtggcgaattcaccacctcatctgaccccgttgtggaagtcagtcaaggaacaaatggcggtaacagctccactcagtcttcgtcgtccaccacaacaacgacatcttcagatgagggccaaactacctcctcttcggatcctgtcgtcgaagtagctcagggatcctcttcgaatggtgatggaaactcaacccagtccttgacaacaacaacaactacaacgacgacctcttccgatggtggccaatccaccacctcatctgaccccgttgtggaagtcagtcaaggaacaaatggcggtaacagctccactcagtcttcgtcgtccaccacaacaacgacatcttcagatgagggccaaactacctcctcttcggatcctgtcgtcgaagtagctcagggatcctcttcgaatggtgatggaaactctacccagtcctcgacaacgacaacaactacaacgacgacatcttccgatggtggccaatccaccaccttatctgaccccgttgtggaagtcagtcaaggaacaaatggcggtaacagctccactcagtcttcgtcgtccaccacaacaacgacatcttcagatgagggccaaactacctcctcttcggatcctgtcggcgaagtagctcagggatcctcttcgaatggtgatggaaactctacccagtcctcgacaacgacaacaactacaacgacgacatcttccgatggggggcaatccaccacctcatctgaccccgttgtggaagtcagtcaaggaacaaatggcggtaacagctccactcagtcttcgtcggccaccacaacaacgacatcttcagatgagggccaaactacctcctcttcggatcctgtcagcgaagtagctcagggatcctcttcgattggtgatggaaactcaacccagtcctcgacaacaacaacaactacaacgacgacatcttccgatggtggccaatccaccacctcatctgaccccgttgtggaagtcagtcaaggaacaaatggcggtaacagctccactcagtcttcgtcgtccaccacaacaacgacatcttcagatgagggccaaactacctcctcttcggatcctgtcgtcgaagtagctcagggatcctcttcgaatggtgatggaaactcaacccagtcctcgacaacgacaacaactacaacgacgacatcttccgatggtggccaatccaccacctcatctgaccccgttgtggaagccagtcaaggaacaaatggcggtaacagctccactcagtcttcgtcgtccaccacaacaacgacatcttcagatgagggccaaactacctcctcttcggatcctgtcagcgaagtagctcagggatcctcttcgattggtgatggaaactcaacccagtcctcgacaacgacaacaactacaacgacgacatcttccgatggtggccaatccaccacctcatctgaccccgttgtggaagccagtcaaggaacaaatggcggtaacagctccactcagtcttcgtcgtccaccacaacaacgacatcttcagatgagggccaaactacctcctcttcggatcctgtcgtcgaagtagctcagggatcctcttcgaatggtgatggaaactcaacccagtcctcgacaacgacaacaactacaacgacgacatcttccgatggtggccaatccaccaccttatctgaccccgttgtggaaggcagtcaaggaacaaatggcggtaacagctccactcagtcttcgtcgtccaccacaacaacgacatcttcagatgagggcccaactacctcctcttcggatcctgtcgtcgaagtagctcagggatcctcttcgaatggtgatggaaactcaacccagtcctcgacaacgacaacaactacaacgacgacatcttccgatggtggcgaatccaccacctcatctgaccccgttgtggaagtcagtcaaggaacaaatggcgataacagctccactcagtcttcgtcgtccaccacaacaacgacatcttcagatgagggccaaactacctcttcttcggatcctgtcagcgaagtagctcagggatcctcttcgactggtgatggaaactcaacccagtcctcgacaacgacaacaactacaacgacggacatcttccgatgtcctcgacaacggacaacaactacaacgacgacatcttccgatggtggcgaatccaccaccttatctgaccccgttgtggaagtcagtcaaggaacaaatggcggtaacagctccactcagtcttcgtcgtccaccacaacaacgacatcttcagatgagggccaaactacctcttcttcggatcctgtcgtcgaagtagctcagggatcctcttcgaatggtgatggaaactctacccagtcctcgacaacgacaacaactacaacgacgacatcttccgatggtggcgaatccaccacctcatctgaccccgttgtggaagtcagtcaaggaacaaacggcgataacagctccactcagtcttcgtcgtccaccacaacaacgacatcttcagatgagggccaagctacctcctcttcggctcctgtcgtagatatatctcagggatcctcttcgaatggtgatggaaactctacccagtcctcgacaacgacaacaattacaacgacgacatcttccgatggtgaccaatccaccacctcatctgaccccgttgtggaagtcagtcaaggaacaaacggcggtaacagctccactcagtcttcgtcgtccaccacaacaacgacatcttcagatgagggccaaactacctcctctttcggctcctgtcgtagaagtcactcaaggatcctcttccaatgtcctcgacaacgacaacaactacaacgacgacatcttccgatggtggcgaatccaccacctcatctgacccccgttgtggaagtcagtcaaggaacaaacggcgataacagctccactcagtcttcgtcgtccaccacaacaacgacatcttcagatgagggccaaactacctcctcttcggctcctgtctcctcgacaacgacaacaactacaacgacgacatcttccgatggtgaccaatccaccacctcatctgaccccgttgtggaagtcagtcaaggaacaaacggcgataacagctccactcagtcttcgtcgtccaccacaacaacgacatcttcagatgagggccaaactacctcctcttcggctcctgtcgtagaagtcactcaaggatcctcttcgaatggtgatggaaactctacccagtcctcgacaacgacaacaactacaacgacgacatcttccgatggtggcgaatccaccacctcatctgaccccgttgtggaagtcagtcaaggaacaaatggcgataacagctccactcagtcttcgtcgtccaccacaacaacgacatcttcagatgagggccaaactacctcctcttcggctcctgtcgtagaagtcactcaaggatcctcttcgaatggtgatggaaactctacccagtcctcgacaacgacaacaactacaacgacgacatcttccgatggtggcgaatccaccacctcatctgaccccgttgtggaagtcagtcaaggaacaaatggcgataacagctccactcagtcttcgtcgtccaccacaacaacgacatcttcagatgagggccaaactacctcctcttcgggtcctgtcgtagatatatctcagggatcctcttcgaatgtcctcgacaacgacaacaactacaacgacgacatcttccgatggtgggcgaatccaccaccttatctgaccccgttgtggaagtcagtcaaggaacaaatggcgataacagctccactcagtcttcgtcgtccaccacaacaacagacatcttcagatgagggccaaactacctcctcttcggctcctgtcgtagatatatctcagggatcctcttcgaatggtgatggaaactctacccagtcctcgacaacgacaacaactacaacgacgacatcttccgatggtggcgaatccaccaccttatctgaccccgttgtggaagtcagtcaaggaacaaatggcgataacaactccactcagtcttcgtcgtccaccacaacaacgacatcttcagatgagggccaaactacctcctcttcggatcctgtcgtcgaagtagctcagggatcctcttcgaatggtgatggaaactcaacccagtcctcgacaacgacaacaactacaacgacgacatcttccgatggtggcgaatccaccacctcatctgaccccgttgtggaagtcagtcaaggaacaaatggcgataacagctccactcagtcttcgtcgtccaccacaacaacgacatcttcagatgagggccaaactacctcctcttcggatcctgtcgtcgaagtagctcagggatcctcttcgaatggtgatggaaactcaacccagtcctcgacaacgacaacaactacaacgacgacatcttccgatggtggcgaatctaccacctcatctgaccccgttgtggaactcagggatcctcttcgaatggtgatggaaactctacccagtcctcgacaacgacaacaactacaacgacgacatcttccgatggtggcgaatccaccacctcatctgaccccgttgtggaagtcagtcaaggaacaaacggcgataacagctccactcagtcttcgtcgtccaccacaacaacgacatcttcagatgagggccaaactacctcttctttcggatcctgtcgtcgaagtagctcaaggatcctcttcgaatggtgatggaaactctacccagtcctcgacaacgacaacaactacaacgacgacatcttccgatggtggcgaatccaccacctcatctgaccccgttgtggaagtcagtcaaggaacaaatggcgataacagctcctctcaatcttcgtcatccaccacaacaacgaatgaagtatctttaaaggataatagaagccctaagtggaatagaacgacaaaaacttattcttcgagaactatcagaattccgaattcaggaagaaagttaaattctagttctagcgaaacttcaacaaccgtaacatcaagttcttcctcaaagccacagaccaaatattcttggtcaagctcttcaaagaaatcgaataatggtggcaagaataagaaatattggaccaagcggtggactaaaaaatcccgcaaaaataacaatggaagctccactattgttggagaggaatcgtctgactcactgacagatgctggagttgatgtcacccaaggaaatggtttaaacgatgagggaaattcgagtcagtctacagttacctcatctctgcctgttgtagatactagtgcagatgttcagaacagcgaatcaagcttaacatcaactgaaaacacaacaaaatactcgtcaaaatcatttaaggtccccaagtctaatggtcagtcgagtataagcgctagcaaaactacaaaaaccgtaacgacaagcacttcctcaacacccaacgttaagagctcatcaaagaaaacttccaatagtggaaaatcggtcaagacttcttcgaccactataacaacaacttcttcagatccgggccaatccagctcaattacacagggaattccacaaaacgatattaaaagcttaaaccaggtcaccacaacgacatcatctgtgagccaagtcggcgtaccttcttcacctgttgttaaagttaccaaggaaacctcagtaagcaaagatggaaagaccactcggtcatcaaccaccacaacaacaattaccacgaccaaaggaagtaatcagtcaggtactttaactcttcctgcggtcgatggcctaaagtcgtcaacgaaaactacaacaacatccaccaaaggaactaaattgtcagatatcttgtctctaccggaagttgatgccagcatagccgttaacggcgatgagtcccgctcagcatctattaaagatacaaacattttgtcaaagatagacttgagtctgcctaaactggatgccagcctaaatgttaatggtggaaagtcaagctcaaaatcctcaacaacaactacgacaacatccacaaagggaaataaagtatccttgtctctaccagaagttgatgccagcatagccgttaacggagatgatgcccgctcagcatctattaaagatacaaacattttgtcaaagatagacttgagtctgcctaaactggatgccagcctaaatgttaatggtggaaagtcaagctcaaaatcctcaacaacaactacgacaacatccacaaagggaaataaattatccttgtctctaccagaagttgatgccagcatagccgttaacggagatgatgcccgctcagcatctattaaagatacaaacattttgtcaaagatagacttgagtctgcctaaactggatgccagcctaaatgttaatggtggaaagtcaagctcaaaatcctcaacaacaactacgacaacatccacaaatggaagtaaatcgtctaaaattttgactgtaccgaaagttgatgccggcatatccatcgatggcggaatatcaggttcaacatcaactaaaactattaaaattacgtcaaagaactctgcagtacccaaggccagttcatctttcaaaactacgaccacaaccactacatcgaagacttcatcggtcccaaaaacagagtccaaatactcctggtctagttcgtcgaagaaaacgtccaatcctattcgtttaaccctacctaacatcaacgcaggtatttctgttggcggaggagattcttcgggctcctggtccaagctaatcaagaggagcaccagcagcgacgagacgaatgccagcgatggtccatctctttccggttctattgattctcgggtgacagttccagtgcccagggatctccgggacattcgcattcgattgggccgagaacagtcaggaaacgatgctcagtcccaaaactcgaattcttggacccaaagcgcaacacaaggcagcgaaagcttggctaatggagcaataaccgccaatggcctaagcttggagggttcagggagttccggtggtgttgcaactacgataccaggtggctctgtcggtgtaaccggacaatatccatattggtggggcaacggccgttgggtgggtgttggagccaggcccagttggcgatatggatggcgtccttatggaagcgcttggggcggatggaacaatcaatattag

SEQ ID NO: 27426 - protein, 2586 aa, DROSOPHILA
MRLFLVAVLAAYFAYVAAQSQSKTVTAVATPVIKAQPCCESVRQTLIEIRKDIRLWLLDRLFGKLLLLHDGELLGNPNYVNCVNGKKQLPLLDGSSITDHSASTNTITKIIDDGLSSQTTSSSAPVVDVTQGSSSNGDGNSTQSSTTTTTTTTTSSDGGEFTTSSDPVVEVSQGTNGGNSSTQSSSSTTTTTSSDEGQTTSSSDPVVEVAQGSSSNGDGNSTQSLTTTTTTTTTSSDGGQSTTSSDPVVEVSQGTNGGNSSTQSSSSTTTTTSSDEGQTTSSSDPVVEVAQGSSSNGDGNSTQSSTTTTTTTTTSSDGGQSTTLSDPVVEVSQGTNGGNSSTQSSSSTTTTTSSDEGQTTSSSDPVGEVAQGSSSNGDGNSTQSSTTTTTTTTTSSDGGQSTTSSDPVVEVSQGTNGGNSSTQSSSATTTTTSSDEGQTTSSSDPVSEVAQGSSSIGDGNSTQSSTTTTTTTTTSSDGGQSTTSSDPVVEVSQGTNGGNSSTQSSSSTTTTTSSDEGQTTSSSDPVVEVAQGSSSNGDGNSTQSSTTTTTTTTTSSDGGQSTTSSDPVVEASQGTNGGNSSTQSSSSTTTTTSSDEGQTTSSSDPVSEVAQGSSSIGDGNSTQSSTTTTTTTTTSSDGGQSTTSSDPVVEASQGTNGGNSSTQSSSSTTTTTSSDEGQTTSSSDPVVEVAQGSSSNGDGNSTQSSTTTTTTTTTSSDGGQSTTLSDPVVEGSQGTNGGNSSTQSSSSTTTTTSSDEGPTTSSSDPVVEVAQGSSSNGDGNSTQSSTTTTTTTTTSSDGGESTTSSDPVVEVSQGTNGDNSSTQSSSSTTTTTSSDEGQTTSSSDPVSEVAQGSSSTGDGNSTQSSTTTTTTTTDIFRCPRQRTTTTTTTSSDGGESTTLSDPVVEVSQGTNGGNSSTQSSSSTTTTTSSDEGQTTSSSDPVVEVAQGSSSNGDGNSTQSSTTTTTTTTTSSDGGESTTSSDPVVEVSQGTNGDNSSTQSSSSTTTTTSSDEGQATSSSAPVVDISQGSSSNGDGNSTQSSTTTTITTTTSSDGDQSTTSSDPVVEVSQGTNGGNSSTQSSSSTTTTTSSDEGQTTSSFGSCRRSHSRILFQCPRQRQQLQRRHLPMVANPPPHLTPVVEVSQGTNGDNSSTQSSSSTTTTTSSDEGQTTSSSAPVSSTTTTTTTTTSSDGDQSTTSSDPVVEVSQGTNGDNSSTQSSSSTTTTTSSDEGQTTSSSAPVVEVTQGSSSNGDGNSTQSSTTTTTTTTTSSDGGESTTSSDPVVEVSQGTNGDNSSTQSSSSTTTTTSSDEGQTTSSSAPVVEVTQGSSSNGDGNSTQSSTTTTTTTTTSSDGGESTTSSDPVVEVSQGTNGDNSSTQSSSSTTTTTSSDEGQTTSSSGPVVDISQGSSSNVLDNDNNYNDDIFRWWANPPPYLTPLWKSVKEQMAITAPLSLRRPPQQQTSSDEGQTTSSSAPVVDISQGSSSNGDGNSTQSSTTTTTTTTTSSDGGESTTLSDPVVEVSQGTNGDNNSTQSSSSTTTTTSSDEGQTTSSSDPVVEVAQGSSSNGDGNSTQSSTTTTTTTTTSSDGGESTTSSDPVVEVSQGTNGDNSSTQSSSSTTTTTSSDEGQTTSSSDPVVEVAQGSSSNGDGNSTQSSTTTTTTTTTSSDGGESTTSSDPVVELRDPLRMVMETLPSPRQRQQLQRRHLPMVANPPPHLTPLWKSVKEQTAITAPLSLRRPPQQRHLQMRAKLPLLSDPVVEVAQGSSSNGDGNSTQSSTTTTTTTTTSSDGGESTTSSDPVVEVSQGTNGDNSSSQSSSSTTTTNEVSLKDNRSPKWNRTTKTYSSRTIRIPNSGRKLNSSSSETSTTVTSSSSSKPQTKYSWSSSSKKSNNGGKNKKYWTKRWTKKSRKNNNGSSTIVGEESSDSLTDAGVDVTQGNGLNDEGNSSQSTVTSSLPVVDTSADVQNSESSLTSTENTTKYSSKSFKVPKSNGQSSISASKTTKTVTTSTSSTPNVKSSSKKTSNSGKSVKTSSTTITTTSSDPGQSSSITQGIPQNDIKSLNQVTTTTSSVSQVGVPSSPVVKVTKETSVSKDGKTTRSSTTTTTITTTKGSNQSGTLTLPAVDGLKSSTKTTTTSTKGTKLSDILSLPEVDASIAVNGDESRSASIKDTNILSKIDLSLPKLDASLNVNGGKSSSKSSTTTTTTSTKGNKVSLSLPEVDASIAVNGDDARSASIKDTNILSKIDLSLPKLDASLNVNGGKSSSKSSTTTTTTSTKGNKLSLSLPEVDASIAVNGDDARSASIKDTNILSKIDLSLPKLDASLNVNGGKSSSKSSTTTTTTSTNGSKSSKILTVPKVDAGISIDGGISGSTSTKTIKITSKNSAVPKASSSFKTTTTTTTSKTSSVPKTESKYSWSSSSKKTSNPIRLTLPNINAGISVGGGDSSGSWSKLIKRSTSSDETNASDGPSLSGSIDSRVTVPVPRDLRDIRIRLGREQSGNDAQSQNSNSWTQSATQGSESLANGAITANGLSLEGSGSSGGVATTIPGGSVGVTGQYPYWWGNGRWVGVGARPSWRYGWRPYGSAWGGWNNQY

SEQ ID NO: 27427 - DNA, 7725 bp, DROSOPHILA
cagacttttcaacgcaggcacgtgccattgttttaatctgttttcggctcttggcttccgatagtcatgtacccctgctgttacataaccaagggtcatctaattgggaagaatgcggtattaatacggggactatgatcctggttacatccaggcagatggttatgtccatgtcgtggcgtgtgtgtatgtatatgcacaagttccgcggatctcaaaggtacatacatgcatgtaaaaaacaaatggcttgcgtgtgtctgtgtgggtgcgtagttattgaagaaaaaagcacaaaaacactaataaagcgtcggcctgtctggcttatctggccaacaaaactaagcggagtgaccaaaataacacggaactgcgagcagcgacagtcagctgtccggatatttttacccggagtctcggagttgctggccgactggccgtggagccccacgctttctgtaccttttattttgctttagtgtcgccccaaaaaagcagcctccaaaatccctcgctgcttttgcttctgtcgttgcgtttgtctttgcttttgcgtttgctttgccactgctgctctgtctttgcgttcgttttgccaacggattttccgaacttcgagcgatttttccgcgattgcgcagcgttttaccgttacacgcggcactcgagcgccagaaaattccaattgttattctctaattttacgatttgcgtatggaaatcacttcattattttggtttctattttctttcttctcgccagtgtgaccagatgccgaatgcgctccaacacccaatgctgtctacctaacactacttcgcactaaaaaataccgaaagtatcctttcatattcgaaagctaatccgaaaattctggaactccgaaatcctgacttttgaaaatctaaagttagtgaataaatgttatgcaaaggcttgcagttaagatatgcaattacttaatgtcattagcccgcgcaagaaaaacagacacttgaattggaaactatagtttattttgtaagttaagcgctgaaataaatcaattgtaaatgtacacattgttagtcggcggcggcgtgcttgcctgggttctaatttgtagttctcttgctccgataatgcgaagaaaaccgacaattgcttccctcgctgtagggatactttttaaagactaaatcactgcgttgcagaatcatcataatcatcataatcgtattgtataatccggatgccgtgccgttggctttcggactggcgtaataaataaacttgcatcgtttgcgttttaggtgctacgtaaaaaatgatagaacaaatgcggggagccgcatgcaattcggatagctcccccttctaaccggacagatctccctgatcgaagatgccctggtcgtagagctcggccaccactctccgaccgccgaagaaccggccgtcgagtgcctccttgccccgcatggcctccgctcctgccgagaactccacgaagatcttcacgatgatctccgcctcgtcgtcgtcctcgttctccgtctgcttctcgttgaagatgatcacgcgactgacggtgccgaatttactgcactcctcctggatctcctcctgcagggtctcgtccacatcctcgggtccgaccatatttcgcaggatgattacacgtgagtccaccggccgcatcagtcgctgcattaccaactgccgcgcgctctggcccttgatggacatgttctcctgctgctgcagcgtctgcacgtcgccctcatccatcagcttcttctgcagctcctcctgctgcttctcgtgcgccttcttgatgttctccgagagatttgctgccgtgacagcggcattgtttgcagcggcagagagggcggcagcagctgcagctcctttgctggcctccgctcccgccagagtggccacagtgggcactaagcccacgccaacgccgccgaccgtcatgggcagggtgggtgtggccagaagggcgggcggcggaagagtgggcactaccgcctgtagaggttgcaggccagcaggaaccccaagcaaactgggagccaccggagttggtgcctggaatattccgggcggcagaagagcgggagcggcttgagccaaagcaggatgcagagcagccgcggatgtggctgccgaaaccactggcattgcacccaccttagtgaccactgctccagctgccatgacaggagtgttctgcgacaaaccaagaaccgcattgctggccaccgcgtccagggcttggatctttgccgttgctgccgctgcagccactgccgcagccgtgggcatcgtggagttcgttgtgggacaggccagggcattcggcggcgtaatagatcgacccactctgttaaaaaagcatatgcattagatattccgcacatacttttctaagcgctacacactcacctcagaagctggcctcccaaatcaaagagattcatgctggcgattgcctcgtccatggcctgtttgttggcgtactcgatgaagccgtagcccttgtgcgtgtgaagggaagtgccctgggccagcttgcagtagaggatcgggccaaaggcctcgaagacgctcttgatgtcctcctcggaaaggtcgggatggatggaggccacgtagatgcggttgaagctcttggcctcctcctgcacctcgtcgatcacctgctgcgcctgtggcatgttactgggtcggcctaccttgatgttcctgccccccatcagggctccgttcatctgttccagcgccagctgtgcgccctccggtatctcatactccacgaacgcgaatcccttgtgcttttgcgtgatgggatcccaggacatgttgattgatttgatggggccgaagggagtgaaggccacacgaattgtgtcctccttgagctcaaacgaaatgctgcccacgtagactctaaagaggaagggaaaggcgctgagttagtggtactcaatgtttaggagagattaaagtgaaaggagtttgtgtggtcagatcttatcagctaagagcgcacagtgagtggagcaccatcgactgcatccagtaacgcggagctgcagcagtgggatccaatcttcgcaagacagatttacagagtttacatcatggcgttcatccagtggaactatgttcaatactactaactcctcaactcacctgcacatgagagccagtgcctgttgtcgctgaacctgcgtgcgctgagtggccaattgctgctgttggtgggccagtgtctgcttcatcaacaccatcttgatgctctgctccatggcgtacttcttggccttgctgaccaggtcgtgctgctccgaggagagcttgggcagggcgccgcccaggaggccgaggagcgccgaacgggtacccggaccgaacttgacatcgcccgtctgcttgaggtcgtacaggggctgcgaaaggtagggaattttcgaatccgtggacttgcctagaattgggaagagggattagtgcatcttatagtgggaggggattcgtttcagttgatcatcagctatgcaatttgattgggattcgattcgattcgacttttttcatttgacttgttcgatttttgattgattttcattctttggtttttttttttttgtcttatccgaaggcaaagtgggtcagacaattgacaattggtcaagagattgcgtttgaaaccgcttaaataaagacaaaaactgcctgctgcctgcaagaaagatgaagacaaaaaagaaaaaataagaaaacaaattgttaatcatatagtggctccacgagcggatcatttgggtttttggagcgcgtgtctatcgatgggcagttgctattatggtcacaatcattttttttagttgtttttttttttcaatattagatactgcatacttaaggttaatgctttcgctttcttgttcgatttgcgttggatgagagagtctatgagtctatcgtttatgcagaggggcttgagtttttgtcatttatttgtcaaggctggaaaatgcaagaataaaaggagagagctcccgtcaaataaaacatattcgcttatcggtaggcaattgattgagatacgtagtgtatgtgatgtgattcaagtgtgtggataatattaaatatacataaataggagttaatgtgtgtcgagtagtggtggtgtgtagtgtgtatgcgtatcaaatcaaaattcatccgccgacacacaaaccgaactgggcacacggcgggacatccgggtaatcccgtccagaaagaagcgcgcgaattggccgaactaacgatcttgcgatctcccaatctcgcgtgtgcccagctccgttctggcgagtagtttataaaaattagaaattataagcaaccttaggtgcggtttcgtattcgtattcgtttcgtaatcgatttccatgagttggggcgtggtaactgacttgaagaagggtcacacacattttacattgctcagagtgataaaaagagaaaaataaaaaaaagaaaacaagacgctgaaacgataataagagcaacaatatgtttaagttggttagcttctccaccgccctacctacatacaaaaagctgtcatcttctacccacggttaatgattcgcatacgagaacaaggctcgtgagttagtgattgctagatgcggatggcgatcgggaagatcgggcgattggcagcggattgagcgggattgagtgtttagtaccccaccaattgctaaaatatacggacgcatgactggacggacgtttgatttgatctgctagctagctaggacgacaaaacacaaaatcattggtacttaatgtaaaatgcaaccaggacaggaccggagccagactcagaatctcaaacaggatcaggatcgggatcgggatcgggatcggtccccgatcggctggcggcacacgacgacgtggtggcgaggtggttagaagcggattaatgtcgatgttctggttgggctgttttgtggctgatattgatagtagtagtagattggtagtggagtagtagtagtagagtagttatctaattggtcatctctctttttcgatctcgaatacccgaacctcgatttcgatcttgataaaacttagtcataggcggaacaaacttaaaaggagttaaaacgcttacgagaactaaaaaagagaaatatagaagaaagagaaagagagagataatagttatacatatatgcattttggattagttctggcgatccgtcgactcgtatattaacgtattggttttgttttcaggaccgggacttggactcactgatgccctagatttatgaacaatacgcatttcattgcgctttctcgcttgcattcgctttcgttatttagcacatgtatgtatatatgcttttgctctatcgactggggatcgcgcccttttcgacttttggcgatagactgactctcaaatcgatttgtttgactctcacctcacctcacacctcacagtctgagttagagttcatcgtgcgtttatgaagtctgcaattacttaagcagaacaaaaagaaaaaccgattatttagtggcgtcagtgctgcccctggatgcaacggagtagtagagtagagtagtagagtagagtagagtagtacaagtacaagtgggagagaaaatataagatgtgcttatgttttatgcttggacaaccaaaaagatacaatacaatttggaaggccggctcctcgaggattccgtattccgtggactgttgcactgtcgattgaaacctacgtgccacatatgtatgtatgtattgtaagtgtcaagctcattcattgccagacacacacaacatgtttttgggggcgatgtgctgatcgccgcggcaatatcattccatcatacatagttatttatagacaaacagctgggaaactcacccgaatcggaacgcgttcttttggtggccggcatgtcgctgatctcgcgctgatcatccgaacgcggcgatctcgatgctctgtcgttgcttccctgtaacagaagtcgagtaacaccgggttagaaggtggttcgaatattgaatttttctagatttagagagaccctagcagagcatttcactacctaagtaaacaaacagtttgcaaatagataaaagataacagataacctatcctaaataccgaatgatcatatgctatatggtcagaccctttccctttccacccccaggtaaaatccgcatgtgggaccaaagggctgtacttccatttccacttccatggagagcggcgaatcggaggtgcgggagcgcgtggtgttaattcggatgtgtatctacccgccggagctggcagctgtgacgtcgtagtcccaaatggaggcaaggtcacgacggggtgctccgcggaaacctccacccgtcgccacccacatgccccttaacccctaatgccgcccaagagcggtcgctgcaacgccactgtgaaagttccgaaaaaaatgcgcaaatttcacgggaaaacgaaagacgcaatcttcggtttggtgcgagttaaaaagtgtctgctgcggagcaagtgagtcgcgtttgtctagtactaaccattttcgcttttttccagttattctagtggcgatttcttgtccacaactcaacgatttgtttaattttatacgcttgcaaaaatttttgtcaagatggatacgaactagtggtggcacttcgcgtcgattgcctcactcttcgattattcgatagtaaagttgagttatctggctactctaatagccgataggttttgagtaactgtggggaaattgtcattttaaaatgtaatctcgataaattacgatcggttataaactttttagctggctgtgcaagcaattccacactgtcaatcgaaaaatccccgagttaagcgcaagcgaaactcagcccgaaatagattagtttggctaacctagtgaagttcatagttcagaagatgcaaagcagtgtatgtatagtgtatgtagtgaaaaatggaccaaattgcattgcagaaaaaaaagtgccacttcttaacatacattttggaaagattacgttctcgagtgactaatgtcaaactgcacgtaagcacaccagtttttcaattacaactgcatttagtttttctttattcaacccttctcttaaggactacgactaaaattaaactatgcattaatatttacaactctcggtctttctgtgagagttttcccctctgttttttggttctttttttttctgaattttctgcagtgcatagactgtgaaaaggtaagccagataaggcaagatattgcccatttgaagggggattttttttcttttgttttagtagcgaatattttttcacaacttggcgaaacaggaacttgcacaatgacgcacttgatagagttaattacaacagatccggatgcaatcatcacaatcgcaatggtcttgcggccgcgtaatccgtttttaaagctaatgtcagtcgcgcgacttgcattcatttcaacatgacgtattcaaagtgaaaccgaatcaaaaattaagaagttaagaatccaaaaatgttgctgcttttagctaaaatcctaattgtggcgtaaaatgatcctacgaataaattaacgagaccgaagatcgctaagtaaaaatgttgcttcggcttaagtaaatggtttggtttggc

SEQ ID NO: 27428 - DNA, 2382 bp, DROSOPHILA
actagttcgtatccatcttgacaaaaatttttgcaagcgtataaaattaaacaaatcgttgagttgtggacaagaaatcgccactagaataactggaaaaaagcgaaaatgggaagcaacgacagagcatcgagatcgccgcgttcggatgatcagcgcgagatcagcgacatgccggccaccaaaagaacgcgttccgattcgggcaagtccacggattcgaaaattccctacctttcgcagcccctgtacgacctcaagcagacgggcgatgtcaagttcggtccgggtacccgttcggcgctcctcggcctcctgggcggcgccctgcccaagctctcctcggagcagcacgacctggtcagcaaggccaagaagtacgccatggagcagagcatcaagatggtgttgatgaagcagacactggcccaccaacagcagcaattggccactcagcgcacgcaggttcagcgacaacaggcactggctctcatgtgcagagtctacgtgggcagcatttcgtttgagctcaaggaggacacaattcgtgtggccttcactcccttcggccccatcaaatcaatcaacatgtcctgggatcccatcacgcaaaagcacaagggattcgcgttcgtggagtatgagataccggagggcgcacagctggcgctggaacagatgaacggagccctgatggggggcaggaacatcaaggtaggccgacccagtaacatgccacaggcgcagcaggtgatcgacgaggtgcaggaggaggccaagagcttcaaccgcatctacgtggcctccatccatcccgacctttccgaggaggacatcaagagcgtcttcgaggcctttggcccgatcctctactgcaagctggcccagggcacttcccttcacacgcacaagggctacggcttcatcgagtacgccaacaaacaggccatggacgaggcaatcgccagcatgaatctctttgatttgggaggccagcttctgagagtgggtcgatctattacgccgccgaatgccctggcctgtcccacaacgaactccacgatgcccacggctgcggcagtggctgcagcggcagcaacggcaaagatccaagccctggacgcggtggccagcaatgcggttcttggtttgtcgcagaacactcctgtcatggcagctggagcagtggtcactaaggtgggtgcaatgccagtggtttcggcagccacatccgcggctgctctgcatcctgctttggctcaagccgctcccgctcttctgccgcccggaatattccaggcaccaactccggtggctcccagtttgcttggggttcctgctggcctgcaacctctacaggcggtagtgcccactcttccgccgcccgcccttctggccacacccaccctgcccatgacggtcggcggcgttggcgtgggcttagtgcccactgtggccactctggcgggagcggaggccagcaaaggagctgcagctgctgccgccctctctgccgctgcaaacaatgccgctgtcacggcagcaaatctctcggagaacatcaagaaggcgcacgagaagcagcaggaggagctgcagaagaagctgatggatgagggcgacgtgcagacgctgcagcagcaggagaacatgtccatcaagggccagagcgcgcggcagttggtaatgcagcgactgatgcggccggtggactcacgtgtaatcatcctgcgaaatatggtcggacccgaggatgtggacgagaccctgcaggaggagatccaggaggagtgcagtaaattcggcaccgtcagtcgcgtgatcatcttcaacgagaagcagacggagaacgaggacgacgacgaggcggagatcatcgtgaagatcttcgtggagttctcggcaggagcggaggccatgcggggcaaggaggcactcgacggccggttcttcggcggtcggagagtggtggccgagctctacgaccagggcatcttcgatcagggagatctgtccggttagaagggggagctatccgaattgcatgcggctccccgcatttgttctatcattttttacgtagcacctaaaacgcaaacgatgcaagtttatttattacgccagtccgaaagccaacggcacggcatccggattatacaatacgattatgatgattatgatgattctgcaacgcagtgatttagtctttaaaaagtatccctacagcgagggaagcaattgtcggttttcttcgcattatcggagcaagagaactacaaattagaacccaggcaagcacgccgccgccgactaacaatgtgtacatttacaattgatttatttcagcgcttaacttacaaaataaactatagtttccaattc

SEQ ID NO: 27429 - protein, 637 aa, DROSOPHILA
MGSNDRASRSPRSDDQREISDMPATKRTRSDSGKSTDSKIPYLSQPLYDLKQTGDVKFGPGTRSALLGLLGGALPKLSSEQHDLVSKAKKYAMEQSIKMVLMKQTLAHQQQQLATQRTQVQRQQALALMCRVYVGSISFELKEDTIRVAFTPFGPIKSINMSWDPITQKHKGFAFVEYEIPEGAQLALEQMNGALMGGRNIKVGRPSNMPQAQQVIDEVQEEAKSFNRIYVASIHPDLSEEDIKSVFEAFGPILYCKLAQGTSLHTHKGYGFIEYANKQAMDEAIASMNLFDLGGQLLRVGRSITPPNALACPTTNSTMPTAAAVAAAAATAKIQALDAVASNAVLGLSQNTPVMAAGAVVTKVGAMPVVSAATSAAALHPALAQAAPALLPPGIFQAPTPVAPSLLGVPAGLQPLQAVVPTLPPPALLATPTLPMTVGGVGVGLVPTVATLAGAEASKGAAAAAALSAAANNAAVTAANLSENIKKAHEKQQEELQKKLMDEGDVQTLQQQENMSIKGQSARQLVMQRLMRPVDSRVIILRNMVGPEDVDETLQEEIQEECSKFGTVSRVIIFNEKQTENEDDDEAEIIVKIFVEFSAGAEAMRGKEALDGRFFGGRRVVAELYDQGIFDQGDLSG

SEQ ID NO: 27430 - DNA, 5763 bp, DROSOPHILA
actgatagtggctcccattcatgccaagcgcggcctcaaggactatcccacagagcaggagctgaagattctgcgcactcgtgagggtttggtggactccgtttaccgacatcccatattaccaggctacgccggatttgtcccgaacaaagtgagtcagattggcaagcgatatgttgctgccgcatccgctggagtagctcggcatgagacgctgatggagttgtatcggtgcgagaatcggacgctcaggcatcgggatctactggagagtgggaacggactcttcgaccgcaagatcaacgaaagactgctgccacaaacctattaccgatcgcccctgatcctggtgaccggagtgtccaagggcattaaggacgagacttgtccgccgaaaacggagaaactctgctatagcaagttcacatcgccgcacttcctggaggatgaagatgccgacaagttcataatcaatggttactccggccacattcccatgtcagtgacccgattcggggagtccaacaaggtgctgaccaaccgggcactgtgcagcttctcggactatatgtacaagcggaagcgggatacgtggtgttgtggacaggatctcagccggccgtccatcacctgcccgcccgtgggacacttcgtcgtctatcacgaggacagcggaatggtgcccaactatgcgggtcatgttcctggggagacgtacaagttcggacgcacctacgccaagaccacatacgatgcgaagcgctggctggaggtgcacaagaatcttacagtgctgcccgaggtggccaatctggattacgcctactgaagtgatccacctgcgggtatttttcctccgggcatgttcgaattgtaacgcttttgtcaaggccttgccaccccacgtcgcaagtgcagcatttattgtccttgtatcacctggtcccactggcgattgttgtgatgtatcgatacaacaacaacatccccagctttctatctacgtcgttcgttgcagcaaataaataagttttaattgattgtgcgcctttaaaatgtacgaattgtggctaatgccgtgaccaactgcagagcagtgcctctaattttcggcaccagtgtaaaatcggcggttcggggagcaaaagaagcctaaagtgtccataaaacgccaaaggaaaaaatctttagaatcgaattcgaacaattcaaacacacacacgtagtgctgcaccgttcacacaccgccgtggagtactgtaccgcagtgcgtgcgagcgaaacgacccgtgtctcggcagataacatacatttgtatacctctctttcaagtggtgagttgaatgccgattatgcaccctgcacgcgtcgcgccgagcattgtatgcaataagtgaagtgcacagccgcgaaaaaaaggaacagcatagtgaaacaggaaaccccctggaaactcaaattgcctatctgcacagatccctctagaactcccctctcaccccttattaacaaccgagatttatggcgggaactcgaacggagtgtgcgcacaggtcactaacaagtcggtgcgaccccaactgcggtcgacttgtttattaagagcgaagaaacgaataaaaataaaaacaaaaatatatatgtaatttgttgtagcaggtgagatttacgaattcggagaggagagagttcttcgtattaagaacgggggcgaatgggaaaccgtgaaaaaccgccaaaatgggttgagttctttttgcatcgattttcccggccggaatgaaaaaatttaaaattgtgtttttttaaccgattatgaatttttcggaatagttaaaataaatacataataaacaacttggcatcttggcaagtgtattgatattatacttttaaaagtaaaatacagacgattcttaaaacccctatatcggtataataaatagttaaagtgcaactatcatgctcattaataaatgtttttgttcgcttgttccttgactattgaagtacgcgtggaacattaacagtacacagtgcaattgaaagtgttaaaacgaactaatcttagcttatttaaagataatattagaaatataacggaaccagtaatactccattgagaagcaggtacatagtaacggttgcactcttttccaattgcagaagagcgagtagagtgatgagcgaatctctatcttctcaagtggaggagaccaaagtgtccgatgatgatggtgtaaaagagaaagctgaagtgtccaccgccaaagattcggcggaaacggctatggaagtggaggcagatgacactggtggtcagcagccggagcagagtgaattgttggataaggagaaatctgccacggtggatataaacacactcactccctcgacgccctcacaaaccccgccacaactgctggccgtcgaaactgccacatcgggaagcacggccgtcattccggagaacatcctgtccccgcccaagtcagaaactcaaaccgatgagactaacacggcaacatcgacgtcctgctccccagcctctgacggtcagcggtcgccggcggcggatcaacagtcatcggcaccaccgccacaggtacaggcacaggccacgccggcgccggtcaatggctccgtaccaaagtcggggaaaccactctccacagcgctcagcggcaagaagaccagcaaagcggccactacgtcaccacgtgcatccagatgccgcaaaaccaaggcgctgcccatgtacgaaagcgaaatcagcgacaacaagatgggtatccgactgtgcatcaagaaatctgatgccggagaaggcgcacctgctggtgtcacatctccgccagttgcagttcccgcagcaacaaaaactgtgcgcaagcgcgtccgtaaaccaaagcaacaggacagcgatgaggccgagtatgagccgcgcaagaaaaaaggcggaggaggtggtagtggcggcgaaaagaaggtttcaacgagtccggatgctgcggaggcggctggcgatccagtcgagcagagtgtctgggctcaaaagctgcccgaggaagtcctattcagagtgagaattaaaccaagcagcatataaatggtgttcgtaatatgaattcatcttacagatctttgagcatgctgtggatacacagggctgtctgcccaccctgtttcgccttggcagagtttgctcgctctggcggcaggtgtctcttaggcctactctgtggcgcactatggatcttaccacatgggtcaaagagaaatatcgcaccgaactcaagctcaagtggtttgtcgacaaccgctgcagtgcctgtacagacttgaatgtttgtaagttgagaagtatggtcttgagactataatttaattttaaaatatctcctttcagccaattggaaaatatcagacataaattgcttccttgccaaattgtcaagcgggtgcccgaaccttgcaggcattacgctctccggctggaaaggtttcacttcggatcatcttacgtatttggtggataacatgcacaagttgcagcgcttggacttaagttccatcaatgtatgttgtggcatgtgtttgcgaagctatatctgattcaaatttgtatcgcacaggttgagatgaatgccagcaagagcgccgtgggtgtcaactccctatgcaatgcactccagaccatgggcagccgtctaacacatctctatttggcgcacaatcgtctggcaggaataccacaaatagtcggaattctttcggtgagttcacaacgcttttacaacttatttcctatgacttatgggcttctttttcatattgcagacgcactgtccgaatctaacattattggatctctcgaacgtgaccacgcaggccacatcacacggtgtactccacattgagaagttgcagcgtggctgccagaagctaaaggtcctgcgtgtgacaaactctcatataacgccaagcacggcatcaatgcaggaaattgtaagattcgcatttcaatgttcgaactatgttttaaaagaaagcttttgcagatggactcacctggttttccggaacttgaagaactgtccgtggctgccttaacagatgaatcccgcatcataagcgacgaccatctgcagcgcatccttaagagcagctccaagctaaagctactggacgtacgcaactgtacacgactgacgcacgagagcctaatccgcttacctgcctgggatatcaagcatttattcctgtcaggttgctcagtcacacgagatatggggtgggtctaattagcattgttatgcagaacgcagactaatcaaaagttttcccaacgtaggtcgggtctggaactcattgcctcaaagtgggcgcacagtctcatagaactggatttggcttgggcgaatatgcagcagcccattgataatgcgttgcgcgccctagcggaaaagggcagagattcgccgttggcgtgagtatatattgaactaatgtatctattgtgtgctaatatatattataatttatttctcccctgcagtcatttgaatctatgcggctcctctgtttccgatgaggcggtaaaggaaatactgacgaactgccaaaatatgagctccatcaacttggcatcgtgccgtggtctgccgcgaggcgtcaagcgcttgatgcagggaccgcaggagctaggcgaacttcgggaggttctgggggtgcagctgaagagcagcagcgggagcaactaatccagtcagtgggcaagtccacacatcggttttattgttgatcaggcgggccaagtttaaatgtaatttaaattgttgcatccctcttcgcgcgaaaggcgttaagcgctttgttgattttgtaatgtagtccgcaaacatattgcaatatttgcatatttgcaatcgcttgcatcttccaataatgcttattttgtttataggccctagagcgtaactactgtactagcatagtattctctgcacagcggcagcagcgagttcctcccttttctggaggtgcccgcattagatgctgtgcgaataagcaaccttttgtaaatgcaatatgtattcataactaagttgattcgaattttttgcagcgcgaaaatcatttccttttgaagacaaccgttgcaacgattttcaatgattttttttagtatatataatggtatatatatatatatacatactgatttattgatagttaagtccgaccattgagcgtttgtaaagtatgtatacaagaattaaaaataagtttaaagtgtataattcgcaatacaaaaagaatatatttaccataaagtagtcgtcaattcaaagtcgccaaggcaatttgtagaatgttttaatccgacaagaatgtacatattggcgtttccgattagatgtttttatataaacgaagtaaccatttataaaggtaacgcatataccacacatacataacataaattaaaacaattcaattgttaagcattactagcagttaagagacggcaattaaaggtacatttaatttaaaataaacgcaaacattttcaatctacacccggcattatccatctcttgacacagcaaaacacaccgctcagtcgggtttatagtataattttattcaaatatgcgggagataatattgcattacgagctatgtacggccaagacagcaattacagtacgaacccacttttgggttcgaatacctcagtcctatatcgtatcgatcaga

SEQ ID NO: 27431 - DNA, 2444 bp, DROSOPHILA
ctacgtcgttcgttgcagcaaataaataagttttaattgattgtgcgcctttaaaatgtacgaattgtggctaatgccgtgaccaactgcagagcagtgcctctaattttcggcaccagtgtaaaatcggcggttcggggagcaaaagaagcctaaagtgtccataaaacgccaaaggaaaaaatctttagaatcgaattcgaacaattcaaacacacacacgtagtgctgcaccgttcacacaccgccgtggagtactgtaccgcagtgcgtgcgagcgaaacgacccgtgtctcggcagataacatacatttgtatacctctctttcaagtgaagagcgagtagagtgatgagcgaatctctatcttctcaagtggaggagaccaaagtgtccgatgatgatggtgtaaaagagaaagctgaagtgtccaccgccaaagattcggcggaaacggctatggaagtggaggcagatgacactggtggtcagcagccggagcagagtgaattgttggataaggagaaatctgccacggtggatataaacacactcactccctcgacgccctcacaaaccccgccacaactgctggccgtcgaaactgccacatcgggaagcacggccgtcattccggagaacatcctgtccccgcccaagtcagaaactcaaaccgatgagactaacacggcaacatcgacgtcctgctccccagcctctgacggtcagcggtcgccggcggcggatcaacagtcatcggcaccaccgccacaggtacaggcacaggccacgccggcgccggtcaatggctccgtaccaaagtcggggaaaccactctccacagcgctcagcggcaagaagaccagcaaagcggccactacgtcaccacgtgcatccagatgccgcaaaaccaaggcgctgcccatgtacgaaagcgaaatcagcgacaacaagatgggtatccgactgtgcatcaagaaatctgatgccggagaaggcgcacctgctggtgtcacatctccgccagttgcagttcccgcagcaacaaaaactgtgcgcaagcgcgtccgtaaaccaaagcaacaggacagcgatgaggccgagtatgagccgcgcaagaaaaaaggcggaggaggtggtagtggcggcgaaaagaaggtttcaacgagtccggatgctgcggaggcggctggcgatccagtcgagcagagtgtctgggctcaaaagctgcccgaggaagtcctattcagaatctttgagcatgctgtggatacacagggctgtctgcccaccctgtttcgccttggcagagtttgctcgctctggcggcaggtgtctcttaggcctactctgtggcgcactatggatcttaccacatgggtcaaagagaaatatcgcaccgaactcaagctcaagtggtttgtcgacaaccgctgcagtgcctgtacagacttgaatgtttgcattacgctctccggctggaaaggtttcacttcggatcatcttacgtatttggtggataacatgcacaagttgcagcgcttggacttaagttccatcaatgttgagatgaatgccagcaagagcgccgtgggtgtcaactccctatgcaatgcactccagaccatgggcagccgtctaacacatctctatttggcgcacaatcgtctggcaggaataccacaaatagtcggaattctttcgacgcactgtccgaatctaacattattggatctctcgaacgtgaccacgcaggccacatcacacggtgtactccacattgagaagttgcagcgtggctgccagaagctaaaggtcctgcgtgtgacaaactctcatataacgccaagcacggcatcaatgcaggaaattatggactcacctggttttccggaacttgaagaactgtccgtggctgccttaacagatgaatcccgcatcataagcgacgaccatctgcagcgcatccttaagagcagctccaagctaaagctactggacgtacgcaactgtacacgactgacgcacgagagcctaatccgcttacctgcctgggatatcaagcatttattcctgtcaggttgctcagtcacacgagatatggggtcgggtctggaactcattgcctcaaagtgggcgcacagtctcatagaactggatttggcttgggcgaatatgcagcagcccattgataatgcgttgcgcgccctagcggaaaagggcagagattcgccgttggctcatttgaatctatgcggctcctctgtttccgatgaggcggtaaaggaaatactgacgaactgccaaaatatgagctccatcaacttggcatcgtgccgtggtctgccgcgaggcgtcaagcgcttgatgcagggaccgcaggagctaggcgaacttcgggaggttctgggggtgcagctgaagagcagcagcgggagcaactaa

SEQ ID NO: 27432 - protein, 697 aa, DROSOPHILA
MSESLSSQVEETKVSDDDGVKEKAEVSTAKDSAETAMEVEADDTGGQQPEQSELLDKEKSATVDINTLTPSTPSQTPPQLLAVETATSGSTAVIPENILSPPKSETQTDETNTATSTSCSPASDGQRSPAADQQSSAPPPQVQAQATPAPVNGSVPKSGKPLSTALSGKKTSKAATTSPRASRCRKTKALPMYESEISDNKMGIRLCIKKSDAGEGAPAGVTSPPVAVPAATKTVRKRVRKPKQQDSDEAEYEPRKKKGGGGGSGGEKKVSTSPDAAEAAGDPVEQSVWAQKLPEEVLFRIFEHAVDTQGCLPTLFRLGRVCSLWRQVSLRPTLWRTMDLTTWVKEKYRTELKLKWFVDNRCSACTDLNVCITLSGWKGFTSDHLTYLVDNMHKLQRLDLSSINVEMNASKSAVGVNSLCNALQTMGSRLTHLYLAHNRLAGIPQIVGILSTHCPNLTLLDLSNVTTQATSHGVLHIEKLQRGCQKLKVLRVTNSHITPSTASMQEIMDSPGFPELEELSVAALTDESRIISDDHLQRILKSSSKLKLLDVRNCTRLTHESLIRLPAWDIKHLFLSGCSVTRDMGSGLELIASKWAHSLIELDLAWANMQQPIDNALRALAEKGRDSPLAHLNLCGSSVSDEAVKEILTNCQNMSSINLASCRGLPRGVKRLMQGPQELGELREVLGVQLKSSSGSN

SEQ ID NO: 27433 - DNA, 2969 bp, DROSOPHILA
ctcaagctgcccaatgtagacacccggtggcgtacagaggatttctcgggtgagaattgtggaatttccgaagtcgtatttatgatcatgacgtcctattcttaaggcattgacatgcagctggataaacttcagcggcctcgcaagagacttaccgaactgatgcttaagagtctaaaggagcagggcaggatctctggctcaaaacaattcctgcccatctttctgcgcgctccgaaggcgatagccccaggggaaatggagttttctgtcacggaactgcagcaggaagcagcagtgcccaccagttccacagagcgtcttccctcgcacttaatcctgcgcagcattggctacaaatctagttgcgtggatacgggcatcaactttgacactcgacgcggtcgcgttcacaacattaatggtcgtattcttaaggatgatgctacgggagaggttgaccctggactttatgtagctggctggctaggaactgggcccactggcgttattgtgaccaccatgaacggcgcctttgcggtagccaagaccatctgcgatgacataaacacgaatgctctggacaccagttctgtcaaaccaggatacgatgcggatggcaaacgagtggttacttgggatggctggcagagaatcaatgatttcgagagcgcagcgggaaaagccaagggaaagccgcgcgagaagattgttagcattgaggaaatgttacgggtggctggcgtctgatgccaggattccatgggttgcggttgacaatagtttccttttataaccaatctagtgttctttatttatctgtcgtttgaggcctttgttattcgttgtaaatacacaagtcatttataaaacaattgtaaatctctagtatccaaatttttttgtgcaagataaattttagagagttacgagaatggaccacgctataacgccggaaccgcacttggtgccagggtaagctcattgaattgctccactgatggatgaatgtatcaaaggtgttgatgtaactttcagttacacgggtcactgcgcccagaatcgcgaccgagtgggtcgaacttatggccgtcagacgcacaagctgttaatagacccctgtatttaccacgctcccgaactgatagtggctcccattcatgccaagcgcggcctcaaggactatcccacagagcaggagctgaagattctgcgcactcgtgagggtttggtggactccgtttaccgacatcccatattaccaggctacgccggatttgtcccgaacaaagtgagtcagattggcaagcgatatgttgctgccgcatccgctggagtagctcggcatgagacgctgatggagttgtatcggtgcgagaatcggacgctcaggcatcgggatctactggagagtgggaacggactcttcgaccgcaagatcaacgaaagactgctgccacaaacctattaccgatcgcccctgatcctggtgaccggagtgtccaagggcattaaggacgagacttgtccgccgaaaacggagaaactctgctatagcaagttcacatcgccgcacttcctggaggatgaagatgccgacaagttcataatcaatggttactccggccacattcccatgtcagtgacccgattcggggagtccaacaaggtgctgaccaaccgggcactgtgcagcttctcggactatatgtacaagcggaagcgggatacgtggtgttgtggacaggatctcagccggccgtccatcacctgcccgcccgtgggacacttcgtcgtctatcacgaggacagcggaatggtgcccaactatgcgggtcatgttcctggggagacgtacaagttcggacgcacctacgccaagaccacatacgatgcgaagcgctggctggaggtgcacaagaatcttacagtgctgcccgaggtggccaatctggattacgcctactgaagtgatccacctgcgggtatttttcctccgggcatgttcgaattgtaacgcttttgtcaaggccttgccaccccacgtcgcaagtgcagcatttattgtccttgtatcacctggtcccactggcgattgttgtgatgtatcgatacaacaacaacatccccagctttctatctacgtcgttcgttgcagcaaataaataagttttaattgattgtgcgcctttaaaatgtacgaattgtggctaatgccgtgaccaactgcagagcagtgcctctaattttcggcaccagtgtaaaatcggcggttcggggagcaaaagaagcctaaagtgtccataaaacgccaaaggaaaaaatctttagaatcgaattcgaacaattcaaacacacacacgtagtgctgcaccgttcacacaccgccgtggagtactgtaccgcagtgcgtgcgagcgaaacgacccgtgtctcggcagataacatacatttgtatacctctctttcaagtggtgagttgaatgccgattatgcaccctgcacgcgtcgcgccgagcattgtatgcaataagtgaagtgcacagccgcgaaaaaaaggaacagcatagtgaaacaggaaaccccctggaaactcaaattgcctatctgcacagatccctctagaactcccctctcaccccttattaacaaccgagatttatggcgggaactcgaacggagtgtgcgcacaggtcactaacaagtcggtgcgaccccaactgcggtcgacttgtttattaagagcgaagaaacgaataaaaataaaaacaaaaatatatatgtaatttgttgtagcaggtgagatttacgaattcggagaggagagagttcttcgtattaagaacgggggcgaatgggaaaccgtgaaaaaccgccaaaatgggttgagttctttttgcatcgattttcccggccggaatgaaaaaatttaaaattgtgtttttttaaccgattatgaatttttcgga

SEQ ID NO: 27434 - DNA, 969 bp, DROSOPHILA
atggatgaatgtatcaaaggtgttgatgtaactttcagttacacgggtcactgcgcccagaatcgcgaccgagtgggtcgaacttatggccgtcagacgcacaagctgttaatagacccctgtatttaccacgctcccgaactgatagtggctcccattcatgccaagcgcggcctcaaggactatcccacagagcaggagctgaagattctgcgcactcgtgagggtttggtggactccgtttaccgacatcccatattaccaggctacgccggatttgtcccgaacaaagtgagtcagattggcaagcgatatgttgctgccgcatccgctggagtagctcggcatgagacgctgatggagttgtatcggtgcgagaatcggacgctcaggcatcgggatctactggagagtgggaacggactcttcgaccgcaagatcaacgaaagactgctgccacaaacctattaccgatcgcccctgatcctggtgaccggagtgtccaagggcattaaggacgagacttgtccgccgaaaacggagaaactctgctatagcaagttcacatcgccgcacttcctggaggatgaagatgccgacaagttcataatcaatggttactccggccacattcccatgtcagtgacccgattcggggagtccaacaaggtgctgaccaaccgggcactgtgcagcttctcggactatatgtacaagcggaagcgggatacgtggtgttgtggacaggatctcagccggccgtccatcacctgcccgcccgtgggacacttcgtcgtctatcacgaggacagcggaatggtgcccaactatgcgggtcatgttcctggggagacgtacaagttcggacgcacctacgccaagaccacatacgatgcgaagcgctggctggaggtgcacaagaatcttacagtgctgcccgaggtggccaatctggattacgcctactga

SEQ ID NO: 27435 - protein, 322 aa, DROSOPHILA
MDECIKGVDVTFSYTGHCAQNRDRVGRTYGRQTHKLLIDPCIYHAPELIVAPIHAKRGLKDYPTEQELKILRTREGLVDSVYRHPILPGYAGFVPNKVSQIGKRYVAAASAGVARHETLMELYRCENRTLRHRDLLESGNGLFDRKINERLLPQTYYRSPLILVTGVSKGIKDETCPPKTEKLCYSKFTSPHFLEDEDADKFIINGYSGHIPMSVTRFGESNKVLTNRALCSFSDYMYKRKRDTWCCGQDLSRPSITCPPVGHFVVYHEDSGMVPNYAGHVPGETYKFGRTYAKTTYDAKRWLEVHKNLTVLPEVANLDYAY

SEQ ID NO: 27436 - DNA, 2346 bp, DROSOPHILA
aggtagagtggaatccaaagagcagtatttgccagagacccatgccgggctgtagttgacacaccacttagccccttttccgaacaacccaaaacatgagttggtcgggttccagtgacgagctcggggttattgagcagctgaaaaagtccgtggagtcgatcgtggccaaaactgggcccagcagcaagttctccaaggatctcgtccagcggatcggcgagatgcagagcaagctggagtccctggccgaaacggatcggcatgtgtttctcgccgagatgaaggacaagttccagcagacgattggcagaatcgaggagcgaatagtgcagcacgcccatttcgcacagacctactccagttccatagtgtcggcagtgatctttctcttggtctccatattcggtctcagttcccttgatcgcataatgtatcaacgtcaccttactaaccgtctcccttctttccgcattacagctctctttggctacaagctgtacaaatccctgacggaaaaggagctcaagaagcaggagaaactgaagagcaagcaacagaagaaggccaagaagtcaaactgaaggagatggaggcgaggatatcattgacgtagtgcactttccggccctgagaccttccatcttgttaatcaatacaatcgccctgtaaatgactaaatcataaaccagtaaacgtaataaaataaaacgtaccccataactcttttaaatgccacggtaattgtgttgttacgacgagtcgaattaattgccattaaaatacggcatcaggaaatgcaaatcggtgtcgtgacctaacttgttgctgccatctaggcaatccgtccaatcctggcctccgttgtcatgggaaacggggtcgttttgtcgaagcttctcctgtcaggccagctattaatagttaaattcagtttccagttacccagttaagcagcaacactcggaaaggatcaacaatttttgcggaaataaaaaacatgtcctattccagccgtaagttaaaagctcaaccatgacttatctattaatctaatgtgtcaacatgcccttctaggatttggtttcgacttccatctgccggatgagggatggtgctacccgaagaacgacatgcatttcatccgcagcgcggaatgggtgcccgtggagaaggcaggcgtgggccgctcattcgccaatcccaatggcgtgatctatccgcgggtggtaggcatgattccacgctacggcggccacgttccgggcaacaaatttcgtgtgggcaacacctatggccgttccaccatcgacgccaagcgtcatctggccctcaatcatgattgaggaccgagttatcggaacactcactcaccattagccaatcaaattcgctgtgttacgcttacagaagcacccgaaataaatcgtatccagtagaagcctgtagaaaatggcaaatagaaataaaatcatacaaattcaaatgtccaagaaaagcacatttaatttatgatggctttttcgagcaataaaattaattaaactttaggtcacaagataagaatatattcgttatggtacacaaggtgccaaaaacacttttctcctaacaaatatcaagaaaagtaactataattattgatcgcacgcgaaaaattttaaaataaaatctcaaaaagtatttatttcatttattatttgacttttagtacatttattacaacatttctgtaaatgcttcaatatttttttataataataaatacttcttgttaattttcaatatttttagaaatgaaaggagtgatatgtatatttaaacgccttatgagagtatcaagtatcaaaaaggcgcgcaatttaaattcttgctccgctgcaactgtctgtataacaatattaaaacatccttactttcctagctttctattactaatgtactgtcggtgcttggggtcatatatttttagatttttcataggaattttcatctcagaaaaattaaattaaaccgaaatcacgtagtgttaccataacgcaatgagagcaaatactctgttttgtttggattccgttgggtattttggggactgctggcgaaagtctttcgagagataacgagtaaataagaaatcatcgttagcaaaaaacttttttgagaagatcacctagcaaaccgactgattatctgtaagatacgaaaacgagctgctttcccagtagcagagatcggcgactgatccacgatgggcatcaattgccttaacatcttcagacgtggcctccacacgagttccgcccgattgcaggtgatccagagcaccacgcccaccaagcggatatg

SEQ ID NO: 27437 - DNA, 285 bp, DROSOPHILA
atgtcctattccagccgatttggtttcgacttccatctgccggatgagggatggtgctacccgaagaacgacatgcatttcatccgcagcgcggaatgggtgcccgtggagaaggcaggcgtgggccgctcattcgccaatcccaatggcgtgatctatccgcgggtggtaggcatgattccacgctacggcggccacgttccgggcaacaaatttcgtgtgggcaacacctatggccgttccaccatcgacgccaagcgtcatctggccctcaatcatgattga

SEQ ID NO: 27438 - protein, 94 aa, DROSOPHILA
MSYSSRFGFDFHLPDEGWCYPKNDMHFIRSAEWVPVEKAGVGRSFANPNGVIYPRVVGMIPRYGGHVPGNKFRVGNTYGRSTIDAKRHLALNHD

SEQ ID NO: 27439 - DNA, 2540 bp, DROSOPHILA
gctaagtgacaggtcgattgccatatttaattaattattaatcaacaaagccaaatatacagaacagaaacctttccatttacatgtaggtttaaattgtttaagtttcatataaacaaatctttgacttaaatctggactgtaacagacatgttgatgtcaggtcaatcctaataacattttgttgaatactgagtagagcgttaaacatgaggcaaccctttattcgatatcctcgactatcagatacccgtttcttagctagtactaatagaagtgcatgttgaaccaaataatacaaagaatcttttgatacatgagcgctgccctagatggtcagacatagcgatcctgatcaaaaatatatatactttatatgatcagaaacgcatacttcaacctgttacatacataattttaaacgagtctagtataacctctattcatcgcatatcgtgtgtaataatataatatttaatacaaatctgctaatcattaatcccaattaacatagtactcattcacaaggattcatatgcaaataggctctcaattgtttaatgaatgtcaagatcgacttgcttgatctagaatctaaaaagtaaacaactggggatttacgagtgcaagccgttaaacttgagttgtcatactggttcccatcgaaatataccgtatggcgtctaatacttttcaaaacaaaatataaccaaataactaatttgactaaattagctcgtgcgagtcaagaaataacacgcctactgatttgtatggatatggatcttactagtgaataaacttaaaatccacaaaattgaaatcggacgttctgaagctttttttaaaataaagctcttctaccttatttttcatatagaaaaggggctcgtcattggcccttgagttttttcttcatttaatctaataaatataattcttaaaaaaattttagtgcaattactgtagtttttaaacagtaagcttaaaacagcttatcttaaatttatcatgtcagcatttttatttcaccacaatgtgtgtgttcttttggcacctttaagatttctttgaacaagaagtactttttgatttatagtattagtttcagatttcctctttattattaaagacatcgtattgcagtttgaagagaacctactttattttaataaattgtatttgaaatatatgtgttgtcatcagggttagtttaaaaatgtataaatacactagcgaccataatgtccatgtccatgaccaccacccccgtgatgaccatgtccgtagttgccatgtccgtagttgccatgtccgtagttgccatgaccttaaccacgagcatctcgcactccgctttcggcatgttctgctcctagattgaccagatcctcgagagcagctgcattctcattcagggcgagggcataggccagacacaggaggccaacgatggacagaaggattagacgcatcttgcagatacttcgggtcagtgatttcgtggagagatttcttcggttgtgcttggatctttgctttgtgcaactgtaacttttggaaccaaagctgcggtcttttattcgatccagagatccaaagacagagtcgactggcattcctgtttcttgtttactaatttaaatgttcttgtttacgttgcacagatttatttgatattataaaacggcagcacgtaaacaattgaaatggttttctgtgttttaatttggctattaagaagctctttaaagcttcggctttttgttaacttaatgcgctttatttagacttatgagctttcacagaactttaacataacttgattataatcttgatttggatcactttattcaaaagttggcatcaagttttgggaagctactgttttgggactgctaccaccagtaactactatagctgtttctccaggggctgtaggaattactccatccactgttccagcctccattccatcctccattccagctgccactccatcctcctccccatcctgtattccatccgcctccccaacctccgctcagccatctagctggtctattgccctccttcgcttcctgaccacccaaatcagccacgtcatctagtgttgctgcagcagcaggatcctcattcacaggattcgaaaaaacacatcccacgagagtccatacaaccagtaagaagaaggtgaaccgcatgctgaccattctgaacactctaaaatgaattgcgatctgaactgccttttatagctccaagagtgcagttcttgtgcctctaattattacatattcgcaacttgcagaagagaagttctaaggccctgaccccactatatatggttaacaccaaacgataagttcacttaacacaatttacatacggattggcaaagcaagagaattcttagccaacagaaattcaaattgaacaaaaaagtaaaccctttttagtgaaataaaatttataaagaaattagactaacaaaaacaattattaaaactaatttaaaattaataaacaagataacaatg

SEQ ID NO: 27440 - DNA, 540 bp, DROSOPHILA
agcaaagatccaagcacaaccgaagaaatctctccacgaaatcactgacccgaagtatctgcaagatgcgtctaatccttctgtccatcgttggcctcctgtgtctggcctatgccctcgccctgaatgagaatgcagctgctctcgaggatctggtcaatctaggagcagaacatgccgaaagcggagtgcgagatgctcgtggttaaggtcatggcaactacggacatggcaactacggacatggcaactacggacatggtcatcacgggggtggtggtcatggacatggacattatggtcgctagtgtatttatacatttttaaactaaccctgatgacaacacatatatttcaaatacaatttattaaaataaagtaggttctcttcaaactgcaatacgatgtctttaataataaagaggaaatctgaaactaatactataaatcaaaaagtacttcttgttcaaagaaatcttaaaggtgccaaaagaacacacacattgtggtgaaataaaaatgctgacatgataaatttaa

SEQ ID NO: 27441 - protein, 47 aa, DROSOPHILA
MRLILLSIVGLLCLAYALALNENAAALEDLVNLGAEHAESGVRDARG

SEQ ID NO: 27442 - DNA, 5135 bp, DROSOPHILA
cagcagccgcaagctcttggcctagcaggtggaggtggattcattggtggcggaatcggaggtggtgccggttttggacgctacaaggaaagctatcgcgtgcgagcgaggggattcggtggtggataccgcgcccggtacgacaaaaaatttggaggaggattcgccggacttggtgctgctggaggagcgggcttagctggtggcggtctgctgggataaatacaagcatgctatgtagtttaataaccaattataataaattgtattagtaccattaatatgtttatttttaacaatgagactttgtttataactaaagcagacgcactttcttaaggataagtatttacaagctaattaataacaatcaattcatatgccgaattatggtaacataatcctgagaacttgctcctgaacaccctgtatttcttccgctctgcatttctgctgacctgcgcagattccacccccagcaaaagtccaattggcgctctgtgctctcccactttatgatttcccactctctggtggtgcatttcgtcccattcatttccgttgttcttctacttactcaatatatcacgagcacgctctaaatttcttttactcttgttttgacttgtaaagagagtggtacagtggtttacattacagtacattttttcaaaatacaataagttacaatggatatgctttcgaaaagaattttttttgaaatatacatatgtgtttaaaaatatagattattattatcattttgatttgtatctgcaaaatgttacatttaaatattaaataaagaaagcttgtttactaaaatccacaatactataagttatcaaagttttccataacaaatagtatgcggatttagttctaagagtaagtgttaagagtaccaagtttggcgctctttaaagagctggacagattcgcgagatggcagttccctcgacgtggaaatgaattcctgaaattaaacgttgttctttgcccgtcgtgtgcagtcgctctcgctcccgttattcgccgttctgggattcccgctggcggactctggtggccatcaccttgataatccttattgtgaaatatgtgaagtgctgcaaagagtctaaggatatcctgatatattaacggttaactaaactagtgcgcaatattagaggcctaaaaatagcgaaaatagcagacatgccgtgtttttgtgcctctgtgtgtgcgtgagtgtctgcgagtgaagtggaaatttaaaaataaaacaacgctgggactcaaccgaaatccgtctgtatcgtattggccaactgcccagaaaaactccaggtgataagctccattcgaattattgttcgttttcttctttttggccagattttgttgttaattgaatgctcgggggaaaacttttaacactctctcagctgtcagtctctctctctctctctcagcgatttcaatgtctttatgactttctcttaagccaccgctattttcagtatgaccagattatctctttcgttcggacttaaggaacacagtgcaattacttgaagttttcaattaccctaaatagaaggagagattggggggcgttgaagtcctggcacctgccttatctactcgccataaggactgtctcttatgccgccccatgccacccactttcgcaattgacgaaccccgggcaacgtcattattccgcttttcgccagacctcttggcccctctcggcttttctcagtgtaattagtgtgattggggccagtcttgactcgctttcttggcttctgcttgccatttggctgattgacagcagtaatagtggcaaatgcaacaagcccccacagggaattgccttgaaagtacggaaagctgtccaaaataatacctttaccaagttaaaagttgtacacctagctgtaacatcattcgtagaaagcaaattctgaaccagattctacatatgttgagaatggagactagagagactagctaactagagattccttgaacaatacaaaatggtgtgtttgtattttctcaatttctcaaaaatctgcacaaattgtaaaacagcgcttcctaaaacaacccatttgtttttacaagtaaattgtaattgatgtgagaaggtagtgcttgtacacgatggtggtagtttagacaacggttgatatcctgtggtttaaacttaccaccctctggaataaaataacctcaaatggcgctgcatccctcggatcccacgcactgacgtcgctgcaactgaaaccctgaaaattgaaattttagctcgtgcttctgctgggtggctgtgtgtgccgacgagtatgtagttcaaggtcgttggccaactttcggaaagtgtcggagggccaagatgtgcgtttttctcattaccatatagggaaacagaagcgcgagaggccgtggcaagttgaaggacacgcgagtgccacacttgagacgctattcttgggctccagaggcgtccattcagttgacactaatcaccacccacgtaccacaaagcgtgacactaatgagcaccggtcatgcaatagggcagcgtgttggtgacctcttggaatgtggcacctggccaagaccagtcctgcagcacggcaacaggatgcgcagtcattgaacagttaatggagtgcagattgcaacaaggggcgccaacattccgggccactgggcagatgaaagtggccataaatccaacgcctgctctaatcatatcgccccctggccagaagccaatgggcgacaacagcgaacgtcccacttggccgggcttaatgtcagctaattgcattggcgttccgctggctgggagctctttagacttggcgtcgtcagtggggctccccagctccaatgtttcgggttcaacggggcgcaaactgttgttatggtaaccaaacagtgggactcctttaaggtggtttcaagagatgatgacaatggtagagaactatataaatctgagcttggtattccatttggcttttaaatgtatttctttcaaataagtttatggctagatacaatcaaacagtagttaaactaataatggtaaagatacacgacaaatatttcttatctacaatttttaaatatcctattatatttccaacctaaacaagtataactgtatcttaatatccaaaacgaacttcgtcaacatttaccagtgtctggtgtcctttggcgagtgacgcaaagtagtcgcttctcagtgggtgggggtggttatggtgtttatggttattgggtggtgggtggcagccttgggcctggaattatcattcggctttggcctggcccgcttgcccctcgttgacatgtttatgcgcaaatttacgaagtctctctccggttgttgttaaagtctcatatcgattttgttaacacgattataggaacagcgccaaagaataacttgtaaaggataagcaaggacagtgactcgtcgactgttgtgtgacatgctagaagcagttatggcatcggacatcaactgggatcctggtgagttgagtgacgcacccagtcagtccaaaatgattgattaacctttcgctcgctgtgcagctctttccaagctgatcagcacgctcaaggagtcggagaatctatccaatgaccaggaaatcgacttcctgaaggccttgcttgaatccaaggaactaaacgcgctggtcaatgtccacacgaaggtggccaaagtgggtcgagatgatcgtctggccccggtgctctccacctctgcccaggtgttgtacgaagtcctggagcagctgtcccagcattgtcatctgaacgatgactgcaaggaggcctttcacctgctgcaggactctcacctgcaggtgagctgttttattttgatagatgaacgttcttattaatagttcattattttcagcaccttctgttcgcccacgatgcgattgcccagaaggacttctacccgcacctgccggaggcgcctgtcgaaatggacgaggacgaggagaccatcaagattgtgcagctcgtcaagagcaacgagcccctggtgagtgttcgtccagtggcaccagcgctttccatttccatgcccatctcatcgacgtgatcgctgtattgtgctgtccatcgctttccaccgtccactttcgactttcatttccgtaccccgccccgactttcaccgcctacccttcgcctttgccaactgctcctttctgcgcctccattcatactcgttctactgttgttatcgcctccatgtcaactcttttcaatgctaatcaattttgtcaactttgcctttgttaaaatcgaatgaaatcgaatcaatttctcgaattcgcccataccaaacaaatatgcattcgttaacaaaaacaaaaaaatgtaaaaatccaaaaatgtataaaaaaaaaaacacagacaggagcacagagtacggagccaattgttgtaagtaatcgaatgtccatagccgtaaaatgtccactgtaagaaataaaacagaaaacccattcgccaagcactgaagacaacaaacaacagccaggaagctgtgcacacaccaagatacatgtcacataagataccattaccatcctttgttcccattccgttgttcttgtcgctgtgacgcatccattagatacactcacatctagaacatcggaagccgcactccacacagatacacaatcgcacacacacacacactctctccacacgcacacatacgcgccttgcgttggctttctagtaacacgaattgcctacttttagggcgccaccattaaaacggacgaggagtcgggcaagataatcatcgccagaattatgcacggcggcgctgcagatcgctccggattgattcacgtcggcgacgaggtcatcgaggtcaacaacatcaacgtggagggcaagacgccgggcgatgtgctcaccatactggtaagtatgcttagaattgatcgagaaacctcattcttgatgtaattttcataccttttataaacaaccagcaaaactcggagggcaccattacctttaagctggttcccgcggacaacaagggcgcccagcgcgagtccaaagtgcgggtgagggcc

SEQ ID NO: 27443 - DNA, 911 bp, DROSOPHILA
ccgtcgtgtgcagtcgctctcgctcccgttattcgccgttctgggattcccgctggcggactctggtggccatcaccttgataatccttattgtgaaatatgtgaagtgctgcaaagagtctaaggatatcctgatatattaacggttaactaaactagtgcgcaatattagaggcctaaaaatagcgaaaatagcagacatgccgtgtttttgtgcctctgtgtgtgcgtgagtgtctgcgagtgaagtggaaatttaaaaataaaacaacgctgggactcaaccgaaatccgtctgtatcgtattggccaactgcccagaaaaactccaggaacagcgccaaagaataacttgtaaaggataagcaaggacagtgactcgtcgactgttgtgtgacatgctagaagcagttatggcatcggacatcaactgggatcctgctctttccaagctgatcagcacgctcaaggagtcggagaatctatccaatgaccaggaaatcgacttcctgaaggccttgcttgaatccaaggaactaaacgcgctggtcaatgtccacacgaaggtggccaaagtgggtcgagatgatcgtctggccccggtgctctccacctctgcccaggtgttgtacgaagtcctggagcagctgtcccagcattgtcatctgaacgatgactgcaaggaggcctttcacctgctgcaggactctcacctgcagcaccttctgttcgcccacgatgcgattgcccagaaggacttctacccgcacctgccggaggcgcctgtcgaaatggacgaggacgaggagaccatcaagattgtgcagctcgtcaagagcaacgagcccctggtgagtgttcgtccagtggcaccagcgctttccatttccatgcccatctcatcgacgtga

SEQ ID NO: 27444 - protein, 170 aa, DROSOPHILA
MLEAVMASDINWDPALSKLISTLKESENLSNDQEIDFLKALLESKELNALVNVHTKVAKVGRDDRLAPVLSTSAQVLYEVLEQLSQHCHLNDDCKEAFHLLQDSHLQHLLFAHDAIAQKDFYPHLPEAPVEMDEDEETIKIVQLVKSNEPLVSVRPVAPALSISMPISST

SEQ ID NO: 27445 - DNA, 3083 bp, DROSOPHILA
acgggtaaagcgatgccaactttccgggcaactcttaccaacatgatccgagtggagggattcaagtcgctctacgccggcttctcggcaatggtgacccgaaactttatcttcaactcgttacgtgttgttctctacgacgttttccggcgcccttttctctaccagaacgagcggaacgaggaagtgctcaagatctacatggcgctgggatgcagcttcaccgcaggctgcattgcccaggcactggccaatccctttgacatcgtcaaggtgcgaatgcagacggaaggacgccgccgccagctgggctatgatgtgcgggtgaacagcatggtgcaggccttcgtggacatctaccgccgtggcggactgcccagtatgtggaagggtgtagggcccagctgcatgcgtgcctgcctgatgacgaccggcgatgtgggcagctacgatatcagtaagcgcaccttcaagcgcctgctggacttggaggaaggcctgccactgcgtttcgtgtcttccatgtgcgccggactaacggcatccgtgctcagcacgccggcggacgtgatcaagtcgcggatgatgaaccagccggtggacgagagcggcaagaatctgtactacaagaactccctcgactgcgttaggaagctggtcagggaggagggtgtcctcacgttatataagggcctaatgcccacttggtttcggctgggaccgttctcagtgctcttttggctgtccgtcgagcagctgcgtcagtgggaaggccagagtggattttaggagcaaactatcaatcttactatcgtattttgtatgtcttttaacacgcaataaaaggtgcaagtcaaaccatctattatacatattataaatataactttaatcccaatcctattcgttaatatgaaatgattttgttgtctttaattttgctttattttattttttatattccaatgcacacaacaaacactcaagatatttctcttaaatgggaaaaggcgttaacacagtctttaggccagcagaatgggacaattcggaggagaaggaaagacccaagttggagtacttggtgaccaacaagaagactccgccggttgaactctacctcacggcattcgcctccgcctgcagtgccgagattgtgggctatcccttcgatatgtgcaagacccgaatgcagatccagggcgagatcgcgagcagggtgggtcagaaggccaagtaccgaggtctgctggccactgccatgggcatcgtcagggaggagggtctgctgaagctctacggtggcatatccgccatgctgttccgccactcgctcttcagtggcatcaaaatgctgacctacgactatatgcgtgagaagatgatcgtgcccgacgaggacggcaggccgcagctatccttcctgggatcctgcatcagtggcgtcttagccggcgcaactgccagcgtactaacgaatcccaccgagctgattaagatccaaatgcaaatggagggacagcggcgtctaaggggcgagcctccacgcattcacaatgtgctccaggccctgacttccatttacagaacgggtggtgtggtgggtctctggaagggaactgttccaaacacatggcgctcggcactcgtgaccataggtgagccttaaaatcgggattggatcagtcaggttcagatatgttcaatatcaccccttccttctaaaggggacgtcagctgctatgacttttgcaaacgctttctgattgccgagttcgatctggtggataaccgagaagtgcagttcgtagccgccatgaccgccggcgtagcggatgccattctgagcttgccagcggacgtggtcaagtcccggatcatgaatcagccaaccgatgagcagggacgcggcattcattacaagggctccctggattgcttaagtaggttggttagagaggagggctttttggccatgtacaagggattcattccatattggatgcgtgtcggacctgcctccgtggtgttctggatgaccttcgagcagattagacggtttcgtggcagcgaaggttactagctaaagatgcagtttaaaatataacagagtaaaatatcattaatatcctggaggaaagttgatgggaaagttagagggccaagctcttaagtcaatcagaacgaattccgtagtaaatggataaacctattggtatgcggtgaccacatggtttatatgggtaacctttaatgccatttgactcaagtttgagtgattgaatggcgaccaatgttacaatacctgttagccagtagacaacccgccaaaacagcgcttagaaaacggtgaaaactgaaattagcatatttaattgaatgaaccaacgtggaaaacaactcactgcccggggcgaaagatatttgaatgctccgtttggagatgaaaacaaggcacacgcgcatcaaattgcgcggcgttgcgagagccaaaggccatataataaataataatgtttgattaattttacggctgataaaagtggtcgagcaccctcgctcgcccgcctccatcgccactccactccagcgttttccgtgattaatttgagtttttaccagaagtagcgacaacgaatatttcgaacatctcgagagcgaaagtgagcatatggagtccaaatgttgtcactcattcctcgccagaaatttcgatagcattaagatcagacattcgctggcatggatggataatgtgggtcaatgtcttttcgctctggcagcggatgacaggcgagcaatagtatgcaaaaacgacaattactgaaagaaaaagcagctgcgaagtggacgaggcgcagagaaaaattaataaataaatatctgtttttatttatgaacatttttttggcgaaaaataattgcgccgttgcgtcagccatttgaaacgattgcccgtcgacgaaaataacctggccaaccatccaatcgcacagaccaaaaatggccaacgcagcgccgactgctgctgtcttctaaaataattaaaagaaaccataaatgcacagagaattgttaatgcg

SEQ ID NO: 27446 - DNA, 1014 bp, DROSOPHILA
atgggaaaaggcgttaacacagtctttaggccagcagaatgggacaattcggaggagaaggaaagacccaagttggagtacttggtgaccaacaagaagactccgccggttgaactctacctcacggcattcgcctccgcctgcagtgccgagattgtgggctatcccttcgatatgtgcaagacccgaatgcagatccagggcgagatcgcgagcagggtgggtcagaaggccaagtaccgaggtctgctggccactgccatgggcatcgtcagggaggagggtctgctgaagctctacggtggcatatccgccatgctgttccgccactcgctcttcagtggcatcaaaatgctgacctacgactatatgcgtgagaagatgatcgtgcccgacgaggacggcaggccgcagctatccttcctgggatcctgcatcagtggcgtcttagccggcgcaactgccagcgtactaacgaatcccaccgagctgattaagatccaaatgcaaatggagggacagcggcgtctaaggggcgagcctccacgcattcacaatgtgctccaggccctgacttccatttacagaacgggtggtgtggtgggtctctggaagggaactgttccaaacacatggcgctcggcactcgtgaccataggggacgtcagctgctatgacttttgcaaacgctttctgattgccgagttcgatctggtggataaccgagaagtgcagttcgtagccgccatgaccgccggcgtagcggatgccattctgagcttgccagcggacgtggtcaagtcccggatcatgaatcagccaaccgatgagcagggacgcggcattcattacaagggctccctggattgcttaagtaggttggttagagaggagggctttttggccatgtacaagggattcattccatattggatgcgtgtcggacctgcctccgtggtgttctggatgaccttcgagcagattagacggtttcgtggcagcgaaggttactag

SEQ ID NO: 27447 - protein, 337 aa, DROSOPHILA
MGKGVNTVFRPAEWDNSEEKERPKLEYLVTNKKTPPVELYLTAFASACSAEIVGYPFDMCKTRMQIQGEIASRVGQKAKYRGLLATAMGIVREEGLLKLYGGISAMLFRHSLFSGIKMLTYDYMREKMIVPDEDGRPQLSFLGSCISGVLAGATASVLTNPTELIKIQMQMEGQRRLRGEPPRIHNVLQALTSIYRTGGVVGLWKGTVPNTWRSALVTIGDVSCYDFCKRFLIAEFDLVDNREVQFVAAMTAGVADAILSLPADVVKSRIMNQPTDEQGRGIHYKGSLDCLSRLVREEGFLAMYKGFIPYWMRVGPASVVFWMTFEQIRRFRGSEGY

SEQ ID NO: 27448 - DNA, 4282 bp, DROSOPHILA
cgaaaaacatcacatggaaacgtgccgctctgcccgtgtgcttatgctgtgacccagtggcgtagtccggattccccgtaggggttatgtttcaagcctttcgaagatacccctttggttgcgccactgtgcgcagactgtaagctcgccaaaaagctccgggcaaaagcatgcaacacagctgagtgagtgggcaaatcgagtgggctgtcgagtggttttggggcgcagagagaacatgagaaggggcctgataccctctccttgtgcacagagaaaaatttggtattaaataccattttccaaatcattgatctatcagaagataacatcttgactaatcctactatccttaaaaacattaaaaaatttgaaagcttgtatttccaatttttgtttaatttaggctttcaaaatagcgaacaaatttttgtatatgtatacaatttctctctgtgcactcatacagtatttctaggtgacccgtaagaagtacctcatttggctttaaattaggaatttaatttataagtatatatatttactcaattgcatacaagtttttgctagatttggttagtgaaatttcctaagactcttcgttaaataactcgtttgatattggtaggtccattttgtttgtatgtatatatatgcagatatatccttcgatgtatatacagcttacagttgcagtatcctttggccaaattgggaatgacagaactctggagcacttggtttatatgtaagtagttagttatcttttattacccgcctacattgactttacatgatcatttgtccgtagctttggaattacattatatatatatagagagaggcggctggtaataaatcaggttaaaatgtttccgtgtatatacagcaagggagtttacatggaattgtaattaagagcccgaattcaaaagcaagctaagtcataaataaatctaatttacactaaatataaacgatttgggaacaacgaaagcaattacaaaataataaacaaaattatcacaaacaataacagtccggataggatgagaatggcggcccactgtcgtttatctgtgaaagaagatggatacagttaagaattaggaatcagaagtcacaaaagtattcaatgggtaattttgattgtggttcactgaagcatttactcttcattaatatttcaatcaaaatagtccttgaataccacaagtgccgcaccactcaccattattcatgtgcaagactttggcaactttcttcatggtcgtatccaacttggactccgtggtatcgaactcgttcccaaagtcgtctagcatgacggcctgctcatcgagctcaacgccaatttgccgcgagaccgtcttgagggtaccaatcgaatcgctgatcatgtctagctgctcatcctgtccctggatcatacgctgctgtatggacactgtttcgcccacgtacctatgactcggactgtccatgccgccgtgatgcgtctgcccatagtgactgggactgtccagggcgttctccagcttggagtacttggtgccgctgtggcgggatgctgctgccgctgccgccgacatggtcccagctatggtattggccacctgactgccgctattgatcagcgagttgccgttgggacactccacgaggtacgtgcgatcgttgtgtggatgctgatggtactcgttggagttggaattcgaattgggtatggcaatggaatgattgtgattggggctgtggcgatcgttgtcgagcagcggctggtgtgcggtgatgtctctgtcccggctccggttcaggctcatcttatccttcatctgcttgacctcatcgcgagtgttgtcgatgaagtggcgccggctggagagttcgcggttgtcgatccgaaacttgcttggattcttctcaacgatgcgtgtgagtcaaaatggtatgggttaaggagaaaaccgaggagactgatgagctagaaagtcggttctaccgaccttaagataccaagtactctttttttacaattatagtgccaaaaaaacaagttctgtacagtttattagtataatactaataaacgagcgaattaaatcacgaataaattgcatattcagcaattttaaatgggatctcaacctctttatgcgaaaataaaacagacaatgcaattcgataaatgagtaccaggtaacgaattgatttttcaatggtctttgcaaaaggatattgatagtgtcctcgaggtcctcgagatcccactcgatgctccgtagcgagttacgcagctcggtggtggtccattcagcctccgttccgccgttctcgcccagctcccgccaacgcagatagaggccgcgggttttgttcagagctttgaatacctcgctgttggggaaggggagggaaatgaaagaaaaaacagagatataagtaagatagcactttccaccagcagtgcatgtggccatctgccaaatcggggacacctactccttgaccacgaaaaacggatcctccagagacatgccgcgttctcttcttgccacaaaacgaaaactaacactcctagcagtttttcaccagcgtggcgcacttgacggttcttttcatggatttttccgggcgaaaaccaccccccaaaggtacaagggggcaaattgcaagttggcaatagcaaaagcacttcgtgggagttacatcaaaaggcaagcaaatggggagcaaatttttgctttcaatccgttctatatagcaggaatttcacaatcgactgggttttatctttcgcctagcagcgatgtttgaacagcacgtttattgattattgcacttggacccgctccgccgcttatcgctcgatttcttgtggattccgccgacttagctggttccaccgatggcccagagaacactgtcgctatttgcgctccagagattaagcccccaccgagaaccactaccccactggcatttgtttacgccgctcccgctccagcggctgcgcactttggttccttgattaccaaccccttgactaaccgatttgaaaacaacccgaattttggccaaaaaattccacaacaacaaatcgtcggccaaatggccagcactgttgcaattttcatcgctcgctcacctgctgctcgtctccacgtcatttagcaaacttcggtccgagaacacggtgacggactttaatttcaagttcacacgagacaaattctgataaataaatttaagtaaaggttttatttctgttttgctgctagcaaaataaaccgtaaggcttagtatgacccaagtgcgatagcacgtttatcccgcgataatttagtatatatcgcaagtgcagaaaatacgttactaaacagtttgaatcaggtggcagctctggatttgaatatatatttatccacattcagcttgagcagcataaacgaatattttgaaaacctgcaacattcgcatgaattaaagtttacaaaatagcactataaataagctattattactatttcacatgagaacgttcgtaatagagtattaaaatcatctgagtcaggaagtgtgaccaggcgaggggcacaaagcacttaacttccgttgtgctactgccccactgaccaccgttatcaatttcatttagaccgccgtcaaataagtttgaaaagtgctggcgaaatgttgcaaaacaacgcggtgcgcactttgcaatacgacagtgagatccgtgtggcccagcagccaagtctctcagaaccgagaggtaatttagggcatatggctttagaaaacgaataaaaacagcgagtgaatcaccctggcaaaagggtaaccgaattgttaccaactgataagcagtgcaccggattaattattgttgcgagcgagtgtgtcacacagttcgacgcaaaaatgcggccacaagttggctatatcttatcggccagcgttttgttatggtctgcgactcctcaagtgcctttgtttgggacgatcgaacccagcgatcaatccgatagtaaaaccgtacccatgatattagctgtatcctataccaacattttcctattccaagaaaagtaataaaatatttatgtgacaagattatgaaaaaatcgaaaaactactaaagttttaatctaaacgatttgttataaccacaaaatattttcaataatattgctattactcagagctattattagcagaatgttcaacaaccatttttatttaattcaaattcactgtaaaattatgatcttaaaac

SEQ ID NO: 27449 - DNA, 1071 bp, DROSOPHILA
gctagcagcaaaacagaaataaaacctttacttaaatttatttatcagaatttgtctcgtgtgaacttgaaattaaagtccgtcaccgtgttctcggaccgaagtttgctaaatgacgtggagacgagcagcagcgaggtattcaaagctctgaacaaaacccgcggcctctatctgcgttggcgggagctgggcgagaacggcggaacggaggctgaatggaccaccaccgagctgcgtaactcgctacggagcatcgagtgggatctcgaggacctcgaggacactatcagcatcgttgagaagaatccaagcaagtttcggatcgacaaccgcgaactctccagccggcgccacttcatcgacaacactcgcgatgaggtcaagcagatgaaggataagatgagcctgaaccggagccgggacagagacatcaccgcacaccagccgctgctcgacaacgatcgccacagccccaatcacaatcattccattgccatacccaattcgaattccaactccaacgagtaccatcagcatccacacaacgatcgcacgtacctcgtggagtgtcccaacggcaactcgctgatcaatagcggcagtcaggtggccaataccatagctgggaccatgtcggcggcagcggcagcagcatcccgccacagcggcaccaagtactccaagctggagaacgccctggacagtcccagtcactatgggcagacgcatcacggcggcatggacagtccgagtcataggtacgtgggcgaaacagtgtccatacagcagcgtatgatccagggacaggatgagcagctagacatgatcagcgattcgattggtaccctcaagacggtctcgcggcaaattggcgttgagctcgatgagcaggccgtcatgctagacgactttgggaacgagttcgataccacggagtccaagttggatacgaccatgaagaaagttgccaaagtcttgcacatgaataatgataaacgacagtgggccgccattctcatcctatccggactgttattgtttgtgataattttgtttattattttgtaa

SEQ ID NO: 27450 - protein, 226 aa, DROSOPHILA
MKDKMSLNRSRDRDITAHQPLLDNDRHSPNHNHSIAIPNSNSNSNEYHQHPHNDRTYLVECPNGNSLINSGSQVANTIAGTMSAAAAAASRHSGTKYSKLENALDSPSHYGQTHHGGMDSPSHRYVGETVSIQQRMIQGQDEQLDMISDSIGTLKTVSRQIGVELDEQAVMLDDFGNEFDTTESKLDTTMKKVAKVLHMNNDKRQWAAILILSGLLLFVIILFIIL

SEQ ID NO: 27451 - DNA, 16642 bp, DROSOPHILA
aatgtgaccgaaaggaagtccgatactcctccgcgtaatagccaggaaactcagcgcagatccagccagatgtcgaaagatgtcgtaaatgaagatccacccgaagaaagttagttaatcggactcacaaatccaaaatctaaagttgtccaaaaattcttaattatttttaatatggtgtgcaaatagaagatttattttaggtgatcacttcgaaaaagtatagcaatttcagtcgaaaatcgaaaaatatatggaaaaatttaccgtcattgttattaataacgtatacgtatgtaatttctgtctgctgtataatatacatgtgtatgtgtgtatgttaattccccatcatatgcaatggcaaatgctatatgtttgcaacagctgactttacagttcgtttttttttaacatcgaatgttagtttaacatttacgttaacatttatccgttaagaataaaatttgcaacattttgaagtatatttttgtcaattaaaatttgaacttaaaaatcgaagaactgtttacataaacataaatcacaaccggtaattagaataaacggacaataaaaaagacatttgtttatatagatgtacatatgtgagtacatacatagttgattcatttttttctattactgcaagggcaaacctatgcataagtttatttttgcagaagctagcttcctattatttataactttagttacctgtagtatgttgatacaatttttgtacacacctattttcgcgaaaagcgccggcgcgaccgttacaacggcgaaatcaaacttattttcgctttacgaaggtgagtggataagcaacagaaacaaacacatgcagacgctgccgctgcaaaagcgaacttacccggttcgttctcgcgagagcgagagcggttattgctattgctgctggcaaaataaaaccgtatatatggcgacgcagcgctattttgaacacaaagttttgagtcgtcgaccgttgcggacggaaattcagattaggatcgtgagttgtcagaacaaacagaccagacattgcatatagagagcagtattgggccaacaaaaaaaaaaaaaaaatacaaaaaaagcgaaaagagcccacacccaagcaccaggagctgcgaacgtttcgcggaaaagccaatttctcagcgccagccaaaaatcaagaaaaccaacgagcaaaaaattaaacaaatatctttataaaaaccgaattcgagcaactcttatatgtattagctctccccgccatatatctactatataaacgagaattctgccgtgtgcgcgcgtgtgtttggcatatttcgcacaatagatgaaaaaaaaaacgaatgaaagccacaaaaaaataaagaagaaacgcaaggcgaaaatttgtattaaattcggctgaagcaacaacactaaagaaatttcagaaactgccacggcgagaaaaaaaagcgtcggcgtcggtgctttggacggacgcttttctttctctccaagctggcagtagtttttctcctcagcctcttccacctccagttgaccccccgaaagtaatacccaacaaacctcttcttgcttcttttgcagtgtgttaatttagtaaaatataaagttaaccgcgcgttccgtaattccactcacacacataccaacacccaagcagcagcagtagccgcagcggattaaaacttcgtcactctagcaacaaacagaaaaaaaaaacacctacaaaaatggtaagtttatggggctggagaacatgtgcatctttattttctgtttacacaacctgcggccatcattttccattgaaatttccacagtttttgcgaaaaatcaaagtcagacagcgacccccagggctattgccattagtgcgagcgggaggagcgaatcgcttccaattagacgttgtttatatggttttaacggcttttcacacacacacactcgctacacacatcccagcacaccaaacaccccgtcgaaaagcagctgtccccgggaaattcgtttacattttgcaccccaaaaatatatcgcctcacgggtagaaaaaaccagttttttcaacaacccaatatcgttgatttagaaacaagaaattgcgaacaccatgcaaccccttgaaaatatggtagtttatacccctttcacaatgaaacataatcaaaatccataaaactgcattgagaaaaagtgaatgcaatcatttgaaattaagtttatacttaaactagtatatttaagctgcaagattttcatgttcttaacctgacttaatcaaatgttcaactttggcccctagggtcacagaaaacaagcagcacaattaaatagcaatgccaatagcaagaatttacacacatgtcacgtcactcgtcaaaattattatttattttatcaaggctgtcgcacacggaatgttgacgcgatcgggttcgccctataataattccatgacgttcgggtagaaatacccctggaaacccaatcaggcgtggaaaagtggaaactcttatcagcatctcgagcaacacctcattttcgaagcccccctgcttgcccaacccaccaccaccatttgggatcataaatcaatgtgattttagccaatttgttgagcatttatgcacacacacactcgcattcctacatagacgcgttgccatcggcacttttatcagcaatttttcaaagatccccgcaaataatagaaaagcgccctccattttgcttatcagtggaaaatgtgtgaatatatattgatgatgaacaacaaagtcgccggtcccggcattattggcctctcctctttgccccgccgttcgttgttcgcttgttctttgctttctggttgtattttttatttaccgcacacttggccgcaaaaattgaggttagacacggccccatggaaatggtgaaaaaattctttagaggcatttctcctgctcttgcgctcagcttaaccgtttcgacgctctctcgcataaccgtttcacacactttctcgtctctctctatgtgcaattatttcgtttgcgttatcagttccgttttgtgctgcgtctctctctttccgtttctttcagcatttcatttttttttgcgccttgcgcttgtcacttttatcggcgcctgccttttcttgttttcttccataaccgtttcatttgccgcattgcggttattttgctgtttcgccttcgccttggttcgtccgcttcggtcgttcattcgttcggctccgcgtattcgtattcgtgtgcgtgtgagtgagcgtatgggtgtgtgtgttggcggctgcctgttccactttgccttttcgcgcaagaattttattgtaacggcacaggcgaacgatgggggaggaggagcgctgcaaatgaagaaaaattcctgctagacgccgccgcttaaccacataatccaattttcttgccgccctctttgcgctttcttctctcgttcgtttgctttcctctgcgctttttgataagaaagccccacgcccactgcgatgcccacacccgcgccacaccttctttcagcctcatctggtgtcgcctaatttaattagcgattttacagctcacgcagaatgcaaacagcttttaattaaaatatatcgcatcgctttctacgtggccaatttgtttcagtgattcaaccaacgctgctaacttggcccagaagcaaacatttgccaagggttttactgactgatcttcaaagtttgttgatctttagctcggctaattatgagatacgtttgtctgtatatcttatttgtttccgttgaaaatgagccaacattcatataaatttccatgagtcactgtgttcctgggctgacttcatcatatgatcatatggcctatgatgaatgcccgatgatatgtgtgtgtgtcatgttaataatggcaaatgactggcttatggctcagttagcacagttgtttggatcccggtgcgaatgcacttaaattgtacccaaaaaccaagctctcaatctaaccgtcattcataaaaccaaactaaactccatgaaaccggttgagaccggcaaaaaaaaaaaagcgtcggctatacaacggtaaacccggcaaacttggctttaacataaagccgcataatttcagccaagacctgttttaatgttgtatttaactgtcaaactcattggaagaaatagttttattcagcagaactcgtttgtgaatttataaatgattcaagcccaagtgtattaaaattattgttatcaaaatgtattcataagtatgaataatatttgatatcatattatttgcaagtgaaaagtgatgatcttgaactaactactatacaatgacccatccaatgagtcactaccttaaaaaatgacggacaaatcccgataaatatacgcacagcttgagtcctgatcccccaggcatacattttcggaaggcactgtatttgccttggatgtggaagcttcctcgggacgtcgtgggcgtctgattgtgcatacaaatggattaccaattaggcattagccagccccccactcgattaacgacctcgcccgattgactgccattaatggatatcatcggtgggtggggttttgctcatgttgttgattgcaaatgtcgccatttgaagacaggagggcttcaatttgcttttcaacagattggggatctgcatttcgatgggtgtttctcattcggtttctgtttctggcttagtcatgcttgccaatgacataacccagttgaaaagcgttttatctgccccagagtacgccaagataagctgggcaaattcaattgaacgccaacgcgacaaaaagtgcaaataaaacaggtgccaccaacgcgttgccgttaccaaatttgcttgtattcgctgtttaaactcaccgaaattcccccgattagataaggtcaagcagggcgctataattccaatgccaattgctgatttggcttaaagcgagtgggtttctgttctgttccattttccttgccgaacggaagttgtccataaaggctggtcaacacgacatgtctgagagccaagtttgttgtgccatttttcagatttggggtatcttttggccttcaagttgaggtgcccaattcggtggtaaccaaggcgattgattagatagggcgaattggttcgtgctagggaaattcacataaattaacttggttttcaacagttcagagtaataagtatagactagattggcagtagctattattaaacgaagcaaattaagttgttattacataggatcgctcaacaaacaactctatatatatagtttagtatagtttccatatagcagagctttcagcagttatcagcttgaacaaatatatataaatatatagtataagtcatcctatgacgcaggcgaagtttgcttttgcatttttgcttcatgattaataacaattatcgcaattcaaaccgcaggccttatattatactcgttaaattctttggcttatcgccgtagagcgagttgcacaaataaacaatcattttcggccgtaaaacaataacagtaacagtaataggtagacgggaatttaatgtgcccgcttttttgcttttggtgctgcaacattagaccctgagaatcgtttttggccagaatgaccgaccggctcctgtgaaactgacaactcgcacgtctcttgtcacatatatgtatgtatatatgtatgtgcatcattcgcatgacaataataaattttggttttgggtaacgcagccatctccactcctcggttctttggagcttcccccctacggggtctttcttgattattcagtcgccgctgacgtcaggttttgttgattcagcggaaacttaacacctttttcaagacaccagatatatatatatatatgtagaaatattataaacatacctagatacagatacaattgtatctggacttgcctggcgacgggcgggcaaacaatacgcaaaattattcaaattaaacacaattgttctctcccttctcgtcttttgttattcccgattgtgttcacttgggtagttttttgtgttgacattgaaattccatcgagatgccgttgaaaagtaattcacaaaacaaaccaggtcgacgtttagtcctatatctatcagtaaaatttattttgttaagaatataaagtcgaaagttacacaacgtttatcataatggtgtgtgttcgattcatttttgctgcgtttcattcaattaatgctctattcatttgtccctttgcaggccgatcagctgacagaggaacagatcgccgagttcaaagaggcattctcgctattcgacaaagacggcgatggcaccatcacaacaaaggagttgggcacagttatgcgctccctgggccagaatcccacagaggccgagctgcaggacatgatcaacgaggttgatgccgacggtaagttgtggaggattgtggggggaaatactctataaagtgggatagccttttgtgggggtaatgtacgtgattgaaatccttcattggggtgatgtaataaatttcaagtcagattcacatttctcatgccctctgagcatttaaaacttacgaattcgcgaaagagattgcaaaatgcatactaatctgcaaatgttagctaaagggttcaaaaatcgtaaataatctggttttgtatgcctcgtaacttcagtatttcaaacaaattgtgaatttgccttaattttctgtgacccacaacatctagactatgaagtcagacttcgtcagagcttacgaccaatgtgcaaatgagctgattttctatgctatgctggctatatatgagagctggctagaaccccttctaacccgatcccgagatgtctaattttgtttaccccaatctatttggtgttctgggcctaatccctcgcactcgttccattccccaactacctctttcgcagacagacatagatcagaccaacatttgtacgacaaacaatgggtggaaaaaaaaaaagaaaaggaaaatcacttcttggctaaaaatatgcaacaaaaacacgtcataggcattaaaaatagatgactaaaatattttggctctttcccgtgtcttgtctttggcagccgctgctgtcagattttttttcgttggtatttcattttttttttttaatgtttatttttgagcaaaggtggttgttcgcttagctcgaaatctcgtacaagttttagtttaacaaactttcttggggaaacgaggaagatccaattttattttcgatgcaagaggaaatcgagcgacacacgcctcgcgccaaaaatgtggcaaaatgcgaaaatttgaatcgtaaaggggtttttcaccttttgccacaaataaatagattttccaattaagtaagcaggtttgtgctttgctgcttttgctaaggataatacttagcaactaaatcataagaactcagtggctggcacaaagtaacttttatgctcatcatcacttgttctttcataagttttgcaagtgtccccgcccaatttgtatttgttttctcgctgctgctccattttctttgccagcttttctcggctgcctgttgttgctgctgctgctgctgttgcgcttgcacgtggaaattctgtgcgcatgttgtcgaaaatatccaggacacaatctgcaaactcggagtcctgcacacagaattttgagcgcaggcgctgtgaaaaacccctgcatgatttttctcttttttttttttttttttgctggagctaaagtgttgcaatcatggacaagtgggtgatgtggggtttggacaaacgagggggtggcgatgcgcatactaactgtttatcaggactaaaaatagtagttcggtatgtgggtgggtggcaaggggtcgccacttgggagtccagcatttttcgccaactttattttgctggaatttgcatatgtgccaaactttttacattgagtgcaagcaaaatgtttttgccaactttattgtgcaacgtttaatatttaaaattacttgcgaaaattgttgcaactcgaaagtggcacttcccactgcccaccacccactgccgcctgctcccagctgactcctctaatttacgatcccacacaatggaatgtattttgtggccatccgaatcacccactcacatggcccactcacgctggtcacaacagccagccaggcaggcagtcaggaatctgacggaaacattaaacattcattacttaaaatttcgctggcgtctcgtcgcagccagttgacgatggccaaaactgcctggctgccttttattttttttttttttggtctgtgaactgcatgcaaacgagtgcaattagttggcggtgggattggtgggcaggtaggaaggattgtccagcggaataaaaatagcgttatagaagtataattatattatatggccatcataggtgaactccaaaggtggttttctttaaattgcgcttgccaaaaagtcgcagttacgcttttagcggaataatctttttttatggtttgcttataatgtcgatctgaataaaagtcgactatttttgatgagaccaatggaaaatgcgcgcaaactaaatttagccgatgcctttgccttgcacacactgtgtgcgccaaccaaaaaaaaaagacaaaacttattacaattttaaattgtctgcaaaattttgcgctcaacgttgcgaatcggcaagtgggagtgttgatgagcagggaaaggaggaggagagagggaatgggcggaacggcgtaatggaaaccgaaatccgcgccagacactggccatcatcatcatcatctcatcgtcgtcgtcatcattatcgccattggcagcgcgatgagcatcataattatggtaattgggctgcgcgcgggttcgtcaaaggcgtttcgggccagtctaagaagcgtctaacaaaaatggcaacaaatttgccaatggctgtgtatgtctatatatgtgtgtgtgtgcggaggctttccttggtatttgttttctgattttctatttttttggctggggaaatcctatcgacaaagccaaaagcaacagaaaatcgcgtcaaatgttttaaatagaatcataaacacaaaaacgcaggcaagacaacaagcaacagaaaaagaaaaaaaataaaagtgaagaaaaaaccaataccgaaatcgaaatgaactaaagccaccggtcgatattgtatttgatgttcctttggctattttcaaaatatatttttgctactcaatgcggccatatttgaataattataatatctaaattagcccaaagtgtaatgttttttctttcgtcaaattttcgaattcaatgcacacattattttgaaatgggaattgcctccagattttttcaattcatttgaattcgtgtgctcgagaagtatttatttattttaaatcaattaattcggcgaattactgtttacttttttataaaccaaatacttgaagattcaaactatttatttttgtttccattatatgtttaacgggctatttgtgtagctacattcagttcattccattttatttggccaaactctttgtcagtaaatctagattgccccaaggaggagatcatttgctattgaagttcaaaagggcttgtgaacctctgactttgcttttttttttttttttgtttggcaatcatatacgaaaagtttcctctggagaaaacccatttccagcaaagtaataaaaaacacattcagttcacaagaaacaaaatgatggcccacaatgaaccacgctccatttggttttgagggtagcaaaaacagaaaactgaaaagcattttatacactttcattttatggacaaaagacgcttcttcttctttctgctgggaatggctcgaaaaagtcagtcaataacaattaaggccaaaagttgttgctgctgcctttatggcgctgctgcggccccaaaaaaaaaaccagaactattctctcaacttaaaacgaacgaaggaaactttttcaattaatataacaagaatttcggttggaccacttcatttgcgtttcacttacggggatgataacctaaagaaaatgtatttggccaaattcttttacaaattttcattccacttggctgcttttttttgagctgcatctgcgatgaagcagccggatataaagagataatagatatagaaaagagagtgtttcaaccgaaatgggattaggcggacttatctctcgcactccgcaaggtgggtggtccacacacacacacacacacacgtgtgggtggggaaaagtttgtttggggcttaggcaaatatgaaaatatgctcgattatataggaggaaccacagcacctcccagggattttggcgtcgaaaaaggcagcgcgtttggaaaagctttaagtagtgtacacagcccccgggtggatggatattcgtatatttgtatggcgttgtcgggaatggtggagagcaaacttggccgtaatgaagaaaaatgccggctgcctttatccctgacttgaatttattataacgctccggggaagaatttaaattgattgtatgatgatatgagggtggtggtggaggagatgtgatatggtgctagtggaatccccgaaatccgacccacaaagtatgcaacgaaattaattgttattctttatggttatttcccctcgcacaggcaacggcacaattgacttccctgaattccttaccatgatggcacgcaaaatgaaggacaccgatagcgaagaggagatccgagaagccttcagagtgttcgacaaggatggcaacggcttcatctcggcggccgagttgcgtcacgtgatgacaaatctgggcgagaaactcacagacgaggaggtcgatgagatgatccgggaggctgatatcgatggcgacggtcaggtcaattacgaaggtaagtcatctgctgcaacccaaaggtggcgatgtggaaagtatcttaaagatagcttgggaatactgtgtagatagtttatttttgcccctcattcaaagctgatgaaataataaggtggctatgaaagggcaaaatcaaagggtttcctcgaagactttacccaagaaaataatgagtgggaattttccgataatctgcatcgaacaattcattttcgaaggtgtcgttttccacaattttgcttttttgttgctcgcgtgtttggtggctaattggatctgtctgctgcagctggcgggtaactaaaacgaaaaacgcaatagtaatgattgaatcacaggcatcgcatttgagtcacaattggcacttggttgtgtcatatggctttgctaattaacccagatctctatcactctctctctctctctttctgcgcttctagcccacttgttatagtaatacttattttcagtgctagctagccattgtatctgaacacacatatatgtagatagttaaaacaaatagtatctcgccatgtgcagtgcattttaatacgaaattttcgtgttttgtgttcttcgtaactttttaatagcttgaaaattgatttttcaattgagcaaacgtcgagagcagtgtgagaaacaatcgccggcatatcaagttgaatagccaaaacaataaaatagcaaaatggaacgaacttttgagaatgcgcagatttactatggcatatcctcccactgcctttggcactttccgaaatttccctttgttgtgcacaacacacatagcgaggccggtaaaagtagcaattaaaatcggacagcatttccacctacatctatatctatatctatatatatatatctatttattcgcatcgcttatagcacacgtttatatgttgatcttcaagttcaaatagaaatcgtttttggctgccgccgcggcatttcgcggatcaaatagattaatcacaagtaatttatgaacaaaatacataaaaatagcgaaaaagtttaaacaaagcaagccgaagaacgatgatccgcatttataatcaattgttgtgtgctgtggtacgatttctagacaagcaaacatcgatagagaggacaagccaagtaggattaagtagttcgtactaagaaagtgcttcaaactgtcagagataaaaggtatcttgtagttctgaggaactgctctgctgggtttttttctttgcaggaatccccacaagtacttttcgaaagaaggcgataatggcaattgtcaagtgtggttttgttcccaaaagattgcactgcaagaaagtagcgatgatttatgcagtctgctttcgtaaatctcttaattggttgaaaatcaacagataaaaaagtgctgtgccatatttcacttgccatttatatatattttccttccacaatcagcgttttttttttacgcctttcgccactttcctgccggcgaaattgaaatgtttttaaaagccaaaataaatgtcgcgcgtaaattccacacttaaatgattaaactgccggggcaaaaagcaaaccagaaccaaaaccaaaaccaaaaaccagaggcgcacggcaacagtgcggatgtgaaagaacaattaaaatgaaatatataaatattgtgcaatattcttaatttcggggtgttataataatacagagattggatgagaatgaatctcatttcgtttttcgttcagtcagcggaatcagcataatgtatgtaaatataaaatgcgcattgttgccatatacatacatacatacatatgtacatacatatgcatatatatatattttgcttattgccaattaagcaaagtctttattgttgtcttgccggctatacagtgtgccggttgggtattgcctaccaccaaccacccactaccaccccgccattcactctttggtaattttgcaagtgaaaattatatggcgcaaacaatgaatttgcagggaaaagatattggggaatgggaatgggaattggaatgggttgggaatgagttgagacttactttggccggttgccagatagaaaaacgctgtgcgaaaagggaacgagagagcgagaagaacatgtcgaaaatcaaataaaatgtttaacaaaatacaaagaacaacaaattaaacattagcacacgaagcgaagcaaattaaatgaacacatcccaaaatgtctgagcgagagagagagagtgtgagagagagagagagcgagagcagcggagatgaattccaaaattagcaaaaacgaaaaaaaataactaaaagaaaaagaaaaattgtgaaaatatacctttgcacagatagaacaagttagtttggcgaatgtaaacaaagcgacgaaagataaacagcagaaccgcaaacgacgtaatgagatgggtgagggggggggggtggaggggcaggggcattgcggccaaatgccgagtttctaaaacaaaatccacgaaaatttgaccaaaacaattttgttgaccagctggaaaaaaattggaacttgatataggtattaatattattttaattggcccaaataacaagaccattaaaggtcatctagaaacatcaaacgactaagacactgcaagaaatgcaattaaattcgaaataaatttctattcaggcatcttaatttttcgcagtgcaaataaactggtcaaccggtagtaggcgtggttgaagtgggagcagtgatgtttgaggactaagatttaatcaaaggagtgaactttcgagcatttgcatatgggaaaattgacaaggctgccccaaaggagcttctatacgccctttttttggggcgttgcccgaaatagggctaataacattttacatttaagcctttttacggcctcgaaagggtttagttttattatcaaaggtgtgtgttggccactcaagtgttgctggtgccgctagctggaaaaataactataaatgttgcgtttgatttcccaaaagtctgataacaatcgatggctaaattctatggccagaacgtttcgcctgcagattgtaaagtgagcaagaaaaacgataagattattaaaaagtactgcagtcaaatctcgagttctgttgaactttgtctacaactacaattgtagccaagctgaaacataatttggcttaaatgagatcccccattaattattcgtttattcccaaaatcctatgtttggtttgtacacattttattggcattcccccataggtgcttgcaaattcttgaccattgcttcctaggaaatccaaccaattacatgccacgcccacccaattcgcctgtcgtccgtcctatctgtgacttttggtaccaccgccctcttgttgtcgtgcttaaatatttataaaaagccaatcaccctagccaactgaaaacagcagggagatggatgatgatgcgatgcaatcagcaagaacagatgcaccagcgtccgagaattcaattctccccctttaaaaatagatgcaggcagcaaacacctgataaattggggacaccaacacatatattataccatctcatatctatggtataatactacttgattctttttcatagatgagttagtttagaaccttttaattttttttttttttttccaattggattgtatgatccatcaatctttatataaacttatattagataggcatcccttcccttgatgcacggtatgtgctagtctggactttcgggcatagctttcccgttatctcacccattcatttgcgaacaatgcaacgtacgtctccattgcacttggcctgcgtcgccgtcaacgtcgcaagcatcctctgctttctatttttggacgaggaaccgaggagagtacataatctctggcgcgattgactgtctgagtctttgcactcaataaattttccttggctatatggctctatttttcagtatggtgttgtgtgtgcgtgtgtgtgagtgtgcggcaagtgttttcatcagacgtctcgtgacttgctcgtttatcttattgattagctggcccgcagtgtaatgctcgtttgctattgattaattggcgtcttaatttagtagaaggttaatgacagcgctcagctattttcgatacttgatttgtcgtgtgaatctctttgcattttgtgtcaattgagtggtttaataagtggttggaaatgatgtttttagatcgagaacgatgctcgtgattaaaaattaaatatttatgggtgcttgtctatagttaagttaaatgcaaataaacctaatactaattctgaatttttttctctttctttgcagaattcgtgactatgatgacatcgaagtgaagcgttaaattatttctttttaagcctttctatttttttaagatgttgacgaagactgtagctgtgcgcaataacatcgcgccacgctgttgctatggaccccagtaaaagatcttaaaaaaaaaacaacaaaaaaaaacaacaacaaacaacaaagagttaagcaaaaaacaaccaacataaaggagaataagaagcaaaaaaccatttaagaaactttaaaacaaataaaaaacttacacatctaaaaaaatgcaaaagcaaatgaaaatttaaacaagcgaaaatgaaacaaccgaattgaattcaaaggtaaagaatttcattaaactgagcgagatgttgaacgagagggaaaacaacataattttaatgcaacaacaaacaacaaccaagcagcatacttaatgaagtcaccgtttaaaaccacaaaccaactacaactacaacaagaacaaccagcagcaacaaacaagagtcgcatgttatcgtttcgagcaacaagaacaacaagtctatcactacacttaaacaaaatgaggagcgagaagaagacgagcaagcagagggagaagcaagaagcagcagcagcatccaccagtattgccgaaagatggcgcccatggcgcactaaggtcagcgcgccacctggcgacggcggctcgcaccggctgcattttgtttgacagttttccactaagaagtaaaaaaaaagaaaataatgaaaaccccccactctgtaagctagcaaattgtgtttaaagtataatgaaaaaattgtcgatttcgttgcgagaaagaataaaaataaaagctaaacaaacaacaaataaaaataaaaatacaaataaaacaaaaactgttaaagaaaactatttgaaatttttgcaaactggcaaagtttatatagacacgctacacgaacacactctcatacacacatacaccacacacacacatttacacccccacacacagacatgtcagaaaaccagaaataaaatatattataaatacaacatatatatattataaataatgtaaaatcaaacaacaacaaattcttcttattaaattatatttaaatttaaaattaataaatataaaaaataaaacaaataaaaattacaaaaaaaaaaaacaaagaaaccaactacaaatacattttcgatataaaattaaattaaaaaccaaaaatgtggcgcgcagcagaagatgaggcatatttttgggggctgtacgaggaccagcaggaccgcagtccaaaaggtccttgaaaggcagct

SEQ ID NO: 27452 - DNA, 1049 bp, DROSOPHILA
acggaaattcagattaggatctgtgttaatttagtaaaatataaagttaaccgcgcgttccgtaattccactcacacacataccaacacccaagcagcagcagtagccgcagcggattaaaacttcgtcactctagcaacaaacagaaaaaaaaaacacctacaaaaatggccgatcagctgacagaggaacagatcgccgagttcaaagaggcattctcgctattcgacaaagacggcgatggcaccatcacaacaaaggagttgggcacagttatgcgctccctgggccagaatcccacagaggccgagctgcaggacatgatcaacgaggttgatgccgacggcaacggcacaattgacttccctgaattccttaccatgatggcacgcaaaatgaaggacaccgatagcgaagaggagatccgagaagccttcagagtgttcgacaaggatggcaacggcttcatctcggcggccgagttgcgtcacgtgatgacaaatctgggcgagaaactcacagacgaggaggtcgatgagatgatccgggaggctgatatcgatggcgacggtcaggtcaattacgaagaattcgtgactatgatgacatcgaagtgaagcgttaaattatttctttttaagcctttctatttttttaagatgttgacgaagactgtagctgtgcgcaataacatcgcgccacgctgttgctatggaccccagtaaaagatcttaaaaaaaaaacaacaaaaaaaaacaacaacaaacaacaaagagttaagcaaaaaacaaccaacataaaggagaataagaagcaaaaaaccatttaagaaactttaaaacaaataaaaaacttacacatctaaaaaaatgcaaaagcaaatgaaaatttaaacaagcgaaaatgaaacaaccgaattgaattcaaaggtaaagaatttcattaaactgagcgagatgttgaacgagagggaaaacaacataattttaatgcaacaacaaacaacaaccaagcagcatacttaatgaagtcaccgtttaaaaccacaa

SEQ ID NO: 27453 - protein, 149 aa, DROSOPHILA; identical to SEQ ID NO: 18420

SEQ ID NO: 27454 - DNA, 7714 bp, DROSOPHILA
gaagtccgccagtaatgtgaccgaaaggaagtccgatactcctccgcgtaatagccaggaaactcagcgcagatccagccagatgtcgaaagatgtcgtaaatgaagatccacccgaagaaagttagttaatcggactcacaaatccaaaatctaaagttgtccaaaaattcttaattatttttaatatggtgtgcaaatagaagatttattttaggtgatcacttcgaaaaagtatagcaatttcagtcgaaaatcgaaaaatatatggaaaaatttaccgtcattgttattaataacgtatacgtatgtaatttctgtctgctgtataatatacatgtgtatgtgtgtatgttaattccccatcatatgcaatggcaaatgctatatgtttgcaacagctgactttacagttcgtttttttttaacatcgaatgttagtttaacatttacgttaacatttatccgttaagaataaaatttgcaacattttgaagtatatttttgtcaattaaaatttgaacttaaaaatcgaagaactgtttacataaacataaatcacaaccggtaattagaataaacggacaataaaaaagacatttgtttatatagatgtacatatgtgagtacatacatagttgattcatttttttctattactgcaagggcaaacctatgcataagtttatttttgcagaagctagcttcctattatttataactttagttacctgtagtatgttgatacaatttttgtacacacctattttcgcgaaaagcgccggcgcgaccgttacaacggcgaaatcaaacttattttcgctttacgaaggtgagtggataagcaacagaaacaaacacatgcagacgctgccgctgcaaaagcgaacttacccggttcgttctcgcgagagcgagagcggttattgctattgctgctggcaaaataaaaccgtatatatggcgacgcagcgctattttgaacacaaagttttgagtcgtcgaccgttgcggacggaaattcagattaggatcgtgagttgtcagaacaaacagaccagacattgcatatagagagcagtattgggccaacaaaaaaaaaaaaaaaatacaaaaaaagcgaaaagagcccacacccaagcaccaggagctgcgaacgtttcgcggaaaagccaatttctcagcgccagccaaaaatcaagaaaaccaacgagcaaaaaattaaacaaatatctttataaaaaccgaattcgagcaactcttatatgtattagctctccccgccatatatctactatataaacgagaattctgccgtgtgcgcgcgtgtgtttggcatatttcgcacaatagatgaaaaaaaaaacgaatgaaagccacaaaaaaataaagaagaaacgcaaggcgaaaatttgtattaaattcggctgaagcaacaacactaaagaaatttcagaaactgccacggcgagaaaaaaaagcgtcggcgtcggtgctttggacggacgcttttctttctctccaagctggcagtagtttttctcctcagcctcttccacctccagttgaccccccgaaagtaatacccaacaaacctcttcttgcttcttttgcagtgtgttaatttagtaaaatataaagttaaccgcgcgttccgtaattccactcacacacataccaacacccaagcagcagcagtagccgcagcggattaaaacttcgtcactctagcaacaaacagaaaaaaaaaacacctacaaaaatggtaagtttatggggctggagaacatgtgcatctttattttctgtttacacaacctgcggccatcattttccattgaaatttccacagtttttgcgaaaaatcaaagtcagacagcgacccccagggctattgccattagtgcgagcgggaggagcgaatcgcttccaattagacgttgtttatatggttttaacggcttttcacacacacacactcgctacacacatcccagcacaccaaacaccccgtcgaaaagcagctgtccccgggaaattcgtttacattttgcaccccaaaaatatatcgcctcacgggtagaaaaaaccagttttttcaacaacccaatatcgttgatttagaaacaagaaattgcgaacaccatgcaaccccttgaaaatatggtagtttatacccctttcacaatgaaacataatcaaaatccataaaactgcattgagaaaaagtgaatgcaatcatttgaaattaagtttatacttaaactagtatatttaagctgcaagattttcatgttcttaacctgacttaatcaaatgttcaactttggcccctagggtcacagaaaacaagcagcacaattaaatagcaatgccaatagcaagaatttacacacatgtcacgtcactcgtcaaaattattatttattttatcaaggctgtcgcacacggaatgttgacgcgatcgggttcgccctataataattccatgacgttcgggtagaaatacccctggaaacccaatcaggcgtggaaaagtggaaactcttatcagcatctcgagcaacacctcattttcgaagcccccctgcttgcccaacccaccaccaccatttgggatcataaatcaatgtgattttagccaatttgttgagcatttatgcacacacacactcgcattcctacatagacgcgttgccatcggcacttttatcagcaatttttcaaagatccccgcaaataatagaaaagcgccctccattttgcttatcagtggaaaatgtgtgaatatatattgatgatgaacaacaaagtcgccggtcccggcattattggcctctcctctttgccccgccgttcgttgttcgcttgttctttgctttctggttgtattttttatttaccgcacacttggccgcaaaaattgaggttagacacggccccatggaaatggtgaaaaaattctttagaggcatttctcctgctcttgcgctcagcttaaccgtttcgacgctctctcgcataaccgtttcacacactttctcgtctctctctatgtgcaattatttcgtttgcgttatcagttccgttttgtgctgcgtctctctctttccgtttctttcagcatttcatttttttttgcgccttgcgcttgtcacttttatcggcgcctgccttttcttgttttcttccataaccgtttcatttgccgcattgcggttattttgctgtttcgccttcgccttggttcgtccgcttcggtcgttcattcgttcggctccgcgtattcgtattcgtgtgcgtgtgagtgagcgtatgggtgtgtgtgttggcggctgcctgttccactttgccttttcgcgcaagaattttattgtaacggcacaggcgaacgatgggggaggaggagcgctgcaaatgaagaaaaattcctgctagacgccgccgcttaaccacataatccaattttcttgccgccctctttgcgctttcttctctcgttcgtttgctttcctctgcgctttttgataagaaagccccacgcccactgcgatgcccacacccgcgccacaccttctttcagcctcatctggtgtcgcctaatttaattagcgattttacagctcacgcagaatgcaaacagcttttaattaaaatatatcgcatcgctttctacgtggccaatttgtttcagtgattcaaccaacgctgctaacttggcccagaagcaaacatttgccaagggttttactgactgatcttcaaagtttgttgatctttagctcggctaattatgagatacgtttgtctgtatatcttatttgtttccgttgaaaatgagccaacattcatataaatttccatgagtcactgtgttcctgggctgacttcatcatatgatcatatggcctatgatgaatgcccgatgatatgtgtgtgtgtcatgttaataatggcaaatgactggcttatggctcagttagcacagttgtttggatcccggtgcgaatgcacttaaattgtacccaaaaaccaagctctcaatctaaccgtcattcataaaaccaaactaaactccatgaaaccggttgagaccggcaaaaaaaaaaaagcgtcggctatacaacggtaaacccggcaaacttggctttaacataaagccgcataatttcagccaagacctgttttaatgttgtatttaactgtcaaactcattggaagaaatagttttattcagcagaactcgtttgtgaatttataaatgattcaagcccaagtgtattaaaattattgttatcaaaatgtattcataagtatgaataatatttgatatcatattatttgcaagtgaaaagtgatgatcttgaactaactactatacaatgacccatccaatgagtcactaccttaaaaaatgacggacaaatcccgataaatatacgcacagcttgagtcctgatcccccaggcatacattttcggaaggcactgtatttgccttggatgtggaagcttcctcgggacgtcgtgggcgtctgattgtgcatacaaatggattaccaattaggcattagccagccccccactcgattaacgacctcgcccgattgactgccattaatggatatcatcggtgggtggggttttgctcatgttgttgattgcaaatgtcgccatttgaagacaggagggcttcaatttgcttttcaacagattggggatctgcatttcgatgggtgtttctcattcggtttctgtttctggcttagtcatgcttgccaatgacataacccagttgaaaagcgttttatctgccccagagtacgccaagataagctgggcaaattcaattgaacgccaacgcgacaaaaagtgcaaataaaacaggtgccaccaacgcgttgccgttaccaaatttgcttgtattcgctgtttaaactcaccgaaattcccccgattagataaggtcaagcagggcgctataattccaatgccaattgctgatttggcttaaagcgagtgggtttctgttctgttccattttccttgccgaacggaagttgtccataaaggctggtcaacacgacatgtctgagagccaagtttgttgtgccatttttcagatttggggtatcttttggccttcaagttgaggtgcccaattcggtggtaaccaaggcgattgattagatagggcgaattggttcgtgctagggaaattcacataaattaacttggttttcaacagttcagagtaataagtatagactagattggcagtagctattattaaacgaagcaaattaagttgttattacataggatcgctcaacaaacaactctatatatatagtttagtatagtttccatatagcagagctttcagcagttatcagcttgaacaaatatatataaatatatagtataagtcatcctatgacgcaggcgaagtttgcttttgcatttttgcttcatgattaataacaattatcgcaattcaaaccgcaggccttatattatactcgttaaattctttggcttatcgccgtagagcgagttgcacaaataaacaatcattttcggccgtaaaacaataacagtaacagtaataggtagacgggaatttaatgtgcccgcttttttgcttttggtgctgcaacattagaccctgagaatcgtttttggccagaatgaccgaccggctcctgtgaaactgacaactcgcacgtctcttgtcacatatatgtatgtatatatgtatgtgcatcattcgcatgacaataataaattttggttttgggtaacgcagccatctccactcctcggttctttggagcttcccccctacggggtctttcttgattattcagtcgccgctgacgtcaggttttgttgattcagcggaaacttaacacctttttcaagacaccagatatatatatatatatgtagaaatattataaacatacctagatacagatacaattgtatctggacttgcctggcgacgggcgggcaaacaatacgcaaaattattcaaattaaacacaattgttctctcccttctcgtcttttgttattcccgattgtgttcacttgggtagttttttgtgttgacattgaaattccatcgagatgccgttgaaaagtaattcacaaaacaaaccaggtcgacgtttagtcctatatctatcagtaaaatttattttgttaagaatataaagtcgaaagttacacaacgtttatcataatggtgtgtgttcgattcatttttgctgcgtttcattcaattaatgctctattcatttgtccctttgcaggccgatcagctgacagaggaacagatcgccgagttcaaagaggcattctcgctattcgacaaagacggcgatggcaccatcacaacaaaggagttgggcacagttatgcgctccctgggccagaatcccacagaggccgagctgcaggacatgatcaacgaggttgatgccgacggtaagttgtggaggattgtggggggaaatactctataaagtgggatagccttttgtgggggtaatgtacgtgattgaaatccttcattggggtgatgtaataaatttcaagtcagattcacatttctcatgccctctgagcatttaaaacttacgaattcgcgaaagagattgcaaaatgcatactaatctgcaaatgttagctaaagggttcaaaaatcgtaaataatctggttttgtatgcctcgtaacttcagtatttcaaacaaattgtgaatttgccttaattttctgtgacccacaacatctagactatgaagtcagacttcgtcagagcttacgaccaatgtgcaaatgagctgattttctatgctatgctggctatatatgagagctggctagaaccccttctaacccgatcccgagatgtctaattttgtttaccccaatctatttggtgttctgggcctaatccctcgcactcgttccattccccaactacctctttcgcagacagacatagatcagaccaacatttgtacgacaaacaatgggtggaaaaaaaaaaagaaaaggaaaatcacttcttggctaaaaatatgcaacaaaaacacgtcataggcattaaaaatagatgactaaaatattttggctctttcccgtgtcttgtctttggcagccgctgctgtcagattttttttcgttggtatttcattttttttttttaatgtttatttttgagcaaaggtggttgttcgcttagctcgaaatctcgtacaagttttagtttaacaaactttcttggggaaacgaggaagatccaattttattttcgatgcaagaggaaatcgagcgacacacgcctcgcgccaaaaatgtggcaaaatgcgaaaatttgaatcgtaaaggggtttttcaccttttgccacaaataaatagattttccaattaagtaagcaggtttgtgctttgctgcttttgctaaggataatacttagcaactaaatcataagaactcagtggctggcacaaagtaacttttatgctcatcatcacttgttctttcataagttttgcaagtgtccccgcccaatttgtatttgttttctcgctgctgctccattttctttgccagcttttctcggctgcctgttgttgctgctgctgctgctgttgcgcttgcacgtggaaattctgtgcgcatgttgtcgaaaatatccag

SEQ ID NO: 27455 - DNA, 579 bp, DROSOPHILA
tcgaccgttgcggacggaaattcagattaggatctgtgttaatttagtaaaatataaagttaaccgcgcgttccgtaattccactcacacacataccaacacccaagcagcagcagtagccgcagcggattaaaacttcgtcactctagcaacaaacagaaaaaaaaaacacctacaaaaatggccgatcagctgacagaggaacagatcgccgagttcaaagaggcattctcgctattcgacaaagacggcgatggcaccatcacaacaaaggagttgggcacagttatgcgctccctgggccagaatcccacagaggccgagctgcaggacatgatcaacgaggttgatgccgacggtaagttgtggaggattgtggggggaaatactctataaagtgggatagccttttgtgggggtaatgtacgtgattgaaatccttcattggggtgatgtaataaatttcaagtcagattcacatttctcatgccctctgagcatttaaaacttacgaattcgcgaaagagattgcaaaatgcatactaatctgcaaatgttagctaaagggttcaaaaatcg

SEQ ID NO: 27456 - protein, 71 aa, DROSOPHILA
MADQLTEEQIAEFKEAFSLFDKDGDGTITTKELGTVMRSLGQNPTEAELQDMINEVDADGKLWRIVGGNTL

SEQ ID NO: 27457 - DNA, 16281 bp, DROSOPHILA
gatttattttaggtgatcacttcgaaaaagtatagcaatttcagtcgaaaatcgaaaaatatatggaaaaatttaccgtcattgttattaataacgtatacgtatgtaatttctgtctgctgtataatatacatgtgtatgtgtgtatgttaattccccatcatatgcaatggcaaatgctatatgtttgcaacagctgactttacagttcgtttttttttaacatcgaatgttagtttaacatttacgttaacatttatccgttaagaataaaatttgcaacattttgaagtatatttttgtcaattaaaatttgaacttaaaaatcgaagaactgtttacataaacataaatcacaaccggtaattagaataaacggacaataaaaaagacatttgtttatatagatgtacatatgtgagtacatacatagttgattcatttttttctattactgcaagggcaaacctatgcataagtttatttttgcagaagctagcttcctattatttataactttagttacctgtagtatgttgatacaatttttgtacacacctattttcgcgaaaagcgccggcgcgaccgttacaacggcgaaatcaaacttattttcgctttacgaaggtgagtggataagcaacagaaacaaacacatgcagacgctgccgctgcaaaagcgaacttacccggttcgttctcgcgagagcgagagcggttattgctattgctgctggcaaaataaaaccgtatatatggcgacgcagcgctattttgaacacaaagttttgagtcgtcgaccgttgcggacggaaattcagattaggatcgtgagttgtcagaacaaacagaccagacattgcatatagagagcagtattgggccaacaaaaaaaaaaaaaaaatacaaaaaaagcgaaaagagcccacacccaagcaccaggagctgcgaacgtttcgcggaaaagccaatttctcagcgccagccaaaaatcaagaaaaccaacgagcaaaaaattaaacaaatatctttataaaaaccgaattcgagcaactcttatatgtattagctctccccgccatatatctactatataaacgagaattctgccgtgtgcgcgcgtgtgtttggcatatttcgcacaatagatgaaaaaaaaaacgaatgaaagccacaaaaaaataaagaagaaacgcaaggcgaaaatttgtattaaattcggctgaagcaacaacactaaagaaatttcagaaactgccacggcgagaaaaaaaagcgtcggcgtcggtgctttggacggacgcttttctttctctccaagctggcagtagtttttctcctcagcctcttccacctccagttgaccccccgaaagtaatacccaacaaacctcttcttgcttcttttgcagtgtgttaatttagtaaaatataaagttaaccgcgcgttccgtaattccactcacacacataccaacacccaagcagcagcagtagccgcagcggattaaaacttcgtcactctagcaacaaacagaaaaaaaaaacacctacaaaaatggtaagtttatggggctggagaacatgtgcatctttattttctgtttacacaacctgcggccatcattttccattgaaatttccacagtttttgcgaaaaatcaaagtcagacagcgacccccagggctattgccattagtgcgagcgggaggagcgaatcgcttccaattagacgttgtttatatggttttaacggcttttcacacacacacactcgctacacacatcccagcacaccaaacaccccgtcgaaaagcagctgtccccgggaaattcgtttacattttgcaccccaaaaatatatcgcctcacgggtagaaaaaaccagttttttcaacaacccaatatcgttgatttagaaacaagaaattgcgaacaccatgcaaccccttgaaaatatggtagtttatacccctttcacaatgaaacataatcaaaatccataaaactgcattgagaaaaagtgaatgcaatcatttgaaattaagtttatacttaaactagtatatttaagctgcaagattttcatgttcttaacctgacttaatcaaatgttcaactttggcccctagggtcacagaaaacaagcagcacaattaaatagcaatgccaatagcaagaatttacacacatgtcacgtcactcgtcaaaattattatttattttatcaaggctgtcgcacacggaatgttgacgcgatcgggttcgccctataataattccatgacgttcgggtagaaatacccctggaaacccaatcaggcgtggaaaagtggaaactcttatcagcatctcgagcaacacctcattttcgaagcccccctgcttgcccaacccaccaccaccatttgggatcataaatcaatgtgattttagccaatttgttgagcatttatgcacacacacactcgcattcctacatagacgcgttgccatcggcacttttatcagcaatttttcaaagatccccgcaaataatagaaaagcgccctccattttgcttatcagtggaaaatgtgtgaatatatattgatgatgaacaacaaagtcgccggtcccggcattattggcctctcctctttgccccgccgttcgttgttcgcttgttctttgctttctggttgtattttttatttaccgcacacttggccgcaaaaattgaggttagacacggccccatggaaatggtgaaaaaattctttagaggcatttctcctgctcttgcgctcagcttaaccgtttcgacgctctctcgcataaccgtttcacacactttctcgtctctctctatgtgcaattatttcgtttgcgttatcagttccgttttgtgctgcgtctctctctttccgtttctttcagcatttcatttttttttgcgccttgcgcttgtcacttttatcggcgcctgccttttcttgttttcttccataaccgtttcatttgccgcattgcggttattttgctgtttcgccttcgccttggttcgtccgcttcggtcgttcattcgttcggctccgcgtattcgtattcgtgtgcgtgtgagtgagcgtatgggtgtgtgtgttggcggctgcctgttccactttgccttttcgcgcaagaattttattgtaacggcacaggcgaacgatgggggaggaggagcgctgcaaatgaagaaaaattcctgctagacgccgccgcttaaccacataatccaattttcttgccgccctctttgcgctttcttctctcgttcgtttgctttcctctgcgctttttgataagaaagccccacgcccactgcgatgcccacacccgcgccacaccttctttcagcctcatctggtgtcgcctaatttaattagcgattttacagctcacgcagaatgcaaacagcttttaattaaaatatatcgcatcgctttctacgtggccaatttgtttcagtgattcaaccaacgctgctaacttggcccagaagcaaacatttgccaagggttttactgactgatcttcaaagtttgttgatctttagctcggctaattatgagatacgtttgtctgtatatcttatttgtttccgttgaaaatgagccaacattcatataaatttccatgagtcactgtgttcctgggctgacttcatcatatgatcatatggcctatgatgaatgcccgatgatatgtgtgtgtgtcatgttaataatggcaaatgactggcttatggctcagttagcacagttgtttggatcccggtgcgaatgcacttaaattgtacccaaaaaccaagctctcaatctaaccgtcattcataaaaccaaactaaactccatgaaaccggttgagaccggcaaaaaaaaaaaagcgtcggctatacaacggtaaacccggcaaacttggctttaacataaagccgcataatttcagccaagacctgttttaatgttgtatttaactgtcaaactcattggaagaaatagttttattcagcagaactcgtttgtgaatttataaatgattcaagcccaagtgtattaaaattattgttatcaaaatgtattcataagtatgaataatatttgatatcatattatttgcaagtgaaaagtgatgatcttgaactaactactatacaatgacccatccaatgagtcactaccttaaaaaatgacggacaaatcccgataaatatacgcacagcttgagtcctgatcccccaggcatacattttcggaaggcactgtatttgccttggatgtggaagcttcctcgggacgtcgtgggcgtctgattgtgcatacaaatggattaccaattaggcattagccagccccccactcgattaacgacctcgcccgattgactgccattaatggatatcatcggtgggtggggttttgctcatgttgttgattgcaaatgtcgccatttgaagacaggagggcttcaatttgcttttcaacagattggggatctgcatttcgatgggtgtttctcattcggtttctgtttctggcttagtcatgcttgccaatgacataacccagttgaaaagcgttttatctgccccagagtacgccaagataagctgggcaaattcaattgaacgccaacgcgacaaaaagtgcaaataaaacaggtgccaccaacgcgttgccgttaccaaatttgcttgtattcgctgtttaaactcaccgaaattcccccgattagataaggtcaagcagggcgctataattccaatgccaattgctgatttggcttaaagcgagtgggtttctgttctgttccattttccttgccgaacggaagttgtccataaaggctggtcaacacgacatgtctgagagccaagtttgttgtgccatttttcagatttggggtatcttttggccttcaagttgaggtgcccaattcggtggtaaccaaggcgattgattagatagggcgaattggttcgtgctagggaaattcacataaattaacttggttttcaacagttcagagtaataagtatagactagattggcagtagctattattaaacgaagcaaattaagttgttattacataggatcgctcaacaaacaactctatatatatagtttagtatagtttccatatagcagagctttcagcagttatcagcttgaacaaatatatataaatatatagtataagtcatcctatgacgcaggcgaagtttgcttttgcatttttgcttcatgattaataacaattatcgcaattcaaaccgcaggccttatattatactcgttaaattctttggcttatcgccgtagagcgagttgcacaaataaacaatcattttcggccgtaaaacaataacagtaacagtaataggtagacgggaatttaatgtgcccgcttttttgcttttggtgctgcaacattagaccctgagaatcgtttttggccagaatgaccgaccggctcctgtgaaactgacaactcgcacgtctcttgtcacatatatgtatgtatatatgtatgtgcatcattcgcatgacaataataaattttggttttgggtaacgcagccatctccactcctcggttctttggagcttcccccctacggggtctttcttgattattcagtcgccgctgacgtcaggttttgttgattcagcggaaacttaacacctttttcaagacaccagatatatatatatatatgtagaaatattataaacatacctagatacagatacaattgtatctggacttgcctggcgacgggcgggcaaacaatacgcaaaattattcaaattaaacacaattgttctctcccttctcgtcttttgttattcccgattgtgttcacttgggtagttttttgtgttgacattgaaattccatcgagatgccgttgaaaagtaattcacaaaacaaaccaggtcgacgtttagtcctatatctatcagtaaaatttattttgttaagaatataaagtcgaaagttacacaacgtttatcataatggtgtgtgttcgattcatttttgctgcgtttcattcaattaatgctctattcatttgtccctttgcaggccgatcagctgacagaggaacagatcgccgagttcaaagaggcattctcgctattcgacaaagacggcgatggcaccatcacaacaaaggagttgggcacagttatgcgctccctgggccagaatcccacagaggccgagctgcaggacatgatcaacgaggttgatgccgacggtaagttgtggaggattgtggggggaaatactctataaagtgggatagccttttgtgggggtaatgtacgtgattgaaatccttcattggggtgatgtaataaatttcaagtcagattcacatttctcatgccctctgagcatttaaaacttacgaattcgcgaaagagattgcaaaatgcatactaatctgcaaatgttagctaaagggttcaaaaatcgtaaataatctggttttgtatgcctcgtaacttcagtatttcaaacaaattgtgaatttgccttaattttctgtgacccacaacatctagactatgaagtcagacttcgtcagagcttacgaccaatgtgcaaatgagctgattttctatgctatgctggctatatatgagagctggctagaaccccttctaacccgatcccgagatgtctaattttgtttaccccaatctatttggtgttctgggcctaatccctcgcactcgttccattccccaactacctctttcgcagacagacatagatcagaccaacatttgtacgacaaacaatgggtggaaaaaaaaaaagaaaaggaaaatcacttcttggctaaaaatatgcaacaaaaacacgtcataggcattaaaaatagatgactaaaatattttggctctttcccgtgtcttgtctttggcagccgctgctgtcagattttttttcgttggtatttcattttttttttttaatgtttatttttgagcaaaggtggttgttcgcttagctcgaaatctcgtacaagttttagtttaacaaactttcttggggaaacgaggaagatccaattttattttcgatgcaagaggaaatcgagcgacacacgcctcgcgccaaaaatgtggcaaaatgcgaaaatttgaatcgtaaaggggtttttcaccttttgccacaaataaatagattttccaattaagtaagcaggtttgtgctttgctgcttttgctaaggataatacttagcaactaaatcataagaactcagtggctggcacaaagtaacttttatgctcatcatcacttgttctttcataagttttgcaagtgtccccgcccaatttgtatttgttttctcgctgctgctccattttctttgccagcttttctcggctgcctgttgttgctgctgctgctgctgttgcgcttgcacgtggaaattctgtgcgcatgttgtcgaaaatatccaggacacaatctgcaaactcggagtcctgcacacagaattttgagcgcaggcgctgtgaaaaacccctgcatgatttttctcttttttttttttttttttgctggagctaaagtgttgcaatcatggacaagtgggtgatgtggggtttggacaaacgagggggtggcgatgcgcatactaactgtttatcaggactaaaaatagtagttcggtatgtgggtgggtggcaaggggtcgccacttgggagtccagcatttttcgccaactttattttgctggaatttgcatatgtgccaaactttttacattgagtgcaagcaaaatgtttttgccaactttattgtgcaacgtttaatatttaaaattacttgcgaaaattgttgcaactcgaaagtggcacttcccactgcccaccacccactgccgcctgctcccagctgactcctctaatttacgatcccacacaatggaatgtattttgtggccatccgaatcacccactcacatggcccactcacgctggtcacaacagccagccaggcaggcagtcaggaatctgacggaaacattaaacattcattacttaaaatttcgctggcgtctcgtcgcagccagttgacgatggccaaaactgcctggctgccttttattttttttttttttggtctgtgaactgcatgcaaacgagtgcaattagttggcggtgggattggtgggcaggtaggaaggattgtccagcggaataaaaatagcgttatagaagtataattatattatatggccatcataggtgaactccaaaggtggttttctttaaattgcgcttgccaaaaagtcgcagttacgcttttagcggaataatctttttttatggtttgcttataatgtcgatctgaataaaagtcgactatttttgatgagaccaatggaaaatgcgcgcaaactaaatttagccgatgcctttgccttgcacacactgtgtgcgccaaccaaaaaaaaaagacaaaacttattacaattttaaattgtctgcaaaattttgcgctcaacgttgcgaatcggcaagtgggagtgttgatgagcagggaaaggaggaggagagagggaatgggcggaacggcgtaatggaaaccgaaatccgcgccagacactggccatcatcatcatcatctcatcgtcgtcgtcatcattatcgccattggcagcgcgatgagcatcataattatggtaattgggctgcgcgcgggttcgtcaaaggcgtttcgggccagtctaagaagcgtctaacaaaaatggcaacaaatttgccaatggctgtgtatgtctatatatgtgtgtgtgtgcggaggctttccttggtatttgttttctgattttctatttttttggctggggaaatcctatcgacaaagccaaaagcaacagaaaatcgcgtcaaatgttttaaatagaatcataaacacaaaaacgcaggcaagacaacaagcaacagaaaaagaaaaaaaataaaagtgaagaaaaaaccaataccgaaatcgaaatgaactaaagccaccggtcgatattgtatttgatgttcctttggctattttcaaaatatatttttgctactcaatgcggccatatttgaataattataatatctaaattagcccaaagtgtaatgttttttctttcgtcaaattttcgaattcaatgcacacattattttgaaatgggaattgcctccagattttttcaattcatttgaattcgtgtgctcgagaagtatttatttattttaaatcaattaattcggcgaattactgtttacttttttataaaccaaatacttgaagattcaaactatttatttttgtttccattatatgtttaacgggctatttgtgtagctacattcagttcattccattttatttggccaaactctttgtcagtaaatctagattgccccaaggaggagatcatttgctattgaagttcaaaagggcttgtgaacctctgactttgcttttttttttttttttgtttggcaatcatatacgaaaagtttcctctggagaaaacccatttccagcaaagtaataaaaaacacattcagttcacaagaaacaaaatgatggcccacaatgaaccacgctccatttggttttgagggtagcaaaaacagaaaactgaaaagcattttatacactttcattttatggacaaaagacgcttcttcttctttctgctgggaatggctcgaaaaagtcagtcaataacaattaaggccaaaagttgttgctgctgcctttatggcgctgctgcggccccaaaaaaaaaaccagaactattctctcaacttaaaacgaacgaaggaaactttttcaattaatataacaagaatttcggttggaccacttcatttgcgtttcacttacggggatgataacctaaagaaaatgtatttggccaaattcttttacaaattttcattccacttggctgcttttttttgagctgcatctgcgatgaagcagccggatataaagagataatagatatagaaaagagagtgtttcaaccgaaatgggattaggcggacttatctctcgcactccgcaaggtgggtggtccacacacacacacacacacacgtgtgggtggggaaaagtttgtttggggcttaggcaaatatgaaaatatgctcgattatataggaggaaccacagcacctcccagggattttggcgtcgaaaaaggcagcgcgtttggaaaagctttaagtagtgtacacagcccccgggtggatggatattcgtatatttgtatggcgttgtcgggaatggtggagagcaaacttggccgtaatgaagaaaaatgccggctgcctttatccctgacttgaatttattataacgctccggggaagaatttaaattgattgtatgatgatatgagggtggtggtggaggagatgtgatatggtgctagtggaatccccgaaatccgacccacaaagtatgcaacgaaattaattgttattctttatggttatttcccctcgcacaggcaacggcacaattgacttccctgaattccttaccatgatggcacgcaaaatgaaggacaccgatagcgaagaggagatccgagaagccttcagagtgttcgacaaggatggcaacggcttcatctcggcggccgagttgcgtcacgtgatgacaaatctgggcgagaaactcacagacgaggaggtcgatgagatgatccgggaggctgatatcgatggcgacggtcaggtcaattacgaaggtaagtcatctgctgcaacccaaaggtggcgatgtggaaagtatcttaaagatagcttgggaatactgtgtagatagtttatttttgcccctcattcaaagctgatgaaataataaggtggctatgaaagggcaaaatcaaagggtttcctcgaagactttacccaagaaaataatgagtgggaattttccgataatctgcatcgaacaattcattttcgaaggtgtcgttttccacaattttgcttttttgttgctcgcgtgtttggtggctaattggatctgtctgctgcagctggcgggtaactaaaacgaaaaacgcaatagtaatgattgaatcacaggcatcgcatttgagtcacaattggcacttggttgtgtcatatggctttgctaattaacccagatctctatcactctctctctctctctttctgcgcttctagcccacttgttatagtaatacttattttcagtgctagctagccattgtatctgaacacacatatatgtagatagttaaaacaaatagtatctcgccatgtgcagtgcattttaatacgaaattttcgtgttttgtgttcttcgtaactttttaatagcttgaaaattgatttttcaattgagcaaacgtcgagagcagtgtgagaaacaatcgccggcatatcaagttgaatagccaaaacaataaaatagcaaaatggaacgaacttttgagaatgcgcagatttactatggcatatcctcccactgcctttggcactttccgaaatttccctttgttgtgcacaacacacatagcgaggccggtaaaagtagcaattaaaatcggacagcatttccacctacatctatatctatatctatatatatatatctatttattcgcatcgcttatagcacacgtttatatgttgatcttcaagttcaaatagaaatcgtttttggctgccgccgcggcatttcgcggatcaaatagattaatcacaagtaatttatgaacaaaatacataaaaatagcgaaaaagtttaaacaaagcaagccgaagaacgatgatccgcatttataatcaattgttgtgtgctgtggtacgatttctagacaagcaaacatcgatagagaggacaagccaagtaggattaagtagttcgtactaagaaagtgcttcaaactgtcagagataaaaggtatcttgtagttctgaggaactgctctgctgggtttttttctttgcaggaatccccacaagtacttttcgaaagaaggcgataatggcaattgtcaagtgtggttttgttcccaaaagattgcactgcaagaaagtagcgatgatttatgcagtctgctttcgtaaatctcttaattggttgaaaatcaacagataaaaaagtgctgtgccatatttcacttgccatttatatatattttccttccacaatcagcgttttttttttacgcctttcgccactttcctgccggcgaaattgaaatgtttttaaaagccaaaataaatgtcgcgcgtaaattccacacttaaatgattaaactgccggggcaaaaagcaaaccagaaccaaaaccaaaaccaaaaaccagaggcgcacggcaacagtgcggatgtgaaagaacaattaaaatgaaatatataaatattgtgcaatattcttaatttcggggtgttataataatacagagattggatgagaatgaatctcatttcgtttttcgttcagtcagcggaatcagcataatgtatgtaaatataaaatgcgcattgttgccatatacatacatacatacatatgtacatacatatgcatatatatatattttgcttattgccaattaagcaaagtctttattgttgtcttgccggctatacagtgtgccggttgggtattgcctaccaccaaccacccactaccaccccgccattcactctttggtaattttgcaagtgaaaattatatggcgcaaacaatgaatttgcagggaaaagatattggggaatgggaatgggaattggaatgggttgggaatgagttgagacttactttggccggttgccagatagaaaaacgctgtgcgaaaagggaacgagagagcgagaagaacatgtcgaaaatcaaataaaatgtttaacaaaatacaaagaacaacaaattaaacattagcacacgaagcgaagcaaattaaatgaacacatcccaaaatgtctgagcgagagagagagagtgtgagagagagagagagcgagagcagcggagatgaattccaaaattagcaaaaacgaaaaaaaataactaaaagaaaaagaaaaattgtgaaaatatacctttgcacagatagaacaagttagtttggcgaatgtaaacaaagcgacgaaagataaacagcagaaccgcaaacgacgtaatgagatgggtgagggggggggggtggaggggcaggggcattgcggccaaatgccgagtttctaaaacaaaatccacgaaaatttgaccaaaacaattttgttgaccagctggaaaaaaattggaacttgatataggtattaatattattttaattggcccaaataacaagaccattaaaggtcatctagaaacatcaaacgactaagacactgcaagaaatgcaattaaattcgaaataaatttctattcaggcatcttaatttttcgcagtgcaaataaactggtcaaccggtagtaggcgtggttgaagtgggagcagtgatgtttgaggactaagatttaatcaaaggagtgaactttcgagcatttgcatatgggaaaattgacaaggctgccccaaaggagcttctatacgccctttttttggggcgttgcccgaaatagggctaataacattttacatttaagcctttttacggcctcgaaagggtttagttttattatcaaaggtgtgtgttggccactcaagtgttgctggtgccgctagctggaaaaataactataaatgttgcgtttgatttcccaaaagtctgataacaatcgatggctaaattctatggccagaacgtttcgcctgcagattgtaaagtgagcaagaaaaacgataagattattaaaaagtactgcagtcaaatctcgagttctgttgaactttgtctacaactacaattgtagccaagctgaaacataatttggcttaaatgagatcccccattaattattcgtttattcccaaaatcctatgtttggtttgtacacattttattggcattcccccataggtgcttgcaaattcttgaccattgcttcctaggaaatccaaccaattacatgccacgcccacccaattcgcctgtcgtccgtcctatctgtgacttttggtaccaccgccctcttgttgtcgtgcttaaatatttataaaaagccaatcaccctagccaactgaaaacagcagggagatggatgatgatgcgatgcaatcagcaagaacagatgcaccagcgtccgagaattcaattctccccctttaaaaatagatgcaggcagcaaacacctgataaattggggacaccaacacatatattataccatctcatatctatggtataatactacttgattctttttcatagatgagttagtttagaaccttttaattttttttttttttttccaattggattgtatgatccatcaatctttatataaacttatattagataggcatcccttcccttgatgcacggtatgtgctagtctggactttcgggcatagctttcccgttatctcacccattcatttgcgaacaatgcaacgtacgtctccattgcacttggcctgcgtcgccgtcaacgtcgcaagcatcctctgctttctatttttggacgaggaaccgaggagagtacataatctctggcgcgattgactgtctgagtctttgcactcaataaattttccttggctatatggctctatttttcagtatggtgttgtgtgtgcgtgtgtgtgagtgtgcggcaagtgttttcatcagacgtctcgtgacttgctcgtttatcttattgattagctggcccgcagtgtaatgctcgtttgctattgattaattggcgtcttaatttagtagaaggttaatgacagcgctcagctattttcgatacttgatttgtcgtgtgaatctctttgcattttgtgtcaattgagtggtttaataagtggttggaaatgatgtttttagatcgagaacgatgctcgtgattaaaaattaaatatttatgggtgcttgtctatagttaagttaaatgcaaataaacctaatactaattctgaatttttttctctttctttgcagaattcgtgactatgatgacatcgaagtgaagcgttaaattatttctttttaagcctttctatttttttaagatgttgacgaagactgtagctgtgcgcaataacatcgcgccacgctgttgctatggaccccagtaaaagatcttaaaaaaaaaacaacaaaaaaaaacaacaacaaacaacaaagagttaagcaaaaaacaaccaacataaaggagaataagaagcaaaaaaccatttaagaaactttaaaacaaataaaaaacttacacatctaaaaaaatgcaaaagcaaatgaaaatttaaacaagcgaaaatgaaacaaccgaattgaattcaaaggtaaagaatttcattaaactgagcgagatgttgaacgagagggaaaacaacataattttaatgcaacaacaaacaacaaccaagcagcatacttaatgaagtcaccgtttaaaaccacaaaccaactacaactacaacaagaacaaccagcagcaacaaacaagagtcgcatgttatcgtttcgagcaacaagaacaacaagtctatcactacacttaaacaaaatgaggagcgagaagaagacgagcaagcagagggagaagcaagaagcagcagcagcatccaccagtattgccgaaagatggcgcccatggcgcactaaggtcagcgcgccacctggcgacggcggctcgcaccggctgcattttgtttgacagttttccactaagaagtaaaaaaaaagaaaataatgaaaaccccccactctgtaagctagcaaattgtgtttaaagtataatgaaaaaattgtcgatttcgttgcgagaaagaataaaaataaaagctaaacaaacaacaaataaaaataaaaatacaaataaaacaaaaactgttaaagaaaactatttgaaatttttgcaaactggcaaagtttatatagacacgctacacgaacacactctcatacacacatacaccacacacacacatttacacccccacacacagacatgtcagaaaaccagaaataaaatatattataaatacaacatatatatattataaataatgtaaaatcaaacaacaacaaattcttcttattaaattatatttaaatttaaaattaataaatataaaaaataaaac

SEQ ID NO: 27458 - DNA, 739 bp, DROSOPHILA
accaacgagcaaaaaattaaacaacagtgtgttaatttagtaaaatataaagttaaccgcgcgttccgtaattccactcacacacataccaacacccaagcagcagcagtagccgcagcggattaaaacttcgtcactctagcaacaaacagaaaaaaaaaacacctacaaaaatggccgatcagctgacagaggaacagatcgccgagttcaaagaggcattctcgctattcgacaaagacggcgatggcaccatcacaacaaaggagttgggcacagttatgcgctccctgggccagaatcccacagaggccgagctgcaggacatgatcaacgaggttgatgccgacggcaacggcacaattgacttccctgaattccttaccatgatggcacgcaaaatgaaggacaccgatagcgaagaggagatccgagaagccttcagagtgttcgacaaggatggcaacggcttcatctcggcggccgagttgcgtcacgtgatgacaaatctgggcgagaaactcacagacgaggaggtcgatgagatgatccgggaggctgatatcgatggcgacggtcaggtcaattacgaagaattcgtgactatgatgacatcgaagtgaagcgttaaattatttctttttaagcctttctatttttttaagatgttgacgaagactgtagctgtgcgcaataacatcgcgccacgctgttgctatggaccccagtaaaagatctt

SEQ ID NO: 27459 - protein, 149 aa, DROSOPHILA; identical to SEQ ID NO: 18420

SEQ ID NO: 27460 - DNA, 315 bp, DROSOPHILA
aacaatggacttttatgcccgttaggaccacatacttgatttcctccggaaaatcaccaacattcactatagcccgattggtcagcgaaagctcgtccgtgggacatttggtggccttcaaaatgtcttcttctgcagaaagtccgtctcaaaggacacacaagtgatgacatccgagctggcatcaaagcgatagggacgaacctccagttcctgattaatggacaccatggcccactttcgttggaccagggagaagccaacatagccgctgggcacctccaccgttttctccagcgcaaagatgaagtgctg

SEQ ID NO: 27461 - DNA, 3047 bp, DROSOPHILA
aaaggatatagttcacaattcgttcaaaaattaatatatatatatatagttatgctgtttcagtgatactgtaaacaaatatcaaacgttaattcgcacacaaagctgcgttttctgaccattaaagtacttccattggattataattattgatttttgtcaaattctaaacaaccccgtgaaaatcagcaagaatctaaagaaatggcttatattttgaaggccaccaaatgtcccacggacgagctttcgctgaccaatcgggctatagtgaatgttggtgattttccggaggaaatcaagtatcagcacttcatctttgcgctggagaaaacggtggaggtgcccagcggctatgttggcttctccctggtccaacgaaagtgggccatggtgtccattaatcaggaactggaggttcgtccctatcgctttgatgccagctcggatgtcatcacttgtgtgtcctttgagacggactttctgcagaagaagactgtctcccaggaaccctatgactccgatcaaatggccaaggagttcatcatgcaattcgccggaatggcactcaccgttggccaatcactggtcttcaatttcaaggacaagaaacttctcggcctggccgtcaaatccctagaggccatcgatcccaagagcttgggcgagggcaaggacaccgcgatgcgtaatgtccgcttcggccgcatccttggcaacaccgtggtgcagttcgagaaggccgagaacagttcgctgaatctgcagggcaagagcaagggcaaggtggtccgccagtccattataaacccggattgggactttggcaaaatgggcatcggtggcctggacaaggaattcaattcgatatttcgacgagccttcgcatcccgtgtcttcccaccggaactggtcgagcagctgggctgcaagcatgtcaagggcattctactttatggtccaccgggtacgggcaaaactctgatggctcgccaaatcggaactatgttaaacgcccgggagccgaaaatcgtcaacggtccacagatcctggacaagtacgtgggcgaatcggaggccaatgtccggcgtctgtttgccgaggcggaggaggaggagaaacgcctgggtcccaacagtggactacatatcatcatcttcgacgagatcgatgccatttgcaagcagcgtggctccgtggccggaaatagtggtgtccacgacaccgtcgtcaatcagttgctaaccaaaatcgatggcgttgatcagctgaacaacattctcgttatcggcatgaccaatcgcagggacatgatcgatgaggctttgctgcgaccgggtcgcctcgaggtccaaatggagatcagcctgcccaacgagcagggtcgcgtccagattctcaatatccacaccaagcggatgcgtgaattcaacaagattaacgacgatgtggacaacaaggagatcgctgcgctgaccaagaatttcagcggtgccgagctggagggtttggtccgtgccgcccagtcgagtgccatgaaccgactgatcaaggccgatgccaaggtgaccgttgatcctgaggccatggaaaagttaaaggtcaatcgagatgatttcctgcactcgctggagcatgacattaagccggcattcggtacggcccaggagattctcgacaatatgctggcccgcggtgttatcaactggggagcaccggttagcaatctcctcgaggacggcatgctgtatgtgcagcaggccaaggctccagaatctagcggcttggtctccgtactcgtggccggagcacccaactctggcaagacggcactggccgctcagcttgccaagatgtcagactttccgttcgtgaaggtctgctcgccagaggacatggtcggctacactgaatcggccaagtgcctgcacattcgtaagatcttcgacgacgcgtatcgttccatgcttagctgcattgtggtggacaatgtggagcgtctgctggactacggatcgattgggccgcgatattccaatatgacgctacaggcactgctggtgctgctcaagaaacagccgccaaagggccgcaaattgctcatattgtgcacatctagcaggagggaggtcctggaagagatggagatgctgacggccttcacctcggtgctccacgtgcccaatctttccaagcccgaccacgttctggccgtgctggagaacacggatatctttagcaagggcgaaatccaggcgattggcaagaagatggccggaaaacgcgtgtttattggcatcaagaagctgctgggtctcattgacatggctaggcaaacggagcaatcacagcgggccataaagttcctgtccaagatggaagaggagggtggtctcgacatggtggcgcggcagtaaggcatcttaaactgcatgtgcccaaatggagtctcaattattagcttctaagtgctaaggacgggcgatgaatagcgatgaaaccaaatcagaatctcaatgtacacgtacatatacaccgctaaacatatacacagatatatagagttatatatatatatacgatccaggcttcgcgatgtttgttcggtcccaaagcccagataaaaatcacaatccacatcccggaggagtttcgtgtgcttctgagttcccccacagagctcaatcaaatcagacagatatgtgagacccgtgacctgaagatgatggcatataaatgacataatatatggcttaaatggacagatactcaattacatttataaataattaacacgcgtagccactaactcgttaaaggcatgataatctttctcgttaccttttaattttaggacttttgcttcagtaaattctcaataggaaacgaaaaaacgggagaaaacaccaaagtatttgcctttgggcattgtgaacgttgtttatcggtaactaaactaattaaatatttattaaatcaaatattgttaaccgccaatgttataattatatcttgaataaagtaaaacaaacttaaattccaattt

SEQ ID NO: 27462 - protein, 737 aa, DROSOPHILA
MAYILKATKCPTDELSLTNRAIVNVGDFPEEIKYQHFIFALEKTVEVPSGYVGFSLVQRKWAMVSINQELEVRPYRFDASSDVITCVSFETDFLQKKTVSQEPYDSDQMAKEFIMQFAGMALTVGQSLVFNFKDKKLLGLAVKSLEAIDPKSLGEGKDTAMRNVRFGRILGNTVVQFEKAENSSLNLQGKSKGKVVRQSIINPDWDFGKMGIGGLDKEFNSIFRRAFASRVFPPELVEQLGCKHVKGILLYGPPGTGKTLMARQIGTMLNAREPKIVNGPQILDKYVGESEANVRRLFAEAEEEEKRLGPNSGLHIIIFDEIDAICKQRGSVAGNSGVHDTVVNQLLTKIDGVDQLNNILVIGMTNRRDMIDEALLRPGRLEVQMEISLPNEQGRVQILNIHTKRMREFNKINDDVDNKEIAALTKNFSGAELEGLVRAAQSSAMNRLIKADAKVTVDPEAMEKLKVNRDDFLHSLEHDIKPAFGTAQEILDNMLARGVINWGAPVSNLLEDGMLYVQQAKAPESSGLVSVLVAGAPNSGKTALAAQLAKMSDFPFVKVCSPEDMVGYTESAKCLHIRKIFDDAYRSMLSCIVVDNVERLLDYGSIGPRYSNMTLQALLVLLKKQPPKGRKLLILCTSSRREVLEEMEMLTAFTSVLHVPNLSKPDHVLAVLENTDIFSKGEIQAIGKKMAGKRVFIGIKKLLGLIDMARQTEQSQRAIKFLSKMEEEGGLDMVARQ

SEQ ID NO: 27463 - DNA, 6190 bp, DROSOPHILA
aactctctgtaagttactatatatggattggttaatattctttagaaatgtagctatgcttttgaatcattgaagccaaaagtgcaataattacatttaaagcttaatgtgatcatgacactttgatttttaaactggctcttcatttcaatgaatgactgctgaaatccaattgatattggcgatgatgtcaaatctcacgcttttttttattaatttaggagcccccgtttttccaataactacttatcttcaagtgacaaactgtgcagacttatctctaacaatcgtattgggtcactttttaaacagtagacgaaatacatataaaatctctcttatctgcgaaaggaaggtgaggcaattgggtgtataaatttaatcataagtctcgaccaagttccactcgagatactttcaataaacaataataatgcgcactaaacgcgagcgtcgtaaacgaaataatttaataatccggccgacaattcaataattttgttaagtcatatgttttattattggaatcaagaaaatgatacatacaaagtggtataaataaaagaactgctttcgcttgcttgcttgcggtgtggaatctattgattaataagtttattaatattggatatagcgtgtatgtggatcctttttgctgatctatgtaattagcttctatgcatatgcgtttccctttctatccttcaaaacttctacctcgccgttctcgtcgctttcggcgtacaaaaagtgaataaaaatatattgaatatttttaagtgcgaacaaattgggattacaatacttcatatataagcttaaacataaaatatatagaaaaaacatgaagaaaatatatatgttgattagacatgaaaacataaataaaaaatattgattcacgaataaacttaggattaatacattcctttgttttgttttgttttttttttgacattttttagttttctacttttttttacgttttcgttcgatttttgttgttgttggatatagtttaatatagtaatttgcgatcaggctcttaacgtggctggccataattgaaagtctaccaaaaatgaagccgctccgaagacaattttcaaaacgattttcgactacataaacaacgcgaagattcaaaaaggattgatttgctgattttcactgaacacatattgagctcaatatgtcattgtatctacggctggctaataaaagttatttgcggaaactacgaaacagaatattggattgctactgatattacttcttctttgtttcgtttctgtggcgaaaatcgtccccttgccgacgaactactcctcgatgctgtagaggaagtagtagttctcgttgtcgttaatggcagccggcggtgcctgcggtgccttcctggacagcggctcgaagcccatgaagaggaacgcctcgatgaggcgagctcgatccggctgatctttaggcattaccataacgatgccgtccacctccagcttctcctcggcgaactccagaagcgagatgaaggtctgcttggagccggccggaggaaggtccttcggtagagcgacatacaacaagttgttgactgggttcagaatcgtattccaattggtgtactggtcctcggtgacatgcagcttgatggtgatctgcaccggctggtcgtgctgcaagatctggcgcagcacttcctggcagtcatcgtccgagcacagcgagtggatgtcgggctgcgactccaagtcggagcaatccgactgggaggacgacaacgacgacgcccgggagctggcctcgtacaggctgccaccagccgagtcgaccgaagacttacggctgtagcctacacggaaggaattaacacattttagcataataagtacttaaatggttagttattattactcacccgtcaagagcgatgccctatcgtgatctgttctgtggtggacagggacatcaggaccaccacagaggccctacgccgagagagatgcggtaggactccgaggacatggtcgtggcgcaagacgaagtcgagatggtgcggagcttgccgtcggcaattccgctgtcattaaattctcttctaacgaagccactactaaacactgggtcgctgtggaaaaaaaattgggtatttagtcaaaaaaaccccatatcgaactgcgatgtgcctgttcgattttgtagcgcaactccatctgttggaaagtttatatcccctttttaatggcaagcatatagcgaatattcccatgtttttataaagattatttcccatttacaaattacttatgtgaattatgaattgaatttataaacccgaaatctttaccacaacatggtgtagagtaaaactcaattggtaactgaacgtcgcaaaagctgctaacaaactgatggccacgaaggcagaacgaaaggcttatcagcgaagcggcgacaatttaattatttcgcttttatgacgctaacaaattgcagttgtttattttaaagcgataagatacgcccgcgcgccttatcggcaaaccgataagctgtttccgatagtcacgcagcgcatgcagccctgcgctcacgcaccaccaatttcaccacaagatggccgccggcagctgtcaaagcgggagcgagcacgcaaacacatacactcgcaaacactcggcataaacgcttgcacaaagaaaaacggagaaaaaatttagcggtttcggtggaaaaaaaaacagtgaaaaatatatagttgaacgaacaagaacagacagcaacacaccaagctagcgaacatgtctatcggagtgcccattaaagttctgcacgaggccgagggccacataatcacttgcgaaaccatcaccggcgaggtgtaccgcggcaaactcatcgaggcggaggacaacatgaactgccaaatgacccagatcacggtgacctaccgagacggacgcaccgccaacctggagaacgtctacattcgcggctccaagatccgattccttatactgcccgacatgctgaaaaatgccccgatgttcaagaagcagacgggcaagggacttggtgggacggcgggacggggcaaggcggccattctgcgcgcacagggtgagttgggcactttggcccacacacacacatacacattcactttttgcacggactgcctttaaaaacaaaatattttctatgctctcgtttaacttctaaatttaactaaaatatttgctatcccaatttaataatccaaataccatacaatttttatgatagtaaaaaaaatggtagtaaaatttatagaatttaatatgtataaatagtgctacaaaaaatatattaatgcagggtttagtttgttttaaaaactgagctgatagttttcgtcaaatcatatccctcccatttaattcattaatttcaaaatttaaagtattaacgtatgggtaaaataagaaacatgctaaggtagtaagtttgtgtatatgtttatttttagaaagcaaaaactaaaaaaaaaaatgttataaagccatgtgcagtgaaatctagaaatgaattttgtttttaaagacagtcgtgcagtgtatgtgaggccctcagcgaaatgcaattattaaaaacgacatttcccttacagctcgtggcagaggaagaggcggacctccgggcggcggaaggggcactggtggaccgccaggagctcccggcggcagcggcggacgcggagcatggcagggaggaccaaccggcggtcgaggacgcggcggcctgtaggaactgcctactgaacaacgcatttctattctctaagttgcgggcatcatattattagcgggcgggtcgaacttctccagatgttttttgtaaagtatttatcgggcagagcagccgagaatacacttgaaacttgaatttgaaagaggcagacgttgtttgttgtctaagtaaagtaagcacctgaaaggtgggaagggattagacaccataaccagggggacgctcacaagtttggcttaaaattaagcactccaattcgattcattcgatcttataatcgtcgcctttcgaatgttatacaaagagagcaattccatgacagtattacaatcggtcttaacttgactgtcgacggatagctctcttcatttcacaattcgcggaggatctgaaagcggaaatctaagctaacacctcaacggacaggacacagtgttaggccagacgaactgaatgtggaacttgggtttagtcgtttggttagtctcattgcctcacagcgcatcgtcgaatattatacaaagagagcaattccatgacagtgatattaaatagtttctggactgtcgacggacagctctctttattcacttattcgcatttggattcgatttggttcgttctaggtgttaatcagacattcaatgtggacagcacagatacatacagatacctatatactatataaatgctttccacacattgtacatacatatgtacatttgtgtattgtttgccggcagactacgtgcgaaatatgccaggcattttgttgttatgttggtttcctttctgccaagccaattaaatcaacaaactgcgcacttggcagagcattgtgaattgagcgaaatagaggcctgaatgggaacagtgaccaccagcagcagcagatggattggatgcatgtggttcaatgcctaatgaatgcaatttatggctgtgtctgggggtgggggggtttgttagagtaataattccccgaatcgatggcacgtgtgcaaggcaattgaaaatgctttcgcaattaataaaaaagatggggctatgctgacgtaccacaagattttctggttctcgttctgaatcttctggttatctggctgcgccaccatatcgctagacgtcgtcattgccaagttaaatatttggtctccggttgagatttatcacagctgcagtctactatctgtctcctggtatgtgctctttatcttttatcacagattgcgttgcttcggtcggtcggtccttcggcggagcttggaactcacatcgaaaagatgtggcgattggatatctgtgtgttatgtggcggcccggtttccgtgcctctcctccactggcgatgtggagactgctcgctgatgatctgtgtggtgctgtgctctgggcgtttgtctggcgactgacgacatccaaacggtggcggcatcatttatctatctgattaagtagcagcgactaggaggcctcacgatatatctacatacacgtacatacatacatacaaatgtataatagcctagttctatccgacagatatgcaaatgtgccggagagcacgggtacagtcgacccggtcggtcaggggatgtggatctgaatcggggtgcggtgtgagtcagagccccaaggttaaatggagccccctacttcccacaaaatacgggtgaatcgctaaacaaataaggcgcaaataactataagcaaaaatgccggcacacgtagcatttgcattcacaaagtcgcaatgggcaaacaaaataaacggagagagctgccggctataaatatccataaaaattaatatacaaagtctaagagaaattctttttttttctgtggcgctatttcagtcaaaaacatcaccacattttttaggctgcacgtgtctgccgcttttttttcgaacaaatgtaccaaaacaaacgaaataaatggctaaaaatggctaataatattggcgataagtcccataaataaaagtctgcttaatataagcagaggtatggacctaaagcggggtagaaatcaacgtgaagagttatctttattcttaatacatatgtatatgtatacaggtacatacatacatacgtagtatgtaaacgaacagcagaggtcatctcaataactacaaacgaatactaataaaaataccatttatcgacaataaactggactttataattgctgacgtaggcttcttcgctttttgcagctttgattgacaatctttccatatgtttcagtctaaacaaataacaaatatctgtagctcaattaacaaagtcaaaaaaaattgtgtaaacaagctctttgatattttggtattttccaggtagtttccatagaaaatgtatacaaatttagaaccaaaaggatttcatgttaatga

SEQ ID NO: 27464 - DNA, 1404 bp, DROSOPHILA
acaaacgcccagagcacagcaccacacagatcatcagcgagcagtctccacatcgccagtggaggagaggcacggaaaccgggccgccacataacacacagatatccaatcgccacatcttttcgatgtgagttccaagctccgccgaaggaccgaccgaccgaagcaacgcaatctgtgataaaagataaagagcacataccaggagacagatagtagactgcagctgtgataaatctcaaccggagaccaaatatttaacttggcaatgacgacgtctagcgatatggtggcgcagccagataaccagaagattcagaacgagaaccagaaaatcttgtgcgacccagtgtttagtagtggcttcgttagaagagaatttaatgacagcggaattgccgacggcaagctccgcaccatctcgacttcgtcttgcgccacgaccatgtcctcggagtcctaccgcatctctctcggcgtagggcctctgtggtggtcctgatgtccctgtccaccacagaacagatcacgatagggcatcgctcttgacgggctacagccgtaagtcttcggtcgactcggctggtggcagcctgtacgaggccagctcccgggcgtcgtcgttgtcgtcctcccagtcggattgctccgacttggagtcgcagcccgacatccactcgctgtgctcggacgatgactgccaggaagtgctgcgccagatcttgcagcacgaccagccggtgcagatcaccatcaagctgcatgtcaccgaggaccagtacaccaattggaatacgattctgaacccagtcaacaacttgttgtatgtcgctctaccgaaggaccttcctccggccggctccaagcagaccttcatctcgcttctggagttcgccgaggagaagctggaggtggacggcatcgttatggtaatgcctaaagatcagccggatcgagctcgcctcatcgaggcgttcctcttcatgggcttcgagccgctgtccaggaaggcaccgcaggcaccgccggctgccattaacgacaacgagaactactacttcctctacagcatcgaggagtagttcgtcggcaaggggacgattttcgccacagaaacgaaacaaagaagaagtaatatcagtagcaatccaatattctgtttcgtagtttccgcaaataacttttattagccagccgtagatacaatgacatattgagctcaatatgtgttcagtgaaaatcagcaaatcaatcctttttgaatcttcgcgttgtttatgtagtcgaaaatcgttttgaaaattgtcttcggagcggcttcatttttggtagactttcaattatggccagccacgttaagagcctgatcgcaaattactatattaaactatatccaacaacaac

SEQ ID NO: 27465 - protein, 199 aa, DROSOPHILA; identical to SEQ ID NO: 24825

SEQ ID NO: 27466 - DNA, 7393 bp, DROSOPHILA
aactctctgtaagttactatatatggattggttaatattctttagaaatgtagctatgcttttgaatcattgaagccaaaagtgcaataattacatttaaagcttaatgtgatcatgacactttgatttttaaactggctcttcatttcaatgaatgactgctgaaatccaattgatattggcgatgatgtcaaatctcacgcttttttttattaatttaggagcccccgtttttccaataactacttatcttcaagtgacaaactgtgcagacttatctctaacaatcgtattgggtcactttttaaacagtagacgaaatacatataaaatctctcttatctgcgaaaggaaggtgaggcaattgggtgtataaatttaatcataagtctcgaccaagttccactcgagatactttcaataaacaataataatgcgcactaaacgcgagcgtcgtaaacgaaataatttaataatccggccgacaattcaataattttgttaagtcatatgttttattattggaatcaagaaaatgatacatacaaagtggtataaataaaagaactgctttcgcttgcttgcttgcggtgtggaatctattgattaataagtttattaatattggatatagcgtgtatgtggatcctttttgctgatctatgtaattagcttctatgcatatgcgtttccctttctatccttcaaaacttctacctcgccgttctcgtcgctttcggcgtacaaaaagtgaataaaaatatattgaatatttttaagtgcgaacaaattgggattacaatacttcatatataagcttaaacataaaatatatagaaaaaacatgaagaaaatatatatgttgattagacatgaaaacataaataaaaaatattgattcacgaataaacttaggattaatacattcctttgttttgttttgttttttttttgacattttttagttttctacttttttttacgttttcgttcgatttttgttgttgttggatatagtttaatatagtaatttgcgatcaggctcttaacgtggctggccataattgaaagtctaccaaaaatgaagccgctccgaagacaattttcaaaacgattttcgactacataaacaacgcgaagattcaaaaaggattgatttgctgattttcactgaacacatattgagctcaatatgtcattgtatctacggctggctaataaaagttatttgcggaaactacgaaacagaatattggattgctactgatattacttcttctttgtttcgtttctgtggcgaaaatcgtccccttgccgacgaactactcctcgatgctgtagaggaagtagtagttctcgttgtcgttaatggcagccggcggtgcctgcggtgccttcctggacagcggctcgaagcccatgaagaggaacgcctcgatgaggcgagctcgatccggctgatctttaggcattaccataacgatgccgtccacctccagcttctcctcggcgaactccagaagcgagatgaaggtctgcttggagccggccggaggaaggtccttcggtagagcgacatacaacaagttgttgactgggttcagaatcgtattccaattggtgtactggtcctcggtgacatgcagcttgatggtgatctgcaccggctggtcgtgctgcaagatctggcgcagcacttcctggcagtcatcgtccgagcacagcgagtggatgtcgggctgcgactccaagtcggagcaatccgactgggaggacgacaacgacgacgcccgggagctggcctcgtacaggctgccaccagccgagtcgaccgaagacttacggctgtagcctacacggaaggaattaacacattttagcataataagtacttaaatggttagttattattactcacccgtcaagagcgatgccctatcgtgatctgttctgtggtggacagggacatcaggaccaccacagaggccctacgccgagagagatgcggtaggactccgaggacatggtcgtggcgcaagacgaagtcgagatggtgcggagcttgccgtcggcaattccgctgtcattaaattctcttctaacgaagccactactaaacactgggtcgctgtggaaaaaaaattgggtatttagtcaaaaaaaccccatatcgaactgcgatgtgcctgttcgattttgtagcgcaactccatctgttggaaagtttatatcccctttttaatggcaagcatatagcgaatattcccatgtttttataaagattatttcccatttacaaattacttatgtgaattatgaattgaatttataaacccgaaatctttaccacaacatggtgtagagtaaaactcaattggtaactgaacgtcgcaaaagctgctaacaaactgatggccacgaaggcagaacgaaaggcttatcagcgaagcggcgacaatttaattatttcgcttttatgacgctaacaaattgcagttgtttattttaaagcgataagatacgcccgcgcgccttatcggcaaaccgataagctgtttccgatagtcacgcagcgcatgcagccctgcgctcacgcaccaccaatttcaccacaagatggccgccggcagctgtcaaagcgggagcgagcacgcaaacacatacactcgcaaacactcggcataaacgcttgcacaaagaaaaacggagaaaaaatttagcggtttcggtggaaaaaaaaacagtgaaaaatatatagttgaacgaacaagaacagacagcaacacaccaagctagcgaacatgtctatcggagtgcccattaaagttctgcacgaggccgagggccacataatcacttgcgaaaccatcaccggcgaggtgtaccgcggcaaactcatcgaggcggaggacaacatgaactgccaaatgacccagatcacggtgacctaccgagacggacgcaccgccaacctggagaacgtctacattcgcggctccaagatccgattccttatactgcccgacatgctgaaaaatgccccgatgttcaagaagcagacgggcaagggacttggtgggacggcgggacggggcaaggcggccattctgcgcgcacagggtgagttgggcactttggcccacacacacacatacacattcactttttgcacggactgcctttaaaaacaaaatattttctatgctctcgtttaacttctaaatttaactaaaatatttgctatcccaatttaataatccaaataccatacaatttttatgatagtaaaaaaaatggtagtaaaatttatagaatttaatatgtataaatagtgctacaaaaaatatattaatgcagggtttagtttgttttaaaaactgagctgatagttttcgtcaaatcatatccctcccatttaattcattaatttcaaaatttaaagtattaacgtatgggtaaaataagaaacatgctaaggtagtaagtttgtgtatatgtttatttttagaaagcaaaaactaaaaaaaaaaatgttataaagccatgtgcagtgaaatctagaaatgaattttgtttttaaagacagtcgtgcagtgtatgtgaggccctcagcgaaatgcaattattaaaaacgacatttcccttacagctcgtggcagaggaagaggcggacctccgggcggcggaaggggcactggtggaccgccaggagctcccggcggcagcggcggacgcggagcatggcagggaggaccaaccggcggtcgaggacgcggcggcctgtaggaactgcctactgaacaacgcatttctattctctaagttgcgggcatcatattattagcgggcgggtcgaacttctccagatgttttttgtaaagtatttatcgggcagagcagccgagaatacacttgaaacttgaatttgaaagaggcagacgttgtttgttgtctaagtaaagtaagcacctgaaaggtgggaagggattagacaccataaccagggggacgctcacaagtttggcttaaaattaagcactccaattcgattcattcgatcttataatcgtcgcctttcgaatgttatacaaagagagcaattccatgacagtattacaatcggtcttaacttgactgtcgacggatagctctcttcatttcacaattcgcggaggatctgaaagcggaaatctaagctaacacctcaacggacaggacacagtgttaggccagacgaactgaatgtggaacttgggtttagtcgtttggttagtctcattgcctcacagcgcatcgtcgaatattatacaaagagagcaattccatgacagtgatattaaatagtttctggactgtcgacggacagctctctttattcacttattcgcatttggattcgatttggttcgttctaggtgttaatcagacattcaatgtggacagcacagatacatacagatacctatatactatataaatgctttccacacattgtacatacatatgtacatttgtgtattgtttgccggcagactacgtgcgaaatatgccaggcattttgttgttatgttggtttcctttctgccaagccaattaaatcaacaaactgcgcacttggcagagcattgtgaattgagcgaaatagaggcctgaatgggaacagtgaccaccagcagcagcagatggattggatgcatgtggttcaatgcctaatgaatgcaatttatggctgtgtctgggggtgggggggtttgttagagtaataattccccgaatcgatggcacgtgtgcaaggcaattgaaaatgctttcgcaattaataaaaaagatggggctatgctgacgtaccacaagattttctggttctcgttctgaatcttctggttatctggctgcgccaccatatcgctagacgtcgtcattgccaagttaaatatttggtctccggttgagatttatcacagctgcagtctactatctgtctcctggtatgtgctctttatcttttatcacagattgcgttgcttcggtcggtcggtccttcggcggagcttggaactcacatcgaaaagatgtggcgattggatatctgtgtgttatgtggcggcccggtttccgtgcctctcctccactggcgatgtggagactgctcgctgatgatctgtgtggtgctgtgctctgggcgtttgtctggcgactgacgacatccaaacggtggcggcatcatttatctatctgattaagtagcagcgactaggaggcctcacgatatatctacatacacgtacatacatacatacaaatgtataatagcctagttctatccgacagatatgcaaatgtgccggagagcacgggtacagtcgacccggtcggtcaggggatgtggatctgaatcggggtgcggtgtgagtcagagccccaaggttaaatggagccccctacttcccacaaaatacgggtgaatcgctaaacaaataaggcgcaaataactataagcaaaaatgccggcacacgtagcatttgcattcacaaagtcgcaatgggcaaacaaaataaacggagagagctgccggctataaatatccataaaaattaatatacaaagtctaagagaaattctttttttttctgtggcgctatttcagtcaaaaacatcaccacattttttaggctgcacgtgtctgccgcttttttttcgaacaaatgtaccaaaacaaacgaaataaatggctaaaaatggctaataatattggcgataagtcccataaataaaagtctgcttaatataagcagaggtatggacctaaagcggggtagaaatcaacgtgaagagttatctttattcttaatacatatgtatatgtatacaggtacatacatacatacgtagtatgtaaacgaacagcagaggtcatctcaataactacaaacgaatactaataaaaataccatttatcgacaataaactggactttataattgctgacgtaggcttcttcgctttttgcagctttgattgacaatctttccatatgtttcagtctaaacaaataacaaatatctgtagctcaattaacaaagtcaaaaaaaattgtgtaaacaagctctttgatattttggtattttccaggtagtttccatagaaaatgtatacaaatttagaaccaaaaggatttcatgttaatgaagttaaacagaatcttaattcacacaggttttatttttgtgcccttagctgtgtgagcacatttttgccaaaaaaaaaaacgtgttgccatattttggtgtagtaacttacggtaatcactttgtactttggctggtctttcatcgttgatcatgtgtcttcggcgtgacgaaagcgataagcaaagaactaccctaattaatttgtaaacgatatctttaagaggaaaaccatgtgtaaaacttttcaacttcctcctgaaactgcaatgcagttcagttaaagtagaaaaaagcaaagcagatctggatcattatccagattagatccagataaaaaaaaagtgggcgataagataacgtaattggtgcgcttgtgtaatcaacatcaaaacttgtcgttctgcttggacaaatattgggggatcaggtacaatctttcgacagtggaaaaacaatcgtaaaagacgaagtgtactaagcaaacacaagcaggatttttagacaaaagcaagatgtcataaagcaaacaagagcactggaaattattatacatatgctataaccagaacaatggtgagataagggataagatcttgtgaggttccgcgagataagataaaggggtagaaatagttgaaggaggcaccaaagaagctgctagaaaagtgccgatgacccaatatcgctcttctacatacatatgcacatatgtatgtatatgcagtgcatatatccatccctctttctcctatatcacttgccgcacaaaaacaacgcgaaactgcaatggcgagtggaattttcccttgtttacagctattatgcctgtgtgcgtgcgtttgtatttgtcgttgtatgacataataaaagccgcccaagatgcccccccaaaaaatgaggaagaacttaaacgaaacgctggtaaatcgctaaagactcaaaagtaatggaagaaataccagttgttaacgagtatcttcccaattggatcgcataaagcaaaattaccaaatgccatttccgatggaagagaaacaagtaaacaaagaatagagaaaactcatacgcacacagatgttatgggttctccaattggaaggaggttcaaactgtaaataaatgagggaccacagcgttgccagatccccaaacatgatgtgtcggttgcgataattaattaataaaaatttcctgcaaacag

SEQ ID NO: 27467 - DNA, 1154 bp, DROSOPHILA
attaattagggtagttctttgcttatcgctttcgtcacgccgaagacacatgatcaacgatgaaagaccagccaaagtacaaagtgattacccgacccagtgtttagtagtggcttcgttagaagagaatttaatgacagcggaattgccgacggcaagctccgcaccatctcgacttcgtcttgcgccacgaccatgtcctcggagtcctaccgcatctctctcggcgtagggcctctgtggtggtcctgatgtccctgtccaccacagaacagatcacgatagggcatcgctcttgacgggctacagccgtaagtcttcggtcgactcggctggtggcagcctgtacgaggccagctcccgggcgtcgtcgttgtcgtcctcccagtcggattgctccgacttggagtcgcagcccgacatccactcgctgtgctcggacgatgactgccaggaagtgctgcgccagatcttgcagcacgaccagccggtgcagatcaccatcaagctgcatgtcaccgaggaccagtacaccaattggaatacgattctgaacccagtcaacaacttgttgtatgtcgctctaccgaaggaccttcctccggccggctccaagcagaccttcatctcgcttctggagttcgccgaggagaagctggaggtggacggcatcgttatggtaatgcctaaagatcagccggatcgagctcgcctcatcgaggcgttcctcttcatgggcttcgagccgctgtccaggaaggcaccgcaggcaccgccggctgccattaacgacaacgagaactactacttcctctacagcatcgaggagtagttcgtcggcaaggggacgattttcgccacagaaacgaaacaaagaagaagtaatatcagtagcaatccaatattctgtttcgtagtttccgcaaataacttttattagccagccgtagatacaatgacatattgagctcaatatgtgttcagtgaaaatcagcaaatcaatcctttttgaatcttcgcgttgtttatgtagtcgaaaatcgttttgaaaattgtcttcggagcggcttcatttttggtagactttcaattatggccagccacgttaagagcctgatcgcaaattactatattaaactatatccaacaacaac

SEQ ID NO: 27468 - protein, 199 aa, DROSOPHILA; identical to SEQ ID NO: 24825

SEQ ID NO: 27469 - DNA, 9160 bp, DROSOPHILA
aactctctgtaagttactatatatggattggttaatattctttagaaatgtagctatgcttttgaatcattgaagccaaaagtgcaataattacatttaaagcttaatgtgatcatgacactttgatttttaaactggctcttcatttcaatgaatgactgctgaaatccaattgatattggcgatgatgtcaaatctcacgcttttttttattaatttaggagcccccgtttttccaataactacttatcttcaagtgacaaactgtgcagacttatctctaacaatcgtattgggtcactttttaaacagtagacgaaatacatataaaatctctcttatctgcgaaaggaaggtgaggcaattgggtgtataaatttaatcataagtctcgaccaagttccactcgagatactttcaataaacaataataatgcgcactaaacgcgagcgtcgtaaacgaaataatttaataatccggccgacaattcaataattttgttaagtcatatgttttattattggaatcaagaaaatgatacatacaaagtggtataaataaaagaactgctttcgcttgcttgcttgcggtgtggaatctattgattaataagtttattaatattggatatagcgtgtatgtggatcctttttgctgatctatgtaattagcttctatgcatatgcgtttccctttctatccttcaaaacttctacctcgccgttctcgtcgctttcggcgtacaaaaagtgaataaaaatatattgaatatttttaagtgcgaacaaattgggattacaatacttcatatataagcttaaacataaaatatatagaaaaaacatgaagaaaatatatatgttgattagacatgaaaacataaataaaaaatattgattcacgaataaacttaggattaatacattcctttgttttgttttgttttttttttgacattttttagttttctacttttttttacgttttcgttcgatttttgttgttgttggatatagtttaatatagtaatttgcgatcaggctcttaacgtggctggccataattgaaagtctaccaaaaatgaagccgctccgaagacaattttcaaaacgattttcgactacataaacaacgcgaagattcaaaaaggattgatttgctgattttcactgaacacatattgagctcaatatgtcattgtatctacggctggctaataaaagttatttgcggaaactacgaaacagaatattggattgctactgatattacttcttctttgtttcgtttctgtggcgaaaatcgtccccttgccgacgaactactcctcgatgctgtagaggaagtagtagttctcgttgtcgttaatggcagccggcggtgcctgcggtgccttcctggacagcggctcgaagcccatgaagaggaacgcctcgatgaggcgagctcgatccggctgatctttaggcattaccataacgatgccgtccacctccagcttctcctcggcgaactccagaagcgagatgaaggtctgcttggagccggccggaggaaggtccttcggtagagcgacatacaacaagttgttgactgggttcagaatcgtattccaattggtgtactggtcctcggtgacatgcagcttgatggtgatctgcaccggctggtcgtgctgcaagatctggcgcagcacttcctggcagtcatcgtccgagcacagcgagtggatgtcgggctgcgactccaagtcggagcaatccgactgggaggacgacaacgacgacgcccgggagctggcctcgtacaggctgccaccagccgagtcgaccgaagacttacggctgtagcctacacggaaggaattaacacattttagcataataagtacttaaatggttagttattattactcacccgtcaagagcgatgccctatcgtgatctgttctgtggtggacagggacatcaggaccaccacagaggccctacgccgagagagatgcggtaggactccgaggacatggtcgtggcgcaagacgaagtcgagatggtgcggagcttgccgtcggcaattccgctgtcattaaattctcttctaacgaagccactactaaacactgggtcgctgtggaaaaaaaattgggtatttagtcaaaaaaaccccatatcgaactgcgatgtgcctgttcgattttgtagcgcaactccatctgttggaaagtttatatcccctttttaatggcaagcatatagcgaatattcccatgtttttataaagattatttcccatttacaaattacttatgtgaattatgaattgaatttataaacccgaaatctttaccacaacatggtgtagagtaaaactcaattggtaactgaacgtcgcaaaagctgctaacaaactgatggccacgaaggcagaacgaaaggcttatcagcgaagcggcgacaatttaattatttcgcttttatgacgctaacaaattgcagttgtttattttaaagcgataagatacgcccgcgcgccttatcggcaaaccgataagctgtttccgatagtcacgcagcgcatgcagccctgcgctcacgcaccaccaatttcaccacaagatggccgccggcagctgtcaaagcgggagcgagcacgcaaacacatacactcgcaaacactcggcataaacgcttgcacaaagaaaaacggagaaaaaatttagcggtttcggtggaaaaaaaaacagtgaaaaatatatagttgaacgaacaagaacagacagcaacacaccaagctagcgaacatgtctatcggagtgcccattaaagttctgcacgaggccgagggccacataatcacttgcgaaaccatcaccggcgaggtgtaccgcggcaaactcatcgaggcggaggacaacatgaactgccaaatgacccagatcacggtgacctaccgagacggacgcaccgccaacctggagaacgtctacattcgcggctccaagatccgattccttatactgcccgacatgctgaaaaatgccccgatgttcaagaagcagacgggcaagggacttggtgggacggcgggacggggcaaggcggccattctgcgcgcacagggtgagttgggcactttggcccacacacacacatacacattcactttttgcacggactgcctttaaaaacaaaatattttctatgctctcgtttaacttctaaatttaactaaaatatttgctatcccaatttaataatccaaataccatacaatttttatgatagtaaaaaaaatggtagtaaaatttatagaatttaatatgtataaatagtgctacaaaaaatatattaatgcagggtttagtttgttttaaaaactgagctgatagttttcgtcaaatcatatccctcccatttaattcattaatttcaaaatttaaagtattaacgtatgggtaaaataagaaacatgctaaggtagtaagtttgtgtatatgtttatttttagaaagcaaaaactaaaaaaaaaaatgttataaagccatgtgcagtgaaatctagaaatgaattttgtttttaaagacagtcgtgcagtgtatgtgaggccctcagcgaaatgcaattattaaaaacgacatttcccttacagctcgtggcagaggaagaggcggacctccgggcggcggaaggggcactggtggaccgccaggagctcccggcggcagcggcggacgcggagcatggcagggaggaccaaccggcggtcgaggacgcggcggcctgtaggaactgcctactgaacaacgcatttctattctctaagttgcgggcatcatattattagcgggcgggtcgaacttctccagatgttttttgtaaagtatttatcgggcagagcagccgagaatacacttgaaacttgaatttgaaagaggcagacgttgtttgttgtctaagtaaagtaagcacctgaaaggtgggaagggattagacaccataaccagggggacgctcacaagtttggcttaaaattaagcactccaattcgattcattcgatcttataatcgtcgcctttcgaatgttatacaaagagagcaattccatgacagtattacaatcggtcttaacttgactgtcgacggatagctctcttcatttcacaattcgcggaggatctgaaagcggaaatctaagctaacacctcaacggacaggacacagtgttaggccagacgaactgaatgtggaacttgggtttagtcgtttggttagtctcattgcctcacagcgcatcgtcgaatattatacaaagagagcaattccatgacagtgatattaaatagtttctggactgtcgacggacagctctctttattcacttattcgcatttggattcgatttggttcgttctaggtgttaatcagacattcaatgtggacagcacagatacatacagatacctatatactatataaatgctttccacacattgtacatacatatgtacatttgtgtattgtttgccggcagactacgtgcgaaatatgccaggcattttgttgttatgttggtttcctttctgccaagccaattaaatcaacaaactgcgcacttggcagagcattgtgaattgagcgaaatagaggcctgaatgggaacagtgaccaccagcagcagcagatggattggatgcatgtggttcaatgcctaatgaatgcaatttatggctgtgtctgggggtgggggggtttgttagagtaataattccccgaatcgatggcacgtgtgcaaggcaattgaaaatgctttcgcaattaataaaaaagatggggctatgctgacgtaccacaagattttctggttctcgttctgaatcttctggttatctggctgcgccaccatatcgctagacgtcgtcattgccaagttaaatatttggtctccggttgagatttatcacagctgcagtctactatctgtctcctggtatgtgctctttatcttttatcacagattgcgttgcttcggtcggtcggtccttcggcggagcttggaactcacatcgaaaagatgtggcgattggatatctgtgtgttatgtggcggcccggtttccgtgcctctcctccactggcgatgtggagactgctcgctgatgatctgtgtggtgctgtgctctgggcgtttgtctggcgactgacgacatccaaacggtggcggcatcatttatctatctgattaagtagcagcgactaggaggcctcacgatatatctacatacacgtacatacatacatacaaatgtataatagcctagttctatccgacagatatgcaaatgtgccggagagcacgggtacagtcgacccggtcggtcaggggatgtggatctgaatcggggtgcggtgtgagtcagagccccaaggttaaatggagccccctacttcccacaaaatacgggtgaatcgctaaacaaataaggcgcaaataactataagcaaaaatgccggcacacgtagcatttgcattcacaaagtcgcaatgggcaaacaaaataaacggagagagctgccggctataaatatccataaaaattaatatacaaagtctaagagaaattctttttttttctgtggcgctatttcagtcaaaaacatcaccacattttttaggctgcacgtgtctgccgcttttttttcgaacaaatgtaccaaaacaaacgaaataaatggctaaaaatggctaataatattggcgataagtcccataaataaaagtctgcttaatataagcagaggtatggacctaaagcggggtagaaatcaacgtgaagagttatctttattcttaatacatatgtatatgtatacaggtacatacatacatacgtagtatgtaaacgaacagcagaggtcatctcaataactacaaacgaatactaataaaaataccatttatcgacaataaactggactttataattgctgacgtaggcttcttcgctttttgcagctttgattgacaatctttccatatgtttcagtctaaacaaataacaaatatctgtagctcaattaacaaagtcaaaaaaaattgtgtaaacaagctctttgatattttggtattttccaggtagtttccatagaaaatgtatacaaatttagaaccaaaaggatttcatgttaatgaagttaaacagaatcttaattcacacaggttttatttttgtgcccttagctgtgtgagcacatttttgccaaaaaaaaaaacgtgttgccatattttggtgtagtaacttacggtaatcactttgtactttggctggtctttcatcgttgatcatgtgtcttcggcgtgacgaaagcgataagcaaagaactaccctaattaatttgtaaacgatatctttaagaggaaaaccatgtgtaaaacttttcaacttcctcctgaaactgcaatgcagttcagttaaagtagaaaaaagcaaagcagatctggatcattatccagattagatccagataaaaaaaaagtgggcgataagataacgtaattggtgcgcttgtgtaatcaacatcaaaacttgtcgttctgcttggacaaatattgggggatcaggtacaatctttcgacagtggaaaaacaatcgtaaaagacgaagtgtactaagcaaacacaagcaggatttttagacaaaagcaagatgtcataaagcaaacaagagcactggaaattattatacatatgctataaccagaacaatggtgagataagggataagatcttgtgaggttccgcgagataagataaaggggtagaaatagttgaaggaggcaccaaagaagctgctagaaaagtgccgatgacccaatatcgctcttctacatacatatgcacatatgtatgtatatgcagtgcatatatccatccctctttctcctatatcacttgccgcacaaaaacaacgcgaaactgcaatggcgagtggaattttcccttgtttacagctattatgcctgtgtgcgtgcgtttgtatttgtcgttgtatgacataataaaagccgcccaagatgcccccccaaaaaatgaggaagaacttaaacgaaacgctggtaaatcgctaaagactcaaaagtaatggaagaaataccagttgttaacgagtatcttcccaattggatcgcataaagcaaaattaccaaatgccatttccgatggaagagaaacaagtaaacaaagaatagagaaaactcatacgcacacagatgttatgggttctccaattggaaggaggttcaaactgtaaataaatgagggaccacagcgttgccagatccccaaacatgatgtgtcggttgcgataattaattaataaaaatttcctgcaaacagaagtatcaataaagcatttatgtaagcggattattgttatagacttgtggttacaatcaacgaaactactaaagcagcgcaaagaacgtggcaacgctgcaggcggccatcttgaacataagacaaaacagtaaataaataaggcataataaagtaaaaaattaaatttcatatatctccggtgaaatcaattaattactttacttacgaatcgtgccactacacatacatggccacaatttccattatttatttccgtcgttctcattgtttttacctctgtgtgcgtcacagatgattttacagtaaaacaaaacatactgacccacacagcttcacatgtttacatgtgtgcgtatgtgcgtatgcgtacgtgagaaaatcaaccaacaccgttacccgatttgttagcaggttacacttatactacacttaactattgcactacaaaccattacaaccaagcctacttgccaccaattggaaaggaaaggagtcgtggactccctcgcactattttcatttcatttctcttttgcttttttttattcttcgcactacaaaatcgactttgcactttttgtcgtcgtgtatggcaaccgctttggacaccattacttacagtttattattcatattggatggcattttcacacttaatggttgcaacttaacgcactgagaagaaatcgagtcgaacgaaaattgacttttgttgtaaaacttgctttgattggggtgcaaacctcccagcaatttgtgatctgatgtcgtcaaaagttagtataaaactgaagaaaataccaacgtgctactccttttatacgtttctcgccgactttttcggtacatctctggccggctaagtttggtcacactaggttcaagctccagcaacctattgtcacaaacaacagttacttctttaagggattcttaaatctaatttacgtgttccaattttatacaggcgtaccttttctgcttttacaattgtaaataacttgaggatatagtatagaagttttacgtcgatttcctaagcgggtctcattaattgttaatattgattaacttaaaaaacataagaaacgatccaattaggctaatgtcgagatatgaatatcgtaatggtaaataattacagttatgctataaagtaacgtgacagttttaaataattaacagctgtcagattgacaaatccatgaaatttaagtacaacttaaataaagcctttaacatctaagagaatatcccaattactaatttacaataatcaaaaaaatattagaaaatatcgataacattctggtcgttctcgcaaccctagtcacaacgcgtttggtcaaatttaggatcagtcgttcgttcgttcgttggaataaaataaactcgggaattaaatcttggaaaaacgtgcgaatccgtcatcctttcatctaaaaaaccatgagcgcctttcccggtacgttcgcgttcgacgaatatggtcggcctttcatcatcctgcgcgaccaggagcgccagaagcgcatcacaggaacagatgccataaaggtaaatgaaactgcgattcaccatctcctggcgttgtattccgcatcctggacgagctggtcaggatcagattcgtaggcaaatgccctgcgtgcaattggtgtgctcactaagtcacaggagtgacgcatcgtctgcggaacattccagatgttctaaaaagccggttttaaatagtctttttgttgctaatatttaataatatgc

SEQ ID NO: 27470 - DNA, 1207 bp, DROSOPHILA
cagatcacaaattgctgggaggtttgcaccccaatcaaagcaagttttacaacaaaagtcaattttcgttcgactcgatttcttctcagtgcgttaagttgcaaccattaagtgtgaaaatgccatccaatatgaataataaactcgacccagtgtttagtagtggcttcgttagaagagaatttaatgacagcggaattgccgacggcaagctccgcaccatctcgacttcgtcttgcgccacgaccatgtcctcggagtcctaccgcatctctctcggcgtagggcctctgtggtggtcctgatgtccctgtccaccacagaacagatcacgatagggcatcgctcttgacgggctacagccgtaagtcttcggtcgactcggctggtggcagcctgtacgaggccagctcccgggcgtcgtcgttgtcgtcctcccagtcggattgctccgacttggagtcgcagcccgacatccactcgctgtgctcggacgatgactgccaggaagtgctgcgccagatcttgcagcacgaccagccggtgcagatcaccatcaagctgcatgtcaccgaggaccagtacaccaattggaatacgattctgaacccagtcaacaacttgttgtatgtcgctctaccgaaggaccttcctccggccggctccaagcagaccttcatctcgcttctggagttcgccgaggagaagctggaggtggacggcatcgttatggtaatgcctaaagatcagccggatcgagctcgcctcatcgaggcgttcctcttcatgggcttcgagccgctgtccaggaaggcaccgcaggcaccgccggctgccattaacgacaacgagaactactacttcctctacagcatcgaggagtagttcgtcggcaaggggacgattttcgccacagaaacgaaacaaagaagaagtaatatcagtagcaatccaatattctgtttcgtagtttccgcaaataacttttattagccagccgtagatacaatgacatattgagctcaatatgtgttcagtgaaaatcagcaaatcaatcctttttgaatcttcgcgttgtttatgtagtcgaaaatcgttttgaaaattgtcttcggagcggcttcatttttggtagactttcaattatggccagccacgttaagagcctgatcgcaaattactatattaaactatatccaacaacaac

SEQ ID NO: 27471 - protein, 199 aa, DROSOPHILA; identical to SEQ ID NO: 24825

SEQ ID NO: 27472 - DNA, 2396 bp, DROSOPHILA
cgccgacgtcgcggtcttttgcaattttcaccacgctgtgaaaaagcgtaaatttcgcttttcccccagctaatcttggtttgaatatcttacctggcagttaatttgcaactgtactgcctatttggcactttttctgcctttctttggccgcaattcacaatttttccggttcgcaaaacgagaggtttactttttcatgcggcagccatttatagaatagtagaacggtcacatcactcaatcgataagacatctatcgtctatcgagagattaggtgaattgctaaacagtctagtggtaaaaagcagtcaagataaccacacaaagtgcgagcaaatttgaaaatttaaataacggtgttattggggaatatattacaaattcaccaaaactgcgacgactaaaactaattagccttattcacttaaattactttgtattgtagtagtaaaaaatatcgagacattagcatttttaattaaggctaaatccttgtaattaaatcaatgaatcagctcgtcaacaaatgtgttaatattaataattaggaacttaattagtgtagtgcgtcaatattattgttgatgactggtaaaaataagaacacacagtcgactttagctaacaacaaaccgaataaataaaacactaaataactttttctttggccattaactaatgctcactgtagcttagaaattcaaataaccgaattggaagatcccatcgagtcatctgtgataatgaaacacctcatttcgcatcgggtaacgacatccccagactcccgaatgtttgtccaatcaatgatcatgtgcaaaatcgatccccgggacgttttgggccactataaatattgtcggcaggtcgctggggatcacagtttacggacaacaacgcttctggccagaacacgatcgggaaaagttgctaatttgagagaaaaacataaaatctagagtgcatccccgttaaatttcgcaaataaaagcaacaatggcaaaggtattacacacaaacaaaaagtgtttctatcataatgagtaaatgttgtgaacattttcagttattttccatccttttgtgcctggctattatcggattcatcagcgcagctcctatagaggtaggtcatatctttagtttttccatttcaaaaccaaccaacaaaatccattcgcttggcaggacaagaaacccgctgaggaggctgatctctccaccgcggactccattggctacggctactatgcagctccatcgccaatttactacggcggctatggaggtggctacaagtacggcggatattccggttacggcggctacggcggatatcgctcctacggaggcggattctatcgtccccgaatttacccagtttggggataatactatgatgccagaccgaaaaacgttccttaagcaagaagtttcagacatatggacatacgttccttaatccacaaaatcctatgtaatcgcactagtgaccaaagaagttatacaagcaagccccccagttttgaaattttaaccctttcactgtcttgcaacgacgagttgatgacgtcagcggcagtttttgaccccagagcacaattaacaccggctttattgcaataaaaacaaaacaaaaacaaaaaacactttacgtacgactacgctcgcatgtgtggtttattattttcaaatttcaattgtccaaaaccggatttcttttttgttttttgaacttccaaagaaattgaggcggctaacgtaacatacataagccggccagcaaaattccgagttggccaagtcgagtaattacacacatctgaacctttagttggacctatctttaacgatccacatggccaaatttcaggccataaacggggtcacaagaaagctggtctatacaatggatatcagccagaagtttatatagtatataactctttgtaaaatttcaaaagaaaaccatactatagaagttagttattgcggccataaactatttaaaactcataattctctgaaatactacctgtttttcaacttaaaatccaagttaaatgcatttcctacatcaagtgttccaaattattaaaagttgaagctgcttgtggatattaatatcatttatgaaatgtgtgtttatttggtcatggcttatatttcacagtagttttgtaaacatttaaatagattggctttactgttgccatacatgcaattatacgagtgtttactgtattcggagtttaatcctcgcataaggaatccattggctagagtttaaatagaatatatcctggccacaggatacaggattatcctagtggcgacgcgatcccgtgtgccgcttgtgatgctgcttgctgcccttggaatgcgatcggga

SEQ ID NO: 27473 - DNA, 213 bp, DROSOPHILA
atggcaaaggacaagaaacccgctgaggaggctgatctctccaccgcggactccattggctacggctactatgcagctccatcgccaatttactacggcggctatggaggtggctacaagtacggcggatattccggttacggcggctacggcggatatcgctcctacggaggcggattctatcgtccccgaatttacccagtttggggataa

SEQ ID NO: 27474 - protein, 70 aa, DROSOPHILA
MAKDKKPAEEADLSTADSIGYGYYAAPSPIYYGGYGGGYKYGGYSGYGGYGGYRSYGGGFYRPRIYPVWG

SEQ ID NO: 27475 - DNA, 2463 bp, DROSOPHILA
tagtttgaaaaaaaaaatgggtttggccactttgataactcgagaatggaaccatcagtgcggcatagcagtttgtcttagtactccaatttaaatgcacgttatccagagaacaaaccacaatttgaaaaaacacctatacttcatacattattgtttaagctgtattttattagtgacattaattgcaataattagctgtgcggttgctaatgctgctaatttaaaaacttttcataaatttaatcaaacgctcttggttctggttgtgataagtgaaacagcatttattgataaagtgcggtttattttagaacttatttaaaaattgaaaggtacaagctatttttagaatattttggacttcctgccgatgccaagcattaaacacttataggttgtaaacaaaaagttttgcatatttaataaaaccaattatgtattttttatgttttcgtagctataattaatttttttgtgatgtactacacaatcgccgaacattaaaaaccgtagactatcacatacctcttacttataaaggctttagacttcatctttgtcgcggacctgtttggggctatcgacagttagtcaagacccaatttagagccgctagaagttagagatatttgagtcaggactttactccgtttcgatttactccgttttaatctcaatcttaatctcaactctctaggatctattgtttctgagatcccgacatttatacggacggacagacaggcgtactcggctattgatcctgatcaagaatatatatactttttatggtcggaaacgcttccttctgcctgatacataattttcaacgaatctagtataccttttactctacgagtaacgtttataaaaattctatccatttctcatacctcgatgttttgaaaaaatgcagtgctgccactacgatcgaaatgcggtcacactagacagctgattttttccaactggaagatttgctttgcacactggacaaaggaaatgtcccatttgtcggcttatccagcatatacgtcagtctaaacatggagaaaagctgcagtattggcaacggacgggagcaatacggctggggacatggcgaacaatgcggcacgcagttccttgaatgtgtctacaggaacgcgtccatgtactctgttctgggcgatctgatcacatacgtggtgttcctgggggctacgtgctacgcaatacttttcggcttccgactgttgctgtcctgcgtgcgaatcgtcctcaaagtggttatcgccctcttcgtcatccgattgctgctagctttgggctccgtcgacatcacatctgttagctattccgggtgaagtgaccaatctggcgaatgccatcgggaccacggcctttaaactacattaactaaatcaaatataaattccaaattgaagaacactgtaaattacattaaacggtttgtcattaattcctttgttaaagagcacttgccaacattaaagcataatattttatttaattaacccaacagaacaattgctgactcttaacatgatcagctaactatctcaattgaaatgttgattaaacaaaaaatttaagctttaatttcgtcatggtaagttgatggtattcatttatcctcacaccactcgttctccttgcgcacctgttcctcctcctgtggcagaaagtcattctggatggcgaaggtgtcgcgaatagcctgcggcgacttgcccttgatcatattggccaccgtcttgcaggtgacgtcgagcagaccctggatattcaggtagtttgccgcgaggatcagttcgaacagcgtgccctggtcgactttgagaaagtcagcgtcccaggatgagatgtcatcagtgcgcttctccttgttctcaacctcttcggtaaccacaggatcgtccttgtgataggtggcccagtggagcactttcttcaggatcagcgagttgacattcggcaacggcagcacactgttgtcgctctcatcgcccaaatcctctattgcaatgcgaatcgtttccgagcacttggcgatctcctgatccgtgtcaaagatctccttgtccgcagactccagccgaatgatgggcatctctgcgtaaaaatttttatttttgcttatatctatattttcaattttattcgtacacacctcctgctgatttggatcccaagatttgatacgaaatcggtttgatttatttgcagacgcagccaaacaaaatttttagacacaacacgatgtcacttagctgtggcctactggctaaaaataatattcccttgccttcaacttgaaccggactggtgcggcggccgcctgagaacagagcgtttgttaaataaagaacttggctgccaataattccccggattcttagaaaactagaacgtcgtacgatttgaagaggaaatttgttagtgaaacggccgccagtg

SEQ ID NO: 27476 - DNA, 463 bp, DROSOPHILA
aggaaatgtcccatttgtcggcttatccagcatatacgtcagtctaaacatggagaaaagctgcagtattggcaacggacgggagcaatacggctggggacatggcgaacaatgcggcacgcagttccttgaatgtgtctacaggaacgcgtccatgtactctgttctgggcgatctgatcacatacgtggtgttcctgggggctacgtgctacgcaatacttttcggcttccgactgttgctgtcctgcgtgcgaatcgtcctcaaagtggttatcgccctcttcgtcatccgattgctgctagctttgggctccgtcgacatcacatctgttagctattccgggtgaagtgaccaatctggcgaatgccatcgggaccacggcctttaaactacattaactaaatcaaatataaattccaaattgaagaacactgtaaattacattaaacggtttgtcatt

SEQ ID NO: 27477 - protein, 99 aa, DROSOPHILA
MEKSCSIGNGREQYGWGHGEQCGTQFLECVYRNASMYSVLGDLITYVVFLGATCYAILFGFRLLLSCVRIVLKVVIALFVIRLLLALGSVDITSVSYSG

SEQ ID NO: 27478 - DNA, 2201 bp, DROSOPHILA
gagatagcaccaacccacccacgaaagttggggaaacaagagcgcgagccctcgagcagcgatatggaaatggtaacatgggtatggggcttgggagtggggaaatttcaaggagtaggggcatttggggaaaatcagcgcctggctggcgtcgtttttcgacggacgatgtcgtcgtcgaggagccgaagaatcagggaatcgcggaatcgggcaactgttgtggccgagaaacggggggcggaacgaggacgatgggtgcgccgcacgacgatgacgcctacgcagctctgtgacgtaagcaggctcgcaggacctccgagcgaggagccgaagctcgaagcgaatgcagactggccccattgtcctggccgatggcgattcattggcgattccacagttgggctcgtcacatggccacctcggcgatgtcctgtctcacacactgatcctttttaggagctgtgcacctttgcacttgaaaactggcgaatcgaatggaagggggttttataacttaggaatgactacaaaaagcaaaataaactatgaaaattaaagcaaattatatcttattaaacttgtagatgatatatgacaattaaggtgtttgctatactatactaccacaatcctattcctagggaattgaaagtagaaagagaaaaccaatgtaatttatataatataatagataatgatataattaatatttacttaaatgtttatatacacaattgtgcttaactgtacactagcaactccaaataaaactcctccgtataaggatgctttctaagcataatagctattacctttattatttcgataccttgatatgggtttcaattaaagtgtttccttatgcaataaccccatgtcattcgcccaccttccccgcctcccgtcgtgatttatgatgtggctttaattgcccgcagagagcaaagttcaattacaacccccgtaagtgtgctgcactttggtggggcacaggaccctaatcggttgactgatgggcgatgacggagatcggctcgagtgtccgcctgcttatgctcaagtcgccacttgctgatgacaactccggcttccgacctccagtcatggccacctccagctccagctccagctcctgctccaccttcacatctaccacccatcgacatcggggctggattgccgactgtgctgttgacattgaattccgtgggatatggccaaaatgctataaatagacaaccagccgagttgagcagagtttccttttggcgctcgccgcttttccttttttttgcgcgccgcctgtctttcagacttcgtccacagccaaacaggaaattgcatggattccacgagacgctgccaagacgccatcaaagccgttgattaaaaattgaacagcaagcccagcgacaacgcaataggggcaaataaatagatagggtgtaaggtggtgtggcagcaagtggcaagtggactcctggccggaggaaaatctcgttgccaacgaatggccgtacaaacaaaatcagacttcaagggtcacttccgcttcaaatggcaaatcgggtttatgccggccacctcctactggcataactccctcaattccccaattccacaattcctcaatcccgattatcgaataaaacatgtctctgtcgcactgctggcttccaagaattttgctaaattagtttccggacaagaatgctacaagccgcttctttttgcccattcaacgggaaatatggacatttttgttgcaatacgaatataactgcttgaaaatcaaatgctgtataataagatgaaggaacgtgaaaggatatgctcaaatcaatctgaaggatgctaaaggatgttagtcatatcaaaggctcacagttacaattcgaaattcgaagtgaatcgataatggttaagtgactcaatcgctgaatttgacagacagacataactgagggaaaacggtgctataactcgcataacatcattacatgcctcgtgtctatttcgggattataattcatgctaacagttgaaaatatttttctccgtgcagcagagcgctgaaattatgcataactcttcgcccaccaaatgcgcatctcgttgtaagtggcctcttaactatcactgctattttttgcagtagtatggtgcaccaaaaaaaaagttattttcgcattggctaa

SEQ ID NO: 27479 - DNA, 201 bp, DROSOPHILA
atgtcaacagcacagtcggcaatccagccccgatgtcgatgggtggtagatgtgaaggtggagcaggagctggagctggagctggaggtggccatgactggaggtcggaagccggagttgtcatcagcaagtggcgacttgagcataagcaggcggacactcgagccgatctccgtcatcgcccatcagtcaaccgattag

SEQ ID NO: 27480 - protein, 66 aa, DROSOPHILA
MSTAQSAIQPRCRWVVDVKVEQELELELEVAMTGGRKPELSSASGDLSISRRTLEPISVIAHQSTD

SEQ ID NO: 27481 - DNA, 5987 bp, DROSOPHILA
gcataagtagatatggtgaagaaatttacttggatgtattagaaaagcataccttccaggcagccacctcgcgctccttgctggccttgtccttatgaagatccgccaggaccttttgcagcttttggtcgaaagcgttcgtgtcctcgatgtgtttcttcttgctcttgacgaactcggcctccaggttggtgtacttaatctccagcagcttgtacttttccacctgagcgtcgaacttctcctgcagtgcgtgttccgtgtcgtgctgcttctgcagtgcctccgccaactgaccctcgtactgctcctgcagggtcatcttttccgagcgcagcgcgctcattctcttctcggcggtaagtttttcggcattcagggctgtggatatcaccataatcagtcggcatatggacaaaacaagatagaaacaatagacccacattgcatctggacactgaggccctcttggaaggcgcggctctcgtccaattggtgttgggacatttggtagataacaatcatcatgatgagcacgatgaacatgctcatcaggatgcagatacggacgcgccctgagcgcgcgaagcgagccgaactcattttacactcgatttaagctagtaaatcaacaaattgcaactatttcctttgcagaaaaagaatggtttttcttcttgttttgctttagagctggtacgatggtatcgtcgtaacgatagtagcgattgcctatcgatgaatttagttgtattatttttttatactttatttttatcccctttgaaattttaaaaggttctgaattatgaatgttcgcagttctttgcaataatataattgttgaattccttttttttatttaatttttaaggcttgctatgtttttaacaaggcaagctcaaggtgccggtgtgaccagcttggcaccaggcgatagccaatttgagccgtagatatatttcaaaggtgtcgaaacggtcactccgctgaccagaatcgacggcgacgcgcgaagagaatatcaataaatatttttaatttagcttaattagccgcaaataagtgttgcttgtccgcagcagccgttaagttcaaagtaaccggagtcaattaatcgagcttttcagcaactagtgcaaagtgagttcaatatctcggctacgattgatgccctcacttttccgcggggtgttcggtggaatttatttaaacatttgggagagtttcgcacgcgaacgcatatacgtagcgcagcgagagagagagtggcaatcaaattaatttaataaaggtgctcgatggcggtggtaaacaccgtgaattacgtaaagtccgcacaagtggttgctcctccagtgcagccaatctggaataagtgtgccaccaataacattaacaatagtagtccagtatcagttgtgtgaatctcacctgtccgccaggtgaaccacgcacacggggaaaaaacgtcgccgtaaaacggcaagccccccgcccccacgagttcccaaacatttgggcaataatcaataactggactgccatttactgttaggtgccgcaatctacacttatttttatcttcggaagtttatagattcagctataaactattatttcaccccatcggtattcttcaacctgatatctttatgcttgagatatttcttccacctgatatctttatgcttgcggtactctgtccaaaaacgagaaatgataacaagttcagacactcttatcgtctgcgcagcgtggataacccgttattcggccttgagagttgagcatatagatggccagcaaactttttgataaactttttcgatttgcaccttcgtgtaattttgctaacgaagcaattttaacatttattcgcgagtagcgactaatggcgcccatccatttgctgctaatctccgtggggtccgccgatcatgtcaataaactttggatcccacattctcggcttatcgccaacctatattaagtattcgcccatatgatataaacacccaacagcattatcagttgtttaacttacatgagtgtaaacatttatggttcggttattgttcgctcatttcattaagcaatcaaaacattaaccataatttatatagatatgtacaatcttaattgggtatttctatactgcctgacaaccaaaaattgtattgtttgataaattccaccggttagcatcgaaaaagaacttttcaaatatacatatatattatatgcgtatattaaaataatccaacagatatatcagttgtttgagataaagaaatatacatacatatgtacttattgtttaagttattattggaagtaatataatataattttctctatatttttattgttttgttacaaattataaaaaaactagtttgtaccaattctttgtttgctcatcatatatagcatatgtgtatatctttaatggttgtgtgtatttcgcagaatgtcgagcagtgcaaccatcgcaacgccgctgccgcagccgcagcaccagcaattcgcgtaagttatcaataaacatttcaattagcctgtgtaatttaatcttaaagacaaacaaacatatttgctttacaaaacctatttttgcacggccaaaccaaacaaaatcacctgggaattatattaacaaaggtagcgcaaagggttcatttgtgtaataaatattatgattaatagctattcaactcaaaaataataaagtctaagttcttggttttaaagttagtttcccttagccaatatccactgtatttgagtttatcatcgttaaagactcgtcacatgaatagacatttatacacatttcattttcaagtgctttgccctcagccatcagacagttttcccccttcaacccacatttccctcaaatagttgcaataaaactaggacaaatcggaagagaaggatagcagtactatgacataatatgattgcattttgcactttgtttttcttctggtcgattgtttaaaaagaaatgcaagccgaaaatagaagcaagctaagactagatagtactattataaccaatcacacataagtatgtatgtttccttggcagtgcgccaaatatttcttccttattaatgatcaacacatttgaccttttctctgctttaattgtatgttcaatagtagtctcttaggagccctgattgtatatgtgggccaagttcaaagccaataagactattgtttacattttgttgttgcacagcgcgaatgcaaagttagcgcagtgcaaatatttgtcaattagccaagcataatgagatagcgtcaattgccaacgatttaattccttctatttgcagcctgctgccgaagatcattaacggcggaattgcgggaatcatcggagtgacatgcgtcttcccactggacttggtcaagacgaggctgcaaaaccagcagatcggacccaatggcgaacgcatgtacaacagcatgtgagtaaaggcaagcatgaatctctagatggctttataatttgaaataccttcgtaggttcgattgcttccgcaagacgtacaaggccgaaggatactttggcatgtaccgcggctctggcgtgaacatcctgctaatcacacctgagaaggccatcaagttgaccgccaacgattacttccgccacaagctgaccaccaaggatggcaaacttccgctgaccagtcagatggttgccggcggtctggccggtgcattccaaattatcgtcaccacgcccatggagcttctcaagatccagatgcaggatgcgggtcgcgtggcggcggcggccaaattggctggcaagacggtggagaaggtgtcggccacccaattggcttcccagcttatcaaggacaagggcatctttggcctgtacaagggtatcggtgccacaggactgcgagatgtcaccttctctatcatttacttcccccttttcgctactctcaatgacctgggtccacgacgaaacgatggatctggcgaggctgtgttctggtaagtaaagcataattgtctatttgtcatttttatatttattttatgctaattaaataggtgctccttcctggcgggcttggcggccggttccaccgctgccctcgcagttaatcccttcgacgtggtcaagacgcgtctgcaggcgattaagaaggccgacggtgagaaggagttcaagggcatatcagattgtatcacgtgagttcaagaaatgttgccaatatatccttaaactcatataaattctccaatagtaagacactgaagcacgagggacccaccgccttcttcaagggcggcctgtgccgaatgattgtgattgctcctctgttcggaatcgctcaaacggtctactatctgggcgtggccgagggcctgctgggctatcagaaaaagtagggcggcttggaatgagtgcgcgccaaggcggattgacaagaccgaagcattttaaatgtactctctttgaatattgaatgtgtatgtatatcgtgtttaaatgttgttaaagctgtccatgaatgtaatcgtgaagtctctatagtaagctaaagtaatcgaacgatgcgccagccagcgaagttgttaaagttttccccaatcctcttaaactactcaaacgatgtactacatatgtatttagaccatgtcagaagataactgatgctccaatgacaataagataaagcaaattaatcgctgatataatgtacatttttggttaatatcatagtctataactgttgtgtttggatactctctctatttagtctttatttcccgagcaatccgcagctagccatgaacgttctgcatcaaattgtattagtaatgcatttttctttgctgccaggcgaaatttacttttagtggcattcaagaacatgactagagaaattgtatgctttataaaaaccgtcagaattgaactaacgaaatatactaatgtaaattcaaaattttcgtacaacattaattatttcttggcctataaaaaaaatgttggaacaagttgagcaaaagaaccaagagcaaaaaaaaccacaaaagtttaagttaataagttctaccatatggttaatactacaacctatacttaattgcgaacccatcacagcgtttttccgaaaattataaatggcggcgtcgccggtattattggagtggcatgcgtctatccactggacatggttaagacgcgactgcaaaaccaaacaataggtcccaatggagagcgcatgtacaccagcatgtgagttttgggttttcggtttgggttgtgttttgttattatccgcctaatggagaactctattgccttagcgccgactgtttccgaaagactatcgccagcgaaggctattttggaatgtacagaggctcagcggtgaacatcgtgctgattacgcccgagaaagccatcaagttgaccgccaacgacttctttcggtatcatctggcatccgatgacggggttattccgttgtcacgggctactttggccgggggcctggccgggctattccagatcgtggtcaccacgcccatggagctcctcaagatacagatgcaggacgccgggcgggtggctgctgccgaccgagcggcaggacgagaggtgaaaactataacggccttgggtctgaccaagacgctccttcgtgagcgtggaatcttcggtttatacaagggtgtgggcgccactggagtgcgggatattacgttctcgatggtgtactttccgctaatggcctggataaatgaccaggggccacgcaagtcagatggttctggggaagcggtcttctactggtctctgatagctggactcttgtctggcatgacttctgcctttatggtcaccccttttgatgtggtcaagactcgactgcaggccgatggcgagaagaagttcaaaggcatcatggactgtgtaaataggacccttaaggaag

SEQ ID NO: 27482 - DNA, 1666 bp, DROSOPHILA
cgacggcgacgcgcgaagagaatatcaataaatatttttaatttagcttaattagccgcaaataagtgttgcttgtccgcagcagccgttaagttcaaagtaaccggagtcaattaatcgagcttttcagcaactagtgcaaaaatgtcgagcagtgcaaccatcgcaacgccgctgccgcagccgcagcaccagcaattcgccctgctgccgaagatcattaacggcggaattgcgggaatcatcggagtgacatgcgtcttcccactggacttggtcaagacgaggctgcaaaaccagcagatcggacccaatggcgaacgcatgtacaacagcatgttcgattgcttccgcaagacgtacaaggccgaaggatactttggcatgtaccgcggctctggcgtgaacatcctgctaatcacacctgagaaggccatcaagttgaccgccaacgattacttccgccacaagctgaccaccaaggatggcaaacttccgctgaccagtcagatggttgccggcggtctggccggtgcattccaaattatcgtcaccacgcccatggagcttctcaagatccagatgcaggatgcgggtcgcgtggcggcggcggccaaattggctggcaagacggtggagaaggtgtcggccacccaattggcttcccagcttatcaaggacaagggcatctttggcctgtacaagggtatcggtgccacaggactgcgagatgtcaccttctctatcatttacttcccccttttcgctactctcaatgacctgggtccacgacgaaacgatggatctggcgaggctgtgttctggtgctccttcctggcgggcttggcggccggttccaccgctgccctcgcagttaatcccttcgacgtggtcaagacgcgtctgcaggcgattaagaaggccgacggtgagaaggagttcaagggcatatcagattgtatcactaagacactgaagcacgagggacccaccgccttcttcaagggcggcctgtgccgaatgattgtgattgctcctctgttcggaatcgctcaaacggtctactatctgggcgtggccgagggcctgctgggctatcagaaaaagtagggcggcttggaatgagtgcgcgccaaggcggattgacaagaccgaagcattttaaatgtactctctttgaatattgaatgtgtatgtatatcgtgtttaaatgttgttaaagctgtccatgaatgtaatcgtgaagtctctatagtaagctaaagtaatcgaacgatgcgccagccagcgaagttgttaaagttttccccaatcctcttaaactactcaaacgatgtactacatatgtatttagaccatgtcagaagataactgatgctccaatgacaataagataaagcaaattaatcgctgatataatgtacatttttggttaatatcatagtctataactgttgtgtttggatactctctctatttagtctttatttcccgagcaatccgcagctagccatgaacgttctgcatcaaattgtattagtaatgcatttttctttgctgccaggcgaaatttacttttagtggcattcaagaacatgactagagaaattgtatgctttataaaaaccgtcagaattgaactaacgaaatatactaatgtaaattc

SEQ ID NO: 27483 - protein, 321 aa, DROSOPHILA
MSSSATIATPLPQPQHQQFALLPKIINGGIAGIIGVTCVFPLDLVKTRLQNQQIGPNGERMYNSMFDCFRKTYKAEGYFGMYRGSGVNILLITPEKAIKLTANDYFRHKLTTKDGKLPLTSQMVAGGLAGAFQIIVTTPMELLKIQMQDAGRVAAAAKLAGKTVEKVSATQLASQLIKDKGIFGLYKGIGATGLRDVTFSIIYFPLFATLNDLGPRRNDGSGEAVFWCSFLAGLAAGSTAALAVNPFDVVKTRLQAIKKADGEKEFKGISDCITKTLKHEGPTAFFKGGLCRMIVIAPLFGIAQTVYYLGVAEGLLGYQKK

SEQ ID NO: 27484 - DNA, 2433 bp, DROSOPHILA
agcgatatctattagatttttctactcttttttataatttactcaaaaggcgtcttaattgattaatgtaacaagcaaaccaattggaatcggctttagcaagcgcaaaaggagatcttaattaactatgctaagctgcctaaataaaaacaaaaactatttaagcgatgactaacgaatcaatttcgtttcaaatcacctacagtcaaggacatttttaaaaaaaaaaaataaataaatcagaaagaaatgaaacctaagactcgactggcgacgaactagacaaatgacggaaactaaatcattagaaaacctaattatattaaacaacagttgcctatggaagaatataaaacccactgcaggggaaatataaggataaacgttaacttattgtaaaaacaaaatgcaagaaaattagaggagccagcaaacaacatattatgaactaattcaactactaagatacgtgcacgttgtacttttcagatgcaaaaataaataaaagaacaattgcgattataatattaacacagctaggaacgaagaagaggagcatgttatcaatgtgatttaagagatacaagatacatacgagttaaacaatttgatgtgacattttttcgatgattttttggcacttcaaaagcgcgcaacaaaacgaaattttaattcaagctcaatggaagcaaagtctggcagttgaatctatgatttgatcgatctatcaattgtactttagttgcaaactaaagccagccgacaaacgaacttttatcggaacgctaaattatatcacaaattgttgcaattaaacgatgatttacaaccaataaaaaagaaaacagaacacagcgtgagtggtttgcttttaaaaataaatgttttctacatacttgcaacttaaggaacatcaaacaaaaggtggttctcttaaacttggtttattttgtttgtataataattttgctacattaaatctattttttgtttttaaggactacttcttcagctgaatcctctggaatggatgcgcttcgatgtaggccaaagccttgaggatgtaatcaggaatgggaggcggcgtgggcagatgagcaccagtaggacgatatccgttctcatcggcagtgtactccagctggatgggtgttccatcgggagcagcgtagctcacggatccggcagcttggactccacccactccactctcctgggcatcgatgccgttggacgttccgtattcccagctgtatgagccatccggcttgatctcgttgcggtacttggtggtctcggcctgagattcgtctgcagcccggatggcggccaccaggaacagggaaatgattagcgccttgatgccggaaaagatacaccaattagatgtgctattatagctattatcgcatcggacttacggtcttgatcattttggtgttggatttgctgcagttgctactgattgctgattactgatctccaagttcggcgacagatcgttttatactcgcaacgatcactgacctacacctacaccatcgccgaacaggtgactcttcgccattccgaattattaatttaattcgcgcatttgaaaatatgaatttgaccgcgtttttacgagcttagtagttcgcctaatagctgctttgtcatctgttgtttgttttaactacggttttacgacccaggtgctctataacccaggccaacttatgagtaaaggcctctccttatctgcgccttagaaatcacagatcaacgatctcgatttacagacgctgccacacaatggctcttttcttatctaatcttgacttatattcataataaataaataaatcgtaagccgaatttggagttaccagaaatatttcagcgaatatgacacactctttctcttgagtaaaattaatgtataataatacaaatgtatatgatttggggagtgatacattttctaaaagaaacatttaaaatatatatgtattatacatttaatgtaacatttaattttaaaaggaaaagctgactgtactagaaataaattttatttaaatttaaaagatttaattaaactaaaaatgtataaaaatattttgattataagtgaatgggtattgagctttcagtgatcaccaaacccagttaccaagtcaacgtaccgcctactgaatagttagagtatccgatatggaggcgccaaaatactctacgctctgtcactcgattagcggcttttgttgttaatgatatgcaaatgaaatatgaatgcgggcaaatgccggcagagcagtttgcttttggatctgagacgaacttgaaactctaacaaaacaccaagtgtcatcgtaaatgtctaacgactgctgccgatttgagatagttatagtttagcgtgcatttaaataagttttgaaacctttggca

SEQ ID NO: 27485 - DNA, 369 bp, DROSOPHILA
atgatcaagaccgcgctaatcatttccctgttcctggtggccgccatccgggctgcagacgaatctcaggccgagaccaccaagtaccgcaacgagatcaagccggatggctcatacagctgggaatacggaacgtccaacggcatcgatgcccaggagagtggagtgggtggagtccaagctgccggatccgtgagctacgctgctcccgatggaacacccatccagctggagtacactgccgatgagaacggatatcgtcctactggtgctcatctgcccacgccgcctcccattcctgattacatcctcaaggctttggcctacatcgaagcgcatccattccagaggattcagctgaagaagtag

SEQ ID NO: 27486 - protein, 122 aa, DROSOPHILA
MIKTALIISLFLVAAIRAADESQAETTKYRNEIKPDGSYSWEYGTSNGIDAQESGVGGVQAAGSVSYAAPDGTPIQLEYTADENGYRPTGAHLPTPPPIPDYILKALAYIEAHPFQRIQLKK

SEQ ID NO: 27487 - DNA, 2774 bp, DROSOPHILA
tataagtgaatgggtattgagctttcagtgatcaccaaacccagttaccaagtcaacgtaccgcctactgaatagttagagtatccgatatggaggcgccaaaatactctacgctctgtcactcgattagcggcttttgttgttaatgatatgcaaatgaaatatgaatgcgggcaaatgccggcagagcagtttgcttttggatctgagacgaacttgaaactctaacaaaacaccaagtgtcatcgtaaatgtctaacgactgctgccgatttgagatagttatagtttagcgtgcatttaaataagttttgaaacctttggcattttggtgttatccaaaaagtatactattgaatataagtttttattagcacagactatggtgttaatgtagtgtgtgtggtaagtaagccaaaacaattcatatgtatataatataacagcttataaatcactccaacaaataccaagttttatactcgttaatcgtagagtaagtgggtactttagattcgatgaaaagtttgtaacaggatgaaggatctgcgatcgatctgccaagtgtccgtacgtctgtctgaactttgaggtctccggaaatatgaaacctacaaaattcgaattaaatatgcagtttccagactttgctcacaaacttcaaaaaaatgttacgcccactattttttaaaaattgtttgctcgactatagcgttttctctgctgttttcacactgacttacaattgcattagtaaaaagttatttttatcgatttgaatacccgttttaaacaaagggtatgaaacagaaattgttaaattgttgttatagatgatggtttttcttgattatgatcgttaaatgtccttcaatcatatccttggatttatgatgctaaggagttgggatttatttttttgatattccccacggttattttttgaattctgatcttggtccatgtaaacctaagcaacgcaaatttgacttttaagattgttttctttacatcttcgacgtttatttcatttctacatttacatttttacgattcgtaataaagcttttcatatgtatgttggcacattctagtcccgatttcgattaaccaaagaccttcttgagggcgggcctgcggtactcctgctcgacatactggggatgggtacggatgtactccaagctcctaaggatggcagctgggattgggggaggagtgggcaggagagctccctgtggctggtagccgttctcgtcggccacgtacgagatctggacgagctcaccctctggcgagtaccacgagaagcctccgttggcgtggtttccaccaattccggactcctgggcggcgatgccgttgctggtctcgtactggtagttgtagttgccctcgggctggatgtcggagccgatcttggtgatgtaggcaccagcttcctggttgtaggtggcggcaccgtaggcgcaggccaggacggcggaggcgacgagcatctagaagacaatgttattattgcaatttggtttttgatgaaatttccaatgtcttgaaaggccaattctatccatggtatctaagtccggtaactgttttctattttacttattttttgtgttaatccttatcgttagtataaactatttattatattggttaatattttgatatttttagtgtcactaattgtcgttttccactgctgtgctatagttatccttgcgatatacttacgtagcggaacatattggctgatttggaggagttcgtgtgtctgcgactaagagacgactctgaatgatgactctgtggcggggcagcaatgttttatacgaattctcgatacgaaacccgatccacccaaacaacttttacggcagacggcaggaaactcatatgaatgacaatggccaaactgagattgatcaaactggagcggcttaaaaaggtaaagagccaaaaaacgcacttaaatttggctcttaacttttgcataagtattcatctggcaagatagttatatttaacatcaaattatgcatatattaaaaaagtcatattcacatatattttaatagtatctaataagttttaattaagaattaacattttttaattgattaaattcaacaatcgatccttataaagtattatacgatttatttcaccaaattatggtacaaaatattaaagatgagataatcaactcgttatcattttgaaatgagcagattaattaaacagattaaaagggcagtttaataaactaaacccatgatactactggtaaaactctattttttaagtaagcaattgtttttgattagttatctaaaatatatttgttcattttaaaggccataaaaataaacagttcaacctgtgtcgcaataagggaacatattttatttaaataagtggtgtcaagtagatggtattggtcggaataagtactacagatcgttttatagggcaagtacccctataatttcaaggacttgatagttaatttctgctcgacaacggatggaaagtttgtggtatttaatttggttcttaaaatctgacatagaattgcctgtatattcgcactataaaacaaataggaaggtaaagtaagcatatccttaaaaaaatagttttaacaagaaaatttgagaaaattgaaatattaatataggtaataataaaggtgcaattgaaatatgtttgctacgtttcctcgtgggatcttaaaccatatttcatatattaagcacccattattctag

SEQ ID NO: 27488 - DNA, 536 bp, DROSOPHILA
cacgaactcctccaaatcagccaatatgttccgctacatgctcgtcgcctccgccgtcctggcctgcgcctacggtgccgccacctacaaccaggaagctggtgcctacatcaccaagatcggctccgacatccagcccgagggcaactacaactaccagtacgagaccagcaacggcatcgccgcccaggagtccggaattggtggaaaccacgccaacggaggcttctcgtggtactcgccagagggtgagctcgtccagatctcgtacgtggccgacgagaacggctaccagccacagggagctctcctgcccactcctcccccaatcccagctgccatccttaggagcttggagtacatccgtacccatccccagtatgtcgagcaggagtaccgcaggcccgccctcaagaaggtctttggttaatcgaaatcgggactagaatgtgccaacatacatatgaaaagctttattacgaatcgtaaaaatgtaaatgtagaaatgaaataaacgtcgaagatgtaaagaaaac

SEQ ID NO: 27489 - protein, 134 aa, DROSOPHILA
MFRYMLVASAVLACAYGAATYNQEAGAYITKIGSDIQPEGNYNYQYETSNGIAAQESGIGGNHANGGFSWYSPEGELVQISYVADENGYQPQGALLPTPPPIPAAILRSLEYIRTHPQYVEQEYRRPALKKVFG

SEQ ID NO: 27490 - DNA, 5755 bp, DROSOPHILA
gcagcaacgcaatgatcccagccatgtgggcagtgtccagatgcattctctggctagccaaaatcaggcgcctcagcagcagcagcagcagccactgcatcaggaacaacgaaatgcgcccaagcgctactccagcttgcgtcgctcacagcaggaggcatcacagcacttggctgagcagcagcaacagcagatgcagcagcagttgcatcttcaacagcaacagcagcagcaacaatcgcagatcatgattcaggacccccatgttctgatgcagatcgcctatcagcaacaggagctgcaggcccaactgcagaccatgcaacttggaccacctactgccgcaggagcagttccaacaccaccaaagccacatgccccgccggcagccgcatatccgcaagcacaggcggcaccgtactatgtgaccggaacggagccagttccagtgcccgttccccaggcaccgtatgttaatccggctagtgccgcttacttgccaaccactccggctgccgtggcgtacgcccaagcagggcctccggttgtaacacaacccacaccgccgcccgctcaggcgccgcccgcaacgcagccggctcagccgtatcagaactacaacacggtcggtggcacaacctactttgtaccgccggctcaaaccactagccgaccaagtgctctgccccagcgtcgtcccaccaacgcgattcccattctcccgccctccgaaaagcataaggtcaagggtggagcgaaggaggagggcatctcggacaacatagatcacatcattgacaacatgttcgtgcagcgaccttcggccttccaggctaccggcgaaggcgcaactccaggtgggggaacaaaggaagaggcggcagccactccaccggctgccgagcagaaccttcagccagttccggccactgggcaggaatgagtgcaggcgtacgccggcttgccgccacagcagcagcagagacgaggccaacggatagcgccgccgccctcctccggctactcaatgctgcagccgcacgctggctactatcgacctccgcccccgccgcactagtgcggacagcccagctcctaactcaactcatacgattttttttcccccattctgtccttgggtctgcgactcaaaaagtactgcataaataaagaaacgcagtgagaaccacttgtaattagcatttagctcccagataatcgaaattactaacgaaaagttttcgtatatagacgattatatatatatatattgtaatccggcgcaagctccaattaatttgtacgtagtatctagggccggctaacgtattgaagcggctgggcgcttagcttatttagccgcattttagaattgaaacacaagaattaccgagagaaatgtatttgcaaaaactaatcgatcattgaatttaaataaacgtttaacacgaagttacaaatgctgcacaccctttctgtcaaactacaaactaccaacgaagtctgcgttttcacttagtttccggtgaaaggtgggttgaactagggatccaatttcaaataaaaaatatttaaattcgactgttcgttaaaatctaggtaattgtgctaattgaaacaaaatggaaagaaaaaccaaaaatctactttctgattggaactaaaaatgagaactgaatttcaatgacgacataaagtaagattagatcttttcttaatactagatgagcttttcatagcttggattccttggccaattgttccaggagaacgctgatgcggcggaatgagtccttgaaaatgtcgttgaacttgcgagcgcttgtctttaggctatcccgataggcggtggtattaatgaacacactagaatgtacgaaattaaagaacaattcaagataatggaggagtgtctagcttacgcttccgaggtgatggagtaaaagacgccatagccatcgaagaccatgggcgccacgaaaccaacgttggccgtgaagcccagcgtgctggacgagagcacaaagttacctcctccgccgctcttggtgtacatcggatcgtcgtagaaggcgggaatgtccattttgctttcatacgccgcgcaccacaggccaaacaagtgcctatcgatgccgtgtcccttgcgcgcctcgttcatgaagtgcttgtgctcatcgactgccctacggaacgccctggccagtgacatatcgccaacctgcttgttggatgacgccctcaggaattcagccacagcggaagtgcatgatcgcagggtctctgttcgtccattgtagtactgtcgcatcagagcagtctcatatgtgggagcaattctgttggatatccatggagtgttgttagtgctgttttttttagtccagaggtgaactcactctttatgcatttggtagtaggcccactgcatgaccacctgaacaaaggagtctggatgcagtcgatgggttttcataaagtccttgccgtagtcatcgaacgcagtgaaggtcacagtaacgtcaataccctaaggataccacatacaaaaggattaactagttcaataacaggtttcggaaaaaggcgttttgcctaccctgtcatcaatatccttctgcacgcgcttgatctcgttcttgagcgtatcatccagctggaagtgcagctccttgacctccaaaacattgcctttttcggcctctgcccagtctggctctggcacctccaggaagctcagttgcatgaatgtggcgtaacttatgctgaccgtgccatcgtagcagctgtgctcacccgtccagttgcagcgtccgttgcggaaggcgatgatgctgctgctgcggtctgcccagcgggaatggagatcaccgtagagacccagctggcaggactcctcgtagtccttgggcgattgctcgtaccagcagatctccatacatgcgctctccaccagaagcagcgtctccttgtttgcaactgagatttccctcaaacggttgcggttgcgtgcccacgtggagcgttcgtcatggctcagggtgggcacacaatcgcccaacggctcgtagtcgaggatgctgcgcactctttgcagggccacgaggatttcgggagccgataggatagtgtcgtcctcgtgcacacaatcgaagatgaactgacgtcccttgccggaaataagcatgtgactcggcgttttgccctcatccttggtgagaaaatgcttctctatatgatcctgctcctcgcctggcacacggcacgtggagaagaagtgcttgtacagcgcggaggagtactttattttaccgccgttcgaggagagcggtttgatgctggactttctagtcagatcccaaaactccagcgagtggtgaatgtggcgcgccagactcttcgaaaattatacagtcaattaggcaatcttaaactttgtgttcttatagagcttggggtgtgggtccactcaccttcagcatgtactccggtgtctccggcacgcccaccatttccaattgcgagggcatgaccatgagctggtagggcagcagcggcatccgaatcaggtgatatccgtagtcctcccaccaggtgcccagccagttcctcatgccggccgcccgcttcttgagctgttcgtgcagctgggctcccactccgttttggaactcatcaatagtcttgcgggcctgggccaactcctccttggtcccgaatggctggatgcagctgtagtagcgctccatggtgtccctaagctccggcagcgggagcgaaggtaaggtctcgtcgaagtcgaaggtgttcttatcatccttgctcataaaatatagactagcccggtccatggtggtttagctgcgggggacacgttggaatcgttgatatcagtctgcgcgtgtggtggttttctataggcctaagtcagattagtacaataatcatatcgggaatcgcttttacgttcgtcaggtccaaagttcacccaatacattactgagtacattcacatcggaaataaattgatctcatcttataggttaaacattaaaatggtgtgcaaattaataccacacaactaagaacacttaatgtgcaactaagcggattatgcgtcaagttgaacgtaatctttcttggactgcagctagacgactatcttcactaatctcctcaagctggacaaagtccggattggggagctttataaatatttatactcccggcgcactggtgaaatcataggcgaatttctagcccactgacctttgtactcgatggggaattcacttttgccggagacaactgaagcgccagactgccgttatacgactgaatccataggttggttccatatcacagcaaaccttgccggagggggagcacttgaattatcgcaccgtgggatccgccacccgcgtccactgactcagtgcgataatatatcaccctaatcattgctattgcagacagtcggccaccgataatggccggtttcatttgaatttctatatgaatttcttttttaataacatattccagcagacacacccacacaaaccttcgatgaggcggcagttgaatgtcgcgcccgaacttcagtttgcgatgcactcgatcgaaattaaaacggttccgcagctatcaagttcattaggctagataagcaaacaattttataggttaaacaattatttttattattatactgctgcgtttttgtttacaagcggcgaagaccctataggaaattggcacagcaaacagctgtttgcaggagttgccagactttttacaccatttgtttataccgttagtcaccacattcttattacgtacatcttattcttattaacatcgcatagcattgtacatcgtaccgcaagatataatcctcccggattgatgcaatcaactgccataaacgtacattgtaaccgttaacaaaatgcgaatattgtttacaattattaattaaataggtcattcaatgttttgtaaatatttaaaacttatttaaatttatttaatttaattccttagcatccattcatagcatccatgctgacgcctatctggcaacgccgccagcagctgaaacagctgacatctgtcgaaatgagtgaaagagacaggcagaaagaatagaaagaaatttgggacgcttgttttctcaagcggctttattaaatttctaatcccagcaagaggtggaaatgctgccatccacgggtctctttaagggcttcttgtgcccttactttgacggccaggatgcggcgtcctgcaagcgccccttttgccactttaagcatgctcgcaaaggtgagtgaattacgtccagttaatttcgcaacaaattctatccactctcggtttacagacgaattggaggccgctccacctgcagaaccttcccccgtgcccaagtacaagccggcacccaagttgctctcccttccactgccccagatcacgctatgtgcgccccggaagaagtccaatctggagtaccacccggagaagccggctcttgacgcatcgccggctaagaagaagcaggaggcgtccgtggacagtgctcccaaatatgtgcccggccagccatctgttacaaatggcgaagaatatgacgattggcaggcggtactcgaaaaggaaattgatgagcagatgcaggtggagattgaggagcaagtccagaataacgacgaagaacagaagatagatacggtagctgaaaacgaggagg

SEQ ID NO: 27491 - DNA, 2791 bp, DROSOPHILA
atttcctatagggtcttcgccgcttgtaaacaaaaacgcagcagtataataataaaaataattgtttaacctataaaattgtttgcttatctagcctaatgaacttgatagctgcggaaccgttttaatttcgatcgagtgcatcgcaaactgaagttcgggcgcgacattcaactgccgcctcatcgaagctaaaccaccatggaccgggctagtctatattttatgagcaaggatgataagaacaccttcgacttcgacgagaccttaccttcgctcccgctgccggagcttagggacaccatggagcgctactacagctgcatccagccattcgggaccaaggaggagttggcccaggcccgcaagactattgatgagttccaaaacggagtgggagcccagctgcacgaacagctcaagaagcgggcggccggcatgaggaactggctgggcacctggtgggaggactacggatatcacctgattcggatgccgctgctgccctaccagctcatggtcatgccctcgcaattggaaatggtgggcgtgccggagacaccggagtacatgctgaagagtctggcgcgccacattcaccactcgctggagttttgggatctgactagaaagtccagcatcaaaccgctctcctcgaacggcggtaaaataaagtactcctccgcgctgtacaagcacttcttctccacgtgccgtgtgccaggcgaggagcaggatcatatagagaagcattttctcaccaaggatgagggcaaaacgccgagtcacatgcttatttccggcaagggacgtcagttcatcttcgattgtgtgcacgaggacgacactatcctatcggctcccgaaatcctcgtggccctgcaaagagtgcgcagcatcctcgactacgagccgttgggcgattgtgtgcccaccctgagccatgacgaacgctccacgtgggcacgcaaccgcaaccgtttgagggaaatctcagttgcaaacaaggagacgctgcttctggtggagagcgcatgtatggagatctgctggtacgagcaatcgcccaaggactacgaggagtcctgccagctgggtctctacggtgatctccattcccgctgggcagaccgcagcagcagcatcatcgccttccgcaacggacgctgcaactggacgggtgagcacagctgctacgatggcacggtcagcataagttacgccacattcatgcaactgagcttcctggaggtgccagagccagactgggcagaggccgaaaaaggcaatgttttggaggtcaaggagctgcacttccagctggatgatacgctcaagaacgagatcaagcgcgtgcagaaggatattgatgacaggggtattgacgttactgtgaccttcactgcgttcgatgactacggcaaggactttatgaaaacccatcgactgcatccagactcctttgttcaggtggtcatgcagtgggcctactaccaaatgcataaagaaattgctcccacatatgagactgctctgatgcgacagtactacaatggacgaacagagaccctgcgatcatgcacttccgctgtggctgaattcctgagggcgtcatccaacaagcaggttggcgatatgtcactggccagggcgttccgtagggcagtcgatgagcacaagcacttcatgaacgaggcgcgcaagggacacggcatcgataggcacttgtttggcctgtggtgcgcggcgtatgaaagcaaaatggacattcccgccttctacgacgatccgatgtacaccaagagcggcggaggaggtaactttgtgctctcgtccagcacgctgggcttcacggccaacgttggtttcgtggcgcccatggtcttcgatggctatggcgtcttttactccatcacctcggaagctgtgttcattaataccaccgcctatcgggatagcctaaagacaagcgctcgcaagttcaacgacattttcaaggactcattccgccgcatcagcgttctcctggaacaattggccaaggaatccaagctatgaaaagctcatctagtattaagaaaagatctaatcttactttatgtcgtcattgaaattcagttctcatttttagttccaatcagaaagtagatttttggtttttctttccattttgtttcaattagcacaattacctagattttaacgaacagtcgaatttaaatattttttatttgaaattggatccctagttcaacccacctttcaccggaaactaagtgaaaacgcagacttcgttggtagtttgtagtttgacagaaagggtgtgcagcatttgtaacttcgtgttaaacgtttatttaaattcaatgatcgattagtttttgcaaatacatttctctcggtaattcttgtgtttcaattctaaaatgcggctaaataagctaagcgcccagccgcttcaatacgttagccggccctagatactacgtacaaattaattggagcttgcgccggattacaatatatatatatataatcgtctatatacgaaaacttttcgttagtaatttcgattatctgggagctaaatgctaattacaagtggttctcactgcgtttctttatttatgcagtactttttgagtcgcagacccaaggacagaatgggggaaaaaaaatcgtatgagttgagttaggagctgggctgtccgcactagtgcggcgggggcggaggtcgatagtagccagcgtgcggctgcagcattgagtagccggaggagggcggcggcgc

SEQ ID NO: 27492 - protein, 618 aa, DROSOPHILA
MDRASLYFMSKDDKNTFDFDETLPSLPLPELRDTMERYYSCIQPFGTKEELAQARKTIDEFQNGVGAQLHEQLKKRAAGMRNWLGTWWEDYGYHLIRMPLLPYQLMVMPSQLEMVGVPETPEYMLKSLARHIHHSLEFWDLTRKSSIKPLSSNGGKIKYSSALYKHFFSTCRVPGEEQDHIEKHFLTKDEGKTPSHMLISGKGRQFIFDCVHEDDTILSAPEILVALQRVRSILDYEPLGDCVPTLSHDERSTWARNRNRLREISVANKETLLLVESACMEICWYEQSPKDYEESCQLGLYGDLHSRWADRSSSIIAFRNGRCNWTGEHSCYDGTVSISYATFMQLSFLEVPEPDWAEAEKGNVLEVKELHFQLDDTLKNEIKRVQKDIDDRGIDVTVTFTAFDDYGKDFMKTHRLHPDSFVQVVMQWAYYQMHKEIAPTYETALMRQYYNGRTETLRSCTSAVAEFLRASSNKQVGDMSLARAFRRAVDEHKHFMNEARKGHGIDRHLFGLWCAAYESKMDIPAFYDDPMYTKSGGGGNFVLSSSTLGFTANVGFVAPMVFDGYGVFYSITSEAVFINTTAYRDSLKTSARKFNDIFKDSFRRISVLLEQLAKESKL

SEQ ID NO: 27493 - DNA, 5661 bp, DROSOPHILA
gcagcaacgcaatgatcccagccatgtgggcagtgtccagatgcattctctggctagccaaaatcaggcgcctcagcagcagcagcagcagccactgcatcaggaacaacgaaatgcgcccaagcgctactccagcttgcgtcgctcacagcaggaggcatcacagcacttggctgagcagcagcaacagcagatgcagcagcagttgcatcttcaacagcaacagcagcagcaacaatcgcagatcatgattcaggacccccatgttctgatgcagatcgcctatcagcaacaggagctgcaggcccaactgcagaccatgcaacttggaccacctactgccgcaggagcagttccaacaccaccaaagccacatgccccgccggcagccgcatatccgcaagcacaggcggcaccgtactatgtgaccggaacggagccagttccagtgcccgttccccaggcaccgtatgttaatccggctagtgccgcttacttgccaaccactccggctgccgtggcgtacgcccaagcagggcctccggttgtaacacaacccacaccgccgcccgctcaggcgccgcccgcaacgcagccggctcagccgtatcagaactacaacacggtcggtggcacaacctactttgtaccgccggctcaaaccactagccgaccaagtgctctgccccagcgtcgtcccaccaacgcgattcccattctcccgccctccgaaaagcataaggtcaagggtggagcgaaggaggagggcatctcggacaacatagatcacatcattgacaacatgttcgtgcagcgaccttcggccttccaggctaccggcgaaggcgcaactccaggtgggggaacaaaggaagaggcggcagccactccaccggctgccgagcagaaccttcagccagttccggccactgggcaggaatgagtgcaggcgtacgccggcttgccgccacagcagcagcagagacgaggccaacggatagcgccgccgccctcctccggctactcaatgctgcagccgcacgctggctactatcgacctccgcccccgccgcactagtgcggacagcccagctcctaactcaactcatacgattttttttcccccattctgtccttgggtctgcgactcaaaaagtactgcataaataaagaaacgcagtgagaaccacttgtaattagcatttagctcccagataatcgaaattactaacgaaaagttttcgtatatagacgattatatatatatatattgtaatccggcgcaagctccaattaatttgtacgtagtatctagggccggctaacgtattgaagcggctgggcgcttagcttatttagccgcattttagaattgaaacacaagaattaccgagagaaatgtatttgcaaaaactaatcgatcattgaatttaaataaacgtttaacacgaagttacaaatgctgcacaccctttctgtcaaactacaaactaccaacgaagtctgcgttttcacttagtttccggtgaaaggtgggttgaactagggatccaatttcaaataaaaaatatttaaattcgactgttcgttaaaatctaggtaattgtgctaattgaaacaaaatggaaagaaaaaccaaaaatctactttctgattggaactaaaaatgagaactgaatttcaatgacgacataaagtaagattagatcttttcttaatactagatgagcttttcatagcttggattccttggccaattgttccaggagaacgctgatgcggcggaatgagtccttgaaaatgtcgttgaacttgcgagcgcttgtctttaggctatcccgataggcggtggtattaatgaacacactagaatgtacgaaattaaagaacaattcaagataatggaggagtgtctagcttacgcttccgaggtgatggagtaaaagacgccatagccatcgaagaccatgggcgccacgaaaccaacgttggccgtgaagcccagcgtgctggacgagagcacaaagttacctcctccgccgctcttggtgtacatcggatcgtcgtagaaggcgggaatgtccattttgctttcatacgccgcgcaccacaggccaaacaagtgcctatcgatgccgtgtcccttgcgcgcctcgttcatgaagtgcttgtgctcatcgactgccctacggaacgccctggccagtgacatatcgccaacctgcttgttggatgacgccctcaggaattcagccacagcggaagtgcatgatcgcagggtctctgttcgtccattgtagtactgtcgcatcagagcagtctcatatgtgggagcaattctgttggatatccatggagtgttgttagtgctgttttttttagtccagaggtgaactcactctttatgcatttggtagtaggcccactgcatgaccacctgaacaaaggagtctggatgcagtcgatgggttttcataaagtccttgccgtagtcatcgaacgcagtgaaggtcacagtaacgtcaataccctaaggataccacatacaaaaggattaactagttcaataacaggtttcggaaaaaggcgttttgcctaccctgtcatcaatatccttctgcacgcgcttgatctcgttcttgagcgtatcatccagctggaagtgcagctccttgacctccaaaacattgcctttttcggcctctgcccagtctggctctggcacctccaggaagctcagttgcatgaatgtggcgtaacttatgctgaccgtgccatcgtagcagctgtgctcacccgtccagttgcagcgtccgttgcggaaggcgatgatgctgctgctgcggtctgcccagcgggaatggagatcaccgtagagacccagctggcaggactcctcgtagtccttgggcgattgctcgtaccagcagatctccatacatgcgctctccaccagaagcagcgtctccttgtttgcaactgagatttccctcaaacggttgcggttgcgtgcccacgtggagcgttcgtcatggctcagggtgggcacacaatcgcccaacggctcgtagtcgaggatgctgcgcactctttgcagggccacgaggatttcgggagccgataggatagtgtcgtcctcgtgcacacaatcgaagatgaactgacgtcccttgccggaaataagcatgtgactcggcgttttgccctcatccttggtgagaaaatgcttctctatatgatcctgctcctcgcctggcacacggcacgtggagaagaagtgcttgtacagcgcggaggagtactttattttaccgccgttcgaggagagcggtttgatgctggactttctagtcagatcccaaaactccagcgagtggtgaatgtggcgcgccagactcttcgaaaattatacagtcaattaggcaatcttaaactttgtgttcttatagagcttggggtgtgggtccactcaccttcagcatgtactccggtgtctccggcacgcccaccatttccaattgcgagggcatgaccatgagctggtagggcagcagcggcatccgaatcaggtgatatccgtagtcctcccaccaggtgcccagccagttcctcatgccggccgcccgcttcttgagctgttcgtgcagctgggctcccactccgttttggaactcatcaatagtcttgcgggcctgggccaactcctccttggtcccgaatggctggatgcagctgtagtagcgctccatggtgtccctaagctccggcagcgggagcgaaggtaaggtctcgtcgaagtcgaaggtgttcttatcatccttgctcataaaatatagactagcccggtccatggtggtttagctgcgggggacacgttggaatcgttgatatcagtctgcgcgtgtggtggttttctataggcctaagtcagattagtacaataatcatatcgggaatcgcttttacgttcgtcaggtccaaagttcacccaatacattactgagtacattcacatcggaaataaattgatctcatcttataggttaaacattaaaatggtgtgcaaattaataccacacaactaagaacacttaatgtgcaactaagcggattatgcgtcaagttgaacgtaatctttcttggactgcagctagacgactatcttcactaatctcctcaagctggacaaagtccggattggggagctttataaatatttatactcccggcgcactggtgaaatcataggcgaatttctagcccactgacctttgtactcgatggggaattcacttttgccggagacaactgaagcgccagactgccgttatacgactgaatccataggttggttccatatcacagcaaaccttgccggagggggagcacttgaattatcgcaccgtgggatccgccacccgcgtccactgactcagtgcgataatatatcaccctaatcattgctattgcagacagtcggccaccgataatggccggtttcatttgaatttctatatgaatttcttttttaataacatattccagcagacacacccacacaaaccttcgatgaggcggcagttgaatgtcgcgcccgaacttcagtttgcgatgcactcgatcgaaattaaaacggttccgcagctatcaagttcattaggctagataagcaaacaattttataggttaaacaattatttttattattatactgctgcgtttttgtttacaagcggcgaagaccctataggaaattggcacagcaaacagctgtttgcaggagttgccagactttttacaccatttgtttataccgttagtcaccacattcttattacgtacatcttattcttattaacatcgcatagcattgtacatcgtaccgcaagatataatcctcccggattgatgcaatcaactgccataaacgtacattgtaaccgttaacaaaatgcgaatattgtttacaattattaattaaataggtcattcaatgttttgtaaatatttaaaacttatttaaatttatttaatttaattccttagcatccattcatagcatccatgctgacgcctatctggcaacgccgccagcagctgaaacagctgacatctgtcgaaatgagtgaaagagacaggcagaaagaatagaaagaaatttgggacgcttgttttctcaagcggctttattaaatttctaatcccagcaagaggtggaaatgctgccatccacgggtctctttaagggcttcttgtgcccttactttgacggccaggatgcggcgtcctgcaagcgccccttttgccactttaagcatgctcgcaaaggtgagtgaattacgtccagttaatttcgcaacaaattctatccactctcggtttacagacgaattggaggccgctccacctgcagaaccttcccccgtgcccaagtacaagccggcacccaagttgctctcccttccactgccccagatcacgctatgtgcgccccggaagaagtccaatctggagtaccacccggagaagccggctcttgacgcatcgccggctaagaagaagcaggaggcgtccgtggacagtgctcccaaatatgtgcccggccagccatctgttacaaatggcgaagaatatgacgattggcaggcggtactcgaaaag

SEQ ID NO: 27494 - DNA, 3095 bp, DROSOPHILA
cctaatgaacttgatagctgcggaaccgttttaatttcgatcgagtgcatcgcaaactgaagttcgggcgcgacattcaactgccgcctcatcgaagaaattcaaatgaaaccggccattatcggtggccgactgtctgcaatagcaatgattagggtgatatattatcgcactgagtcagtggacgcgggtggcggatcccacggtgcgataattcaagtgctccccctccggcaaggtttgctgtgatatggaaccaacctatggattcagtcgtataacggcagtctggcgcttcagttgtctccggcaaaagtgaattccccatcgagtacaaaggtcagtgggctagaaattcgcctatgatttcaccagtgcgccgggagtataaatatttataaagctccccaatccggactttgtccagcttgaggagattagtgaagatagtcgtctagctgcagtccaagaaagattacgttcaacttgacgcataatccgcttagttgcacattaagtgttcttagttatgagcaaggatgataagaacaccttcgacttcgacgagaccttaccttcgctcccgctgccggagcttagggacaccatggagcgctactacagctgcatccagccattcgggaccaaggaggagttggcccaggcccgcaagactattgatgagttccaaaacggagtgggagcccagctgcacgaacagctcaagaagcgggcggccggcatgaggaactggctgggcacctggtgggaggactacggatatcacctgattcggatgccgctgctgccctaccagctcatggtcatgccctcgcaattggaaatggtgggcgtgccggagacaccggagtacatgctgaagagtctggcgcgccacattcaccactcgctggagttttgggatctgactagaaagtccagcatcaaaccgctctcctcgaacggcggtaaaataaagtactcctccgcgctgtacaagcacttcttctccacgtgccgtgtgccaggcgaggagcaggatcatatagagaagcattttctcaccaaggatgagggcaaaacgccgagtcacatgcttatttccggcaagggacgtcagttcatcttcgattgtgtgcacgaggacgacactatcctatcggctcccgaaatcctcgtggccctgcaaagagtgcgcagcatcctcgactacgagccgttgggcgattgtgtgcccaccctgagccatgacgaacgctccacgtgggcacgcaaccgcaaccgtttgagggaaatctcagttgcaaacaaggagacgctgcttctggtggagagcgcatgtatggagatctgctggtacgagcaatcgcccaaggactacgaggagtcctgccagctgggtctctacggtgatctccattcccgctgggcagaccgcagcagcagcatcatcgccttccgcaacggacgctgcaactggacgggtgagcacagctgctacgatggcacggtcagcataagttacgccacattcatgcaactgagcttcctggaggtgccagagccagactgggcagaggccgaaaaaggcaatgttttggaggtcaaggagctgcacttccagctggatgatacgctcaagaacgagatcaagcgcgtgcagaaggatattgatgacaggggtattgacgttactgtgaccttcactgcgttcgatgactacggcaaggactttatgaaaacccatcgactgcatccagactcctttgttcaggtggtcatgcagtgggcctactaccaaatgcataaagaaattgctcccacatatgagactgctctgatgcgacagtactacaatggacgaacagagaccctgcgatcatgcacttccgctgtggctgaattcctgagggcgtcatccaacaagcaggttggcgatatgtcactggccagggcgttccgtagggcagtcgatgagcacaagcacttcatgaacgaggcgcgcaagggacacggcatcgataggcacttgtttggcctgtggtgcgcggcgtatgaaagcaaaatggacattcccgccttctacgacgatccgatgtacaccaagagcggcggaggaggtaactttgtgctctcgtccagcacgctgggcttcacggccaacgttggtttcgtggcgcccatggtcttcgatggctatggcgtcttttactccatcacctcggaagctgtgttcattaataccaccgcctatcgggatagcctaaagacaagcgctcgcaagttcaacgacattttcaaggactcattccgccgcatcagcgttctcctggaacaattggccaaggaatccaagctatgaaaagctcatctagtattaagaaaagatctaatcttactttatgtcgtcattgaaattcagttctcatttttagttccaatcagaaagtagatttttggtttttctttccattttgtttcaattagcacaattacctagattttaacgaacagtcgaatttaaatattttttatttgaaattggatccctagttcaacccacctttcaccggaaactaagtgaaaacgcagacttcgttggtagtttgtagtttgacagaaagggtgtgcagcatttgtaacttcgtgttaaacgtttatttaaattcaatgatcgattagtttttgcaaatacatttctctcggtaattcttgtgtttcaattctaaaatgcggctaaataagctaagcgcccagccgcttcaatacgttagccggccctagatactacgtacaaattaattggagcttgcgccggattacaatatatatatatataatcgtctatatacgaaaacttttcgttagtaatttcgattatctgggagctaaatgctaattacaagtggttctcactgcgtttctttatttatgcagtactttttgagtcgcagacccaaggacagaatgggggaaaaaaaatcgtatgagttgagttaggagctgggctgtccgcactagtgcggcgggggcggaggtcgatagtagccagcgtgcggctgcagcattgagtagccggaggagggcggcggcgc

SEQ ID NO: 27495 - protein, 610 aa, DROSOPHILA
MSKDDKNTFDFDETLPSLPLPELRDTMERYYSCIQPFGTKEELAQARKTIDEFQNGVGAQLHEQLKKRAAGMRNWLGTWWEDYGYHLIRMPLLPYQLMVMPSQLEMVGVPETPEYMLKSLARHIHHSLEFWDLTRKSSIKPLSSNGGKIKYSSALYKHFFSTCRVPGEEQDHIEKHFLTKDEGKTPSHMLISGKGRQFIFDCVHEDDTILSAPEILVALQRVRSILDYEPLGDCVPTLSHDERSTWARNRNRLREISVANKETLLLVESACMEICWYEQSPKDYEESCQLGLYGDLHSRWADRSSSIIAFRNGRCNWTGEHSCYDGTVSISYATFMQLSFLEVPEPDWAEAEKGNVLEVKELHFQLDDTLKNEIKRVQKDIDDRGIDVTVTFTAFDDYGKDFMKTHRLHPDSFVQVVMQWAYYQMHKEIAPTYETALMRQYYNGRTETLRSCTSAVAEFLRASSNKQVGDMSLARAFRRAVDEHKHFMNEARKGHGIDRHLFGLWCAAYESKMDIPAFYDDPMYTKSGGGGNFVLSSSTLGFTANVGFVAPMVFDGYGVFYSITSEAVFINTTAYRDSLKTSARKFNDIFKDSFRRISVLLEQLAKESKL

SEQ ID NO: 27496 - DNA, 6416 bp, DROSOPHILA; identical to SEQ ID NO: 17620

SEQ ID NO: 27497 - DNA, 3332 bp, DROSOPHILA
atgaaccagcaggcgggctcctcaagggcgccagccaccgggggccaaatctcaccgccaggtgccacaacagtcggcgtggagcagcagcaacacttgcaacagcagcaccagcaacagtactacaaccagcagcaacagcagcagcagcaacagtaccagcagcagcatcagcgcgacaacttcctagcctaccagcaacagcagcaacagcagcagcagcaacagcagcagctccagcgatcgggaggcggcggtggtaactttatgctgggcaatgaccttgtcggcggcgacagcctgcgcagcctgaacaacaccttcggtcccaactcagagttcacgtcgctcggcggcgccaacagttcggcatcctcctcgctgagcggattgagcagttcgagcagtcaaggatacacgggcatggttgctgccagccagcaacaccagcagcaacagccacatcaccaccaacagcagcagcagcagcagcagcagcagcacatgggcagcatggatgccatgggcggttacagtcagatgggtggcggcatgcaccctggacccaacagcggcatgatgggcaacatgaatggccagtacatgaacggcggctccggccagggtggctacaatggagcccagggcatgggcatgggctatggcggaggtggcagcatgggaccccagaggcatcatcaaatgacgcccatgaaccagatgcagaatatgtcgatgggcccgggagtcggaggaagtggcggcatgggcggcggcatgaatcccctccagcaacaggcggcgcagcagcaaatgggcggcatgaatccgatggccaagatgcagggcatggccaatggtggatatccgcagcaggcgccacccagtctcacccagcaacagcagcaacagcagcagcgacgaatggccccatatccccacccccagatgcacatggcccagaagcgggcggcggccggtgtggggggagcgggcggaatgtacccgggtaatcccatgcagcagcagcaggcgcagatgtacggaaatcagcagatgcatccgggttccggcggaggcgttccactgcccatgcaggcgggtggagcaggaaatggttacggacgcagtggacccatgggcgtcggcaatggaggctacggccgtatgtcggcgggcaatggcatgggcccgaccggaggaccagtgatgggacctatgggtcccggtggcatgaccgccgggggaatgggtcccggaccaggctgcatgagccagcagcgcttcatgccccaaggatccggtggcggcatgcccggagtgggctatggtggagtcggaggagccgcttcccatcagggtcagttctatccgggcagtggccaaagtgctggaatgcagcaggcaggtggcatgtgcccggcgggtccgggcgccgtcgccaccaccggcaatccctaccagaatcaaggtttccagcaaaactatcagcacagtccagttcctggcaatcccacgccaccgctgacgcccgcctgcagtgtgccctatgttagccccaatccggatatcaagccacctatggacaacagcgaagaaatgagactgacattcccggtgcgcgacggcatcatcctggctcctttccgcctgctgcacaacctgtcggtcagcaaccatgtattccatctcaagcagaatgtctacaacaccctgatgtgcagaaacgatttggagctgcagctgaagtgcttccaccaggacgaccggcagatgaacaccaattggccgcataccgtcaccgtctccgcgaatgccacgcccctgaacatcgagcggtccgagaagaacagcaccgccctacgaccgctctacttgaaggcggtgtgccaaccgggaaggaatacgcttcagctgaccgccagttcctgctgttgttcgcacctgttcgtgctgcagctagtccatcgaccatcggtgcgccaggtgctgcagacgctgcacaagcgcaatctgctgccactggagcacagtgtgcagaagatcaagcgcaatctgagccagccggaggcgaatgccgggccagatgccacgccccagcagcagcagcagcagggcggcgggcagcagtgcgccaagatctcattgaagtgccccatcaccaagtcccggatacgactaccagcgcggggacacgagtgcaagcatgtgcagtgcttcgatttggaggcgtatctgatgatcaacagcgagcgtggatcgtggcgatgcccggagtgcagcaagtcggcgatcaccgataccctggagatcgatcagtacatctgggccatactcaacacgctgggcaactcggatgtggacgaggtgatcatcgattcatcggccaattggcgggcgctgcagcacaatggcggcatgccaaatgcaccgcccccctcgaatgttcctagcaatcccagtggcggcagcggctccaattccggcaacggaagtgtcaaccccaccctgccggtcatcaaacaggaactgtgcgacgacatcgccaaggtcatgtcgccgggatccacccaattgcccacttgggacagtgcgcaggccatgagtccctacaatatgcacgacatgaactccattgccagcggcaacatgatgggcaatggcggcaacaccaaccagcatggcaatcgcagcagctacgacggcttcagtggcaaccacagcgatggaagtggcggattacctggcggcgatggaggtgtcaactccctcgaccagctgaacgccatggagaagtcactcagcgatcagatgccccacaccccgcacactcctggagcggccagtcatccgatgacacctggcggaccgcccagtgtcagcagctcccacaacgaaccgatcagcggcggtacgcccaatgccaacggaagcggaagtgccaccaacggaagcggcaacaacaacagcagcacgggccacaactcgccccaaacgccgggcacgcccagtcggatgggcggcggcatgggcggatcaggctcagcggatagccaacagcagcagcaggagcagctcctcaactccctgatgagcagtcagacccagctgaagttcagcgaaagcgatctgagtgccgagctgcagagcttcgatgcggcggcagcggccataaacgatacagcccacgatctgaatctgctgcaagatgtggatcccatggagattctgtcctatctggatcctcagcccgatcttaacacgccgccctcgagtggcagcagcaacaacaacgccagcgacgacttgctggccacgttattcgactaggc

SEQ ID NO: 27498 - protein, 1109 aa, DROSOPHILA
MNQQAGSSRAPATGGQISPPGATTVGVEQQQHLQQQHQQQYYNQQQQQQQQQYQQQHQRDNFLAYQQQQQQQQQQQQQLQRSGGGGGNFMLGNDLVGGDSLRSLNNTFGPNSEFTSLGGANSSASSSLSGLSSSSSQGYTGMVAASQQHQQQQPHHHQQQQQQQQQQHMGSMDAMGGYSQMGGGMHPGPNSGMMGNMNGQYMNGGSGQGGYNGAQGMGMGYGGGGSMGPQRHHQMTPMNQMQNMSMGPGVGGSGGMGGGMNPLQQQAAQQQMGGMNPMAKMQGMANGGYPQQAPPSLTQQQQQQQQRRMAPYPHPQMHMAQKRAAAGVGGAGGMYPGNPMQQQQAQMYGNQQMHPGSGGGVPLPMQAGGAGNGYGRSGPMGVGNGGYGRMSAGNGMGPTGGPVMGPMGPGGMTAGGMGPGPGCMSQQRFMPQGSGGGMPGVGYGGVGGAASHQGQFYPGSGQSAGMQQAGGMCPAGPGAVATTGNPYQNQGFQQNYQHSPVPGNPTPPLTPACSVPYVSPNPDIKPPMDNSEEMRLTFPVRDGIILAPFRLLHNLSVSNHVFHLKQNVYNTLMCRNDLELQLKCFHQDDRQMNTNWPHTVTVSANATPLNIERSEKNSTALRPLYLKAVCQPGRNTLQLTASSCCCSHLFVLQLVHRPSVRQVLQTLHKRNLLPLEHSVQKIKRNLSQPEANAGPDATPQQQQQQGGGQQCAKISLKCPITKSRIRLPARGHECKHVQCFDLEAYLMINSERGSWRCPECSKSAITDTLEIDQYIWAILNTLGNSDVDEVIIDSSANWRALQHNGGMPNAPPPSNVPSNPSGGSGSNSGNGSVNPTLPVIKQELCDDIAKVMSPGSTQLPTWDSAQAMSPYNMHDMNSIASGNMMGNGGNTNQHGNRSSYDGFSGNHSDGSGGLPGGDGGVNSLDQLNAMEKSLSDQMPHTPHTPGAASHPMTPGGPPSVSSSHNEPISGGTPNANGSGSATNGSGNNNSSTGHNSPQTPGTPSRMGGGMGGSGSADSQQQQQEQLLNSLMSSQTQLKFSESDLSAELQSFDAAAAAINDTAHDLNLLQDVDPMEILSYLDPQPDLNTPPSSGSSNNNASDDLLATLFD

SEQ ID NO: 27499 - DNA, 13279 bp, DROSOPHILA
tgtaagtaatgtatgtaacaacaacaaacaacatgcacaaataaatgtaaatgtgtaggtgtgtggagcgatttaataacagggcacagtgttgcgttttgaaacatcgacagctatttttttgtcttgctttttcgcactcgttttcattccaatttttgcgcgacttccaattggaatattggaatatttctgagagagaaattaaaaagagaacgtaaaaccataacataactggacccaacttagatctgggttttccattgattacccatttacccgatatatttgactttattggtcaacgatgtgacgctgtggactcctgactaatcatcacacgggtaatgcattagaaagtctatatatatataagagaataaaagtcaacatgtgaagactattcaaaaactaagcttgtagatttggatcagcttagagcctgtattagtgaaaatcaaactactttaatttaaaacgtacaaatggtaatcaccttaattagtgatttaatgcatataacaatttaaaagctacattaattaagctggttaatatgataataagcgcttaagccgaactctgctgaaaagctggcttcttttttccaataactgacttttggataagctgagacttaactttaaaatgacaaagatatctctcaaattaccctttaagcgtagcttaaatcgctgatctatcaataactacgaaagaaacccccatagaccataaaataaatgatttcaataataggaaaatgctgagctaaacaaatttttctgagtgttcctaagcctatcttacgacgaccggcatgctcacggtgccaccactagccgcccaaaaacgttctgctcttctcccgctctcgcgcgctcccacacacacgtgtgcagcggaccctacacctacgtcgcggcacaccaacacacagaacgcgggcggttgaagcggcagagctatcgccaagtaaattcagtcgcgcatttcaccgtttccgaatcggacgaaccgggcgtgcttgctctcctgctgctttcgagatcggagtcccgataaggatataactacaacctaaagaggaatccaagcctcctcctgccgctagtttcgaaaagtaaatagagtacttgttatcaactgggaagcggagatacatagctccgatattcctgttaaagccagacaaacggataccaacaaacaatcgccatgtgcgtcgtcgtcccttctcgtttcacacatcgtgcgataaaaataccgctttgctttttgtgtttatttaaaaattttggttaggaagtgaactcgaactcgtgacgtttgcattttcacaacaacaaaaagagcaaaacatagcagaagaaccccagaagaaacaggaacagaaaccgttgaccgagtgccagtgtgaaggtctaggcacaaagaaccgctaccaagaatctcttgggagtagggaggctctttacaatgacaacattgcaccaaagatggactctctctctaaaatgcatttcataccaatatttacttttccgctgagcactggcatctggttctttgttccaacggacttatcgatcctccgttccatttcttcgatcttcttcgcgatccaagtgcacctgatgcagtacagttctttcacgataagtcacacttcaattacgatctcggtgtattgaccaaaatcaatattttccaatctatcttcgaaaaggaattgttcaaagcgattaataaatatttgtgaaataaattttaaaaatatcactttccaatgtaacaaatattgccactttttgaagaaattcttgaattttgtgcatatgtatgtatgtttgcagagcacatatttatgcactagtagtgcgcttcctgttctatttttgttgaactgacgcagcattttccatctaaagttttccaaaataatgtttactattttttcatgtatttatttgtcttaagacgtgcacaattttactatttcgttagtgaaagttctgtaggaatatttcattttctcttcatttaaaataattatttcatgcatgactaaacggattgctttgtggtggcatttaataagaattaacctaagaatattgggaaattttacaggtttacccataaaaaactcataaattcgtatatattaattggtatataaatcatatgaataatatcagtcgacagcccaatcattttaaagtaccaagcgaatacgagtttttaattgcagttcattagcaacaattcatttttggttatattttataaattgctatagcgatcatgctattgtataatgcatcatgattttcgatcagatcatttcttatcaatagagtagcacgcattgctctaatcaatggaatttcggacagaccgcatgtctggttagcattgaattttaaacattcatacatacgagtatgtatcaggtgacaccgtttatataatatacatatataaatacttttcctcaatggatctgatttactagctatgtaaataagtgccagtgtttttaaatttgcgctgaagcatttaactttatggtttcatttgtgaaaccatagcagctgttttcttcgaaagttgtgcgaactgggcaataatttattgtataaacaatcttagcagctgtcattacataataattaattttttgtacatatctcaatttttatttttactcagaacttaacaaatcaaagttgtcttatctcccagtgcggtttgaaggtctagagtactcgataaggaaacaacaaacaaatagtaaaacaatgttatagaatacaaaaaaaaagtagcttgacaattacaaaccagttgggccagttttcaaatgtaactaatcaggtgaacttgaacaaaacactgcaagtatttacctttttcacttttcgaataaacgcctatgtttcatgtttaagttgatgctaaacgctaagcaaatttaatttaatacttatctaatatgttttccgcttctatatagttaaaacaaattaaaagagccaagtgctaatatttgttggattggataattcgctaaacgaatcattaaagtcaaccgatgcgaaattcacaccatttttgttggtcgtgtgagataacgtgatttttgtttctgttcattaattcacaccttataagcagcgtaatcaaataaccactgatatatcaatatgttataaaagttgacgtagaattgcgtttctgtatgaagataaacgatatcagaaaaaagatgttgtatgtggtcattgaacgcgaagacagaaaacaaatactttgcgattggcttcttttgaatgtgagttaactcaaagtctttttatcggtggaacttttctgaaactatataatctgtcaaacatttactgagtcttgtttgattatctctccatttcttttggttatttacatttgacagctgcttctgagccttcattatatttaggaactgaatgaataatatacccccaattagtcaatatggcacatgtctctgtttcaggaactactagacagttaagtatgctaatttgtctaccttttttgttttggtttcacttttgttaacaatgtcaatgtcaagttcaaagttctacagccgatggggcactgctgacatactaattgttagaacaattattttaacaacagctcgaccaactggtctagccatatttggtttacacacaatgaagccacgttagtaaataggatgggaaatcagaaaatgtgtttgttgcgataaccagggttctttataattaatatgccggtcatttgttggggaagtaaaaccgcatgaaggtgaaaagttgaatgaatttccaaaagattcattcgctgaatttcaattatgtggcttgttgcagtgcatccaacttggagagagtggtagaatgagtcaagattataatttaataataattataataattattaaaagatttgtgtgttgccacagaccacaaattgattctgaaattgcgataaaaaaaactcaaaatgtgcatacaattatcgaggcatttgaaaacatatttcggtgaccaattctctagcgataacccgcagtttgatcccatctgaatttgagaacacactcacttgttgccaagtgccttggcatatgtgaatgaactaaatggaaaagtgaagcaaaagagccccatttccatatcaaatgtatgcgagtgtcgtaaggtgatttttcagttcacttgagttattttaatgagtaatcgtcgcgggttctttagagtacattacagtatagtaccgaataaaacaagttaagctaatgcttctcaagactaacttgcttctggtaactgcctagttaaagagagattccgctcaaaaaggtttaattttagccattgtatttgtactttgaatcaacttaatcgacctgcttagtttagcgcctctgattagagtctaaagtactcatcaatgagtatatattgcccatataaaccgttcatatatagcaaatacttgaactagaaactcaaatcccttatcaatgcttgttgtgtgttttattgttctgttattattttataattacgcaatggagaagtaaataatgattagtacacatatactataaatggaaaaactatggaattcctctgttgcagttcactttgttttgcctacagctatgtttatttatttatggctaccaaattgccaactggatttctatttttaatggactggtttttcttatcaacagacagatgtttggcaaaactgtaaaagtaaaaaatttatgcgaatgttttgactaacgaaggagcagcagacggaaattatttgaatatttgcttgcgaatgaatgaataatttgcaatgtggtctggataaattagtcacatttcgttgtttattattattgttcaacgaaatctttttcttactccctttatctttcactataataacataattttaattgctttaattataggagatttccccaatttttctcactgcgttttacgcctcagcaaataaactcattgctcgagttacatataaatttaaaaaaaaaatccttaattgatcggttgttgtttttgttgatgctaatttcatcaatctgctccacacattccggaaaagactgcctgttactcatcccaatatggtactttcgtaacataaattcacactgaacttccgcattaaaaaagtttttaaggtgcactcgagcaaaaactgtgcatttacgtatttgatatatttagcccgtttattgatacgctaatttacgcaaatacgtgagcatttgagggttaataaacaatgtttgcgtactcagctgcgtactcatgtccaccaggaatgcgcctctctctccatgacccattatttcaattaaccagtaaacactttacttcacttatcgaaacatctactatatctattctctgctaaaagagcacttctctatcttcgaatatgtcgagggtgcccacagcgccaaacaaaaggcatttggaaaattgtttgtaaacgggcaattaatttatttacagcgaaaacaacaatgacaatcgccggcgaaaaatctttggtctttcgttggtggtcctaagaaaattccactcgatttcgattccgattgtcttgccagaacatcggacatttcaattatttgaaaggaaatacgttttcctcttcaaacgaaaatgggcgggaatttcaggtgtttcgtgtgggagttccaaactattattagttgattccccatattattttttgttagctgacagaatttgagctcctacaatgctattatacgtaattgtggtttattgggttccaattatatcgacacattgcagctaatccggattcaatcaggcataaagtatttttagaacgcccagaaaaagtctggtaaattatagttttctatatatgtacgtgcctatctgcaatgtacctcactatttgttatatatattataaagcccctcaaccttttctttgctcagcgaataaaataacattgtcactccagtcgagctgaaaaattccactcgaaaacgatgggcatatatgtacatatgtattttgattgcagtataaagatgtaataactttcagtattcgtatagctaagaaggcgcgtttatatattaaatttttgattgatattcagtgcatcattcgctgacgtacttgccattcttcatcagattgtttgctcattgtagcactatacagtatacagtttacagatacgaatctataagaatgttctacactattggttccactttatcaatttgcgcctttatctatcgctgggttgacgatctttcatctttcgtcttgctatcagcacggcacaaagtgggcgtggcagccccggagaagttgttttattcaaagttctgttcgtcagagaattgaaataaaaatgcttttaattgccgtgtggaaatatttcttaattaatgactgactcttgacttgctaagggtgtaagctcagtaaaaacaaagaccctagaataacaagatgcgtaacgccatacgattttttggcacacgattttttggccgtggctctagaggtggctccaggctctctcgaatttttgtcagagagcgagagagcgaagagcgctacagcgaacagctcttttcaacgcacaaagtgatagcagacatctgtatgtgtgcacacgtattcacatgcattgtaaatttgacaaaatatgcccttcaccttagaagttctttggctttaaatctatattatttttgatcaattggcaccatgcgaaaaattcttgttttgcattgccttaacgttattattatttgaaaatagattagaaatagtcaaatctatgtacatattatcacaaaaataaatttcaaaaatgactttatataagaatatttgtcattagagtattcatcttgcggcgtgtgaaaaattaataaggcaatgattgttgagtgcttgtgtccgcacttcgtgcctcaagatatgaacaaagcaaagacactagaataattctattgtctttgatattacttttgcaataaacagttattcatatttaattatttagtatatttattaaatcatttgacttaatatgatgtaacattaacattaaaagtgtttcaaaaaaaatatttcgcttttaaaaaattgtcagatgagagacaaattagaattaaacataaatataaatgtgtaaacggtagctaattcgagcggcgattttaacaaacaaatttaaaaagctttaaaattataatagtcagggcgcgaatttttaaaaatttttttattttatcatattgctaggaaattggcaaaaacctaccctaatatgtaccatgtaaattcgtttcttcgatcagaattgatttcgggcccgaaaatcgtcttctagcacaacacgcacacttatacgcgttctcgtctcttgtttttactcacacaagcaagcaaattatatttttagatttcttacgctctcagcgggagtgagccgaaagagagtaattttgggccgtcacccaaaaaagtggctgcatagtgccaaaccaatgtatggccgttacgcatcttgttattctagtgtctttggtaaaaataaacaggttaccctgaggggagggggatatactcatagctccagcttcattcatatgaagatggatttgaaatgaaaatctctaattaaaagcacttcatagactatccgaatgtctccgtatacaatgtagcaacaattgagagcgactacgataaaaacaatgctaatagattttaatgatggcttatatagatgttgccatctagttttccatacagatacttttcgatctcgtgccgcccagtgtgaaactaaatgccatcgttcgtcgcctataaacaaaagcagttctccaattacgactggttgaagcacacgaacagtccatgaacaacaaaagccgtgtggacaatatgtgtataaacaaaataacaacagtcgaaataataacatcggcaaaaaataaataacaagccgagataagcgaagtaaaacgcttcacaaaggcggcaacttgttaagtaagctaattaatttaatcatttcgcatatcagagtcgttaatgcttcggataaatattgagaacgatcgtcagacggaaaaaaacagataagattgatttcttttagtttttgctggaagaaaactatcttaattgcgtttcaaaaatatgaatgatcaatacacagttaaaataggtaagggtattaaatatacatcgaattataactcttcaaattcaacaatgtaatgtaaataattatattgcttgaccacttccataaatcaataagtgttgacagtttcacttgatagcttaccaggttttatgctctaagctgtttgctcaaaaaagggttcaactggtcattattcatgcgatgtatctgcggcacgtgaggcatcatatcttacacaggcaataaaatatcattcccggcgacatttcactttgtgtcagtcaatggcccctttagaggttgcatgcggcacgccacagatacatttaaaaccactctgtcaacttatgtatctacatacatggtttgccccagcaaagttttcaaattttgacattgacattgctgttgtgggcctcttcaataccgatctataattagtctggcttttatttggatgtatctacaaatccataccaaaatgtagtgaatgggcttgtgcggctgtgttattatgtttgtctggagcttattggcttgattgattgtgggctccatggtgataagaggctttgcaggaatcagtgattaggacgcgcctcctaacccagaacgtgaggagcgctccactcacatgtgtttcattcttgtttgtacaactcgggcatagattacctaacgaggggaaaactgggagctgggctgctgacgccaatgatatggaaaacaggccaactgtcgtcatgaatatgcgcctacggaatatccactcaatatatgtatatgtatctatctacatatagtatattccacaccagacgttgacaaattttgtgccacaacttgggcacaatattcgttacgttccgttccattctatttcacttccattttacagtaggtgtttgtgttctcttcgcaaaaagaaattatatcacgcgcctgatttccatacgcttctttatttatttactttggcttgggtgcgattcaaatgattttcaattggttacgtttgggctggcacatatattgatggatggcatttaaatgaagcgtgaaacgatgacaatcgccggttgggttcggttcggggttcactttgctttgggtacgacgacttggtaacaagtggttcgtcctcttagaagggggctcgttctgtattcttgagaacttttaattgatttattttttacgctctattctatttgctcatagatctacacgccaccgccactggacatcaaaatggaaatgtaagtattacaacttgattgtaataccattgatggttaccattgtaacttgatggttgattgaatggcaggaacaatgatgcatttttataggaaatataaaaacaaaagttaaagacgcgtgaaacaattgaattatccgatatttgatctttataaattcgttttattcaatttaatgcatttaatttatttttcattcatgtataaacgtctctaaaattcaattatttttattcaaagcaaccgaaatggttgtgcttaatgttcccttagacacatttcacaaatcctttctaacttgggaatttaatgttaattacagtgaaattggcgaacaaccccagcctccggtgaagtgctccaacttcttcgctaaccactggaagggattggttgtgttcctggtgccgctgctatgtctgcctgttatgctgctaaacgaaggcgccgtaagtttaaaccttaaccagatatatagttgcagtaagcataaatatcaaaacttaatttttctaggaatttcggtgcatgtacctccttttggtaatggccatattttgggttacggaagccttgcctctctatgtgacgtccatgataccgattgtggccttcccaataatgggtataatggtaagttctttatttcacatataaattatacaattatataattatactttcactttggcatctgtctagagctcggatcagacttgccgcttgtacttcaaggatacgctggtgatgttcatgggcggcattatggtcgccctggctgtggagtactgtaatctacacaaacgtcttgccttgagggtaatccagatcgtgggctgcagtccccgcaggtatatattctaatggtttgaaaataaggccgatttgagtattagttctttgcttttcccacagattacactttggcctcatcatggttacaatgtttttgagcatgtggatttcgaacgccgcctgtactgccatgatgtgtccgattatccaagccgtgctggaggagctgcaggctcagggtgtctgcaaaatcaaccatgagcctcaataccaaatcgttggaggcaacaagaaaaacaacgaggatgagtaagtaacaattggtattggtggcatcaagctttacacaatacttgtataaactatatacacctttactttgattatttgtttaataaattcatatttttgtaggccaccataccccaccaagatcactctgtgctactatctgggcattgcctacgcctcctcgctgggtggctgtggaaccatcatcggaactgccaccaatcttaccttcaagggcatctacgaggctcgtttcaagaactccaccgaacagatggacttccccaccttcatgttctactcggtgccatccatgttggtctacaccttgctgacattcgtgttcctgcaatggcacttcatgggtctgtggcgtcccaagagcaaggaggcacaggaagtccagaggggacgagagggcgccgatgtcgccaaaaaggttatcgatcagcgctacaaggatctgggtcccatgtccattcacgagatccaagtgatgattctgttcatttttatggttgtgatgtacttcacccgcaagcccggcatctttttgggatgggccgatttgctgaattccaagtaagttgatatttataacatataatattataattatatttatattattataataatagcccgactctattggttttcctggttaaacccgtcccttttatcttattcgtgctaatttctcgtttagaacactcgaaatacgttaatataaatcatattgaattatgagcaattacataaattataggaacttttcaagtatttctctgaacatttatggtttaagatgtgggaaaaccaaaaaagtttagctcttactcataattaatcttgcgagttatatttttacttaacctaagtacatgctcttctttccagggacattcgtaactctatgcccactatttttgtcgtcgtcatgtgcttcatgctgcccgccaattatgctttcctacgctactgcaccagacgcggtggtccagtgcccacgggtcccactccatcgctgatcacctggaagttcatccagaccaaggtgccatggggtctggtgttcctgcttggcggtggcttcgctttggccgaaggcagcaagcagagcggcatggccaagctgattggcaatgctctgattggattgaaggttctgcccaactctgtcctcttactggtggtcatcctggtggctgtgttcctgaccgccttcagctccaatgtggcgattgccaacattattattcccgttctggccgagatggtgagtttaaagcaatgcattttgtatgaaacgttgtgtactaaatgagtttatttctgtttcagtccctggccattgagatccatcctctgtacctgatcctgcccgctggcttggcctgcagtatggccttccacctgccggttagtactccgcccaacgctttggttgctggctatgccaacattaggacgaaggacatggccattgctggaatcggtccgaccatcattaccatcatcaccctgtttgttttctgccaaacctggggcctggtcgtctatccgaaccttaactcgttccccgaatgggctcagatttatgccgcggcagcactgggaaacaagacgcactagatagttagtaattagtgtaaataactaacatacccgtcacagcgataaagttgaggaaaatttagggaattttaaacgaaaagtgcctttgctgacagcgaaaaatgtgaaaaatatttaactatgtatacttgcatttcagagttgcgaaaagttttgatacaaaagcattacctactgtttagaaaaatgtgttaaaaaaaaaacgtatcgcaatatactgttaatcaggaattgaacacctggtctacgcactcagctaaatatttaaatacaaattaatgttacttaattgttgcatttagcataaaaatggaaaagatttggaaaagttagaacagtttgttcaatggcagccctggcctgctaatattttaaataactagactgagagaacttacatattcatacatgtttttcaacttgtaaaaatttttaaatgaacaactcactcaatacttcattgcgaaccaaaatgaacacacaaatagcggtaggctaagcttaaatgatactgtgtacattttcagatgatttatgttttatatagtttgtaaaaaatattaaataataaaaagctcaaacgacaataatactatacgtttgtttatttcaataacttattttgtttgatgttcaaagcgcgccatgcatttcgtataacgataactcgaattaatcgataactcgccctgctagggatgcgcgattcactgaaaaggtttaagactcactggcacagttttacatctactggacacttgtagctgaaatttcaattcatcaaataaaatacatatttttacaaaattacggagaaataaaacattttactcataggagataatggtaataaaaatatcattacaaaaagtattaaattgatgtatatttcataggaacaaatttgattaagattaagttcaatcattcgaagtagtaatttctcagggtaccgaagaaatatttaaatgggaattaagagctcgactataagtga

SEQ ID NO: 27500 - DNA, 1872 bp, DROSOPHILA
tttccgaatcggacgaaccgggcgtgcttgctctcctgctgctttcgagatcggagtcccgataaggatataactacaacctaaagaggaatccaagcctcctcctgccgctagtttcgaaaaatctacacgccaccgccactggacatcaaaatggaaattgaaattggcgaacaaccccagcctccggtgaagtgctccaacttcttcgctaaccactggaagggattggttgtgttcctggtgccgctgctatgtctgcctgttatgctgctaaacgaaggcgccgaatttcggtgcatgtacctccttttggtaatggccatattttgggttacggaagccttgcctctctatgtgacgtccatgataccgattgtggccttcccaataatgggtataatgagctcggatcagacttgccgcttgtacttcaaggatacgctggtgatgttcatgggcggcattatggtcgccctggctgtggagtactgtaatctacacaaacgtcttgccttgagggtaatccagatcgtgggctgcagtccccgcagattacactttggcctcatcatggttacaatgtttttgagcatgtggatttcgaacgccgcctgtactgccatgatgtgtccgattatccaagccgtgctggaggagctgcaggctcagggtgtctgcaaaatcaaccatgagcctcaataccaaatcgttggaggcaacaagaaaaacaacgaggatgagccaccataccccaccaagatcactctgtgctactatctgggcattgcctacgcctcctcgctgggtggctgtggaaccatcatcggaactgccaccaatcttaccttcaagggcatctacgaggctcgtttcaagaactccaccgaacagatggacttccccaccttcatgttctactcggtgccatccatgttggtctacaccttgctgacattcgtgttcctgcaatggcacttcatgggtctgtggcgtcccaagagcaaggaggcacaggaagtccagaggggacgagagggcgccgatgtcgccaaaaaggttatcgatcagcgctacaaggatctgggtcccatgtccattcacgagatccaagtgatgattctgttcatttttatggttgtgatgtacttcacccgcaagcccggcatctttttgggatgggccgatttgctgaattccaaggacattcgtaactctatgcccactatttttgtcgtcgtcatgtgcttcatgctgcccgccaattatgctttcctacgctactgcaccagacgcggtggtccagtgcccacgggtcccactccatcgctgatcacctggaagttcatccagaccaaggtgccatggggtctggtgttcctgcttggcggtggcttcgctttggccgaaggcagcaagcagagcggcatggccaagctgattggcaatgctctgattggattgaaggttctgcccaactctgtcctcttactggtggtcatcctggtggctgtgttcctgaccgccttcagctccaatgtggcgattgccaacattattattcccgttctggccgagatgtccctggccattgagatccatcctctgtacctgatcctgcccgctggcttggcctgcagtatggccttccacctgccggttagtactccgcccaacgctttggttgctggctatgccaacattaggacgaaggacatggccattgctggaatcggtccgaccatcattaccatcatcaccctgtttgttttctgccaaacctggggcctggtcgtctatccgaaccttaactcgttccccgaatgggctcagatttatgccgcggcagcactgggaaacaagacgcactag

SEQ ID NO: 27501 - protein, 572 aa, DROSOPHILA; identical to SEQ ID NO: 7737

SEQ ID NO: 27502 - DNA, 3590 bp, DROSOPHILA
gaatacagcttcttaaacgcttaaattcagttactaaactattatcttagagatagtttacgatgcgatgagatacatatacatttgtatatacattttgtgaggactaatactactactttccggatttcgcttgattattaacttatgagcttgtttaatcaaatttctatagaatattttaatgaatgtcttgaacttaattttgttattgtgttctttaaatatattttctacttatagctcttttcaagtattaaacataagcgctactaagtaaagtaaagcaagactaagtaaacagcgtgtgaatatttaagtaagtgactgacaagcaaacaaaatgaataactgaaattctcgctgaacaaaggaattcaagtcaaagtgtgtatagaaaagaaaacatttctaattaaacagaccaaagaattaatagaatggatgctgtcatttgttaaaatcggattcaaaatctgaaaagtttccattcacctgacgtaaattggtaaagtggagcagagctataaatgcggcttaacatattcgatacccgcacattacctcaaagtctcccaaggaatcaaccacagacaaaatgaagctcgtcgcaatcacattggtcgcatttgtggccatttgcctgtattccgttgattgcaccacatccggtacaggatcagctgctaccagcggatccggctctagttccgccagtggaagtggaagtagcagtggatctggaacaggaactggcacgggaactggcacgggaactggcactggcacctcgactacgttggctcccacgaccaccactaccacaaccaccaccgttgctccagtgaagaaagtccatcggaaaaggcgccacgtcatccggaaaatcgtacggaggcgcgccggcgaacgaaggcgtcgtggataaatagaacgcaaagtttttcgaatttcttttttttttttattattaatttatttattaaggcatacggggaagtcttgaatcccctttgtgtccttcttatctattaattcagcccatttgggctcgccggctaactatagttagctttttcaaatttacagtaatttaactacaattacataacaatcacatataacaaataggatttaagataagcgtcagcttctgcggacccttgtcaaaggagatcgggtaatgagatccctcggttgccttctattgagcctccttggtgggcgagatctgtttaaagcgctggccagccgatttctgtggcgctccagcctgtcatggtatctgctcgagtgcttgtttatttcgtcaaataccgttgcgagtttcaggtctctgtgcagggtggtgtttcgaacaaaccactcgcagccggtgatgagtcttgctaccttattttgaatagcctggatccttttgatgtggctggcgcaggctaagccccagatttggcacccatacttccagtttggtgctaggatctgtttgtaaattgtcagcttgttggatagcgacaatttactgcgcgaagaaagtagccagtagtgcttcgccaccttagcacgtaggcgcgttctgatgtcggtcacatgcttggaaaatgtgagtctgcgatccagaagcactccaaggtactttgctgcgttcggctgtggtacggggacttcctcgatgtagacgggcggtggcgttctccgctttaaagtgaagcagacgttgttggatttactgctattgatgccaatattccatcgtcttgcccattccgagaaccggtatgcaaagtcctggataccatcggcttgcgtcgtgctcgcatcgggacctgtaggtgacgcacacgtcatcggcaaatgtggccaacatagatttcccgtaaaggcttacatctggctgcggcatgtcgtggctacacaggcagtagagcagggggccgaggacactaccttgtggaacaccagctgccacgttgtgctcggtggaaattgctgaatgaaagcgcacagcgaacctccttccttccaggtacgatttcagcaacccaaaatatggagcaggcagcgtctgcttgattttcagttggagtccaatgtgccacactcgatcaaacgcttctcgaatgtccaagaagaggctgttacaatattccttactgtcgtaggcagtcagaatttgctcgacgactcgatggagctgctcgacagtacagtggccagcacggaaaccgaactggtgctcaggggtaatcccctgggcttccataatccttacaatccggacagcaatcagtctctcaaacaccttcgaaattgaagggaggagactgatcggccggtaggaggcgggctccctttccggcttgccaggtttgtggatcatggagattatcccgagcttccactgataagggaagtattgcaacctcacaatagcgttgaaaaccaacgttatgtagaggatcgcttgtctgggcagggccttcaatgtggcgttgcagataacgtcatgtccaggtgctttgttgttactctggcgcacaatgacttcggctacctcgcagggttcaaacggcgtgattggcatatccatttgaagcgcttggttcgaatttctatcaatgcaatatgaattaaaagcaaatgttataatggtcaaatgacaagactttttatctattgaatcgctttgttcaataattctaatttgttgttaatgcgaattctaaatacttggttttaattttaagtccatgttgataatcatttatgatcagttcgatttgttttatctgttctgttatttaaatatgataagatatttatatagataggataggataggatatttatatagataaaatttaaaataaatattttagtagtactattaaaaaaagaacgtaattttcataatgcacaactacagggtatctcttgaatgcaagcttaattgaatgatatgcatttttggtggctaaattcatataaatgttgaacgtgattcacttggattgctttgcttgcaagtttagagatttagctgatcgtttggtcttaataatatagattaaaacttaaaaattccaacagaaattgaagctaattgttaaattttgctaaaaaaaaatttgtataaatgctttgtaagcttggagtgtttcgctgttatgtttattaaaaataaatcctgtgcatgtagcaattttgtgttattatttttcttatatttgaaaattaagtatattgaaagctttgtcatatgtagtactagtttactagacaatcagcacatacatatgtactttaaaacataaatatgtaaagcatacttattccactcaaacaaagctttaatcaaattaatcaaattgcgcgcaaaagaagccgtgaaaaataagtaaaaagtaaatgaatatagaacgctagaaaaagttcaaattttcaaaagtgcggccgttttttgggcgtggcaagtaagaatccggaaacaatcttgcgatgcatctacatatgtctctgtgatctgcattcataatgtgactttctcagcttttttagttttatagtttctaatatctcgttcctacgga

SEQ ID NO: 27503 - DNA, 1590 bp, DROSOPHILA
atggatatgccaatcacgccgtttgaaccctgcgaggtagccgaagtcattgtgcgccagagtaacaacaaagcacctggacatgacgttatctgcaacgccacattgaaggccctgcccagacaagcgatcctctacataacgttggttttcaacgctattgtgaggttgcaatacttcccttatcagtggaagctcgggataatctccatgatccacaaacctggcaagccggaaagggagcccgcctcctaccggccgatcagtctcctcccttcaatttcgaaggtgtttgagagactgattgctgtccggattgtaaggattatggaagcccaggggattacccctgagcaccagttcggtttccgtgctggccactgtactgtcgagcagctccatcgagtcgtcgagcaaattctgactgcctacgacagtaaggaatattgtaacagcctcttcttggacattcgagaagcgtttgatcgagtgtggcacattggactccaactgaaaatcaagcagacgctgcctgctccatattttgggttgctgaaatcgtacctggaaggaaggaggttcgctgtgcgctttcattcagcaatttccaccgagcacaacgtggcagctggtgttccacaaggtagtgtcctcggccccctgctctactgcctgtgtagccacgacatgccgcagccagatgtaagcctttacgggaaatctatgttggccacatttgccgatgacgtgtgcgtcacctacaggtcccgatgcgagcacgacgcaagccgatggtatccaggactttgcataccggttctcggaatgggcaagacgatggaatattggcatcaatagcagtaaatccaacaacgtctgcttcactttaaagcggagaacgccaccgcccgtctacatcgaggaagtccccgtaccacagccgaacgcagcaaagtaccttggagtgcttctggatcgcagactcacattttccaagcatgtgaccgacatcagaacgcgcctacgtgctaaggtggcgaagcactactggctactttcttcgcgcagtaaattgtcgctatccaacaagctgacaatttacaaacagatcctagcaccaaactggaagtatgggtgccaaatctggggcttagcctgcgccagccacatcaaaaggatccaggctattcaaaataaggtagcaagactcatcaccggctgcgagtggtttgttcgaaacaccaccctgcacagagacctgaaactcgcaacggtatttgacgaaataaacaagcactcgagcagataccatgacaggctggagcgccacagaaatcggctggccagcgctttaaacagatctcgcccaccaaggaggctcaatagaaggcaaccgagggatctcattacccgatctcctttgacaagggtccgcagaagctgacgcttatcttaaatcctatttgttatatgtgattgttatgtaattgtagttaaattactgtaaatttgaaaaagctaactatagttagccggcgagcccaaatgggctgaattaatagataagaaggacacaaaggggattcaaga

SEQ ID NO: 27504 - protein, 285 aa, DROSOPHILA
MDMPITPFEPCEVAEVIVRQSNNKAPGHDVICNATLKALPRQAILYITLVFNAIVRLQYFPYQWKLGIISMIHKPGKPEREPASYRPISLLPSISKVFERLIAVRIVRIMEAQGITPEHQFGFRAGHCTVEQLHRVVEQILTAYDSKEYCNSLFLDIREAFDRVWHIGLQLKIKQTLPAPYFGLLKSYLEGRRFAVRFHSAISTEHNVAAGVPQGSVLGPLLYCLCSHDMPQPDVSLYGKSMLATFADDVCVTYRSRCEHDASRWYPGLCIPVLGMGKTMEYWHQ

SEQ ID NO: 27505 - DNA, 3109 bp, DROSOPHILA
agtgagaacttgggccaggacaaagtagaggagcaagttcgctgctggtaacctcgtttattatgtcatcgggacagcgaacggggaaaccatttcgagcgctctgcgggaggtgcaaatgggttggtgggtggtgcagcacccacaggtgattgggcaggtgtgcaaaaaggacgaaggcacgtgctcggggtagaggcgcaaaagagtgcgcacgaccaaaccgcgcggaggaaaagtttcgctggtggaatgccgttggagacccactggaatgcagcgggtcgcatcggggtctccaacttgctgggccgggatcgggtgtgcaggaatcgtaactgtaaacttatgcaactgggcaactgagcttgtttagatttataagctgccactgtccttggatgggcgttgtccgatgggcggtcgctggtaaaatgcattgaaggtaaaagttgagtgcggagttgatgcttgctatcagcgagctgcagatattgaagttagtctcctccagcagacatacacaatgaaggccctgattggggctcagaatatagaggaaattactttggaaaatataaacatagtgtatttttaaactctaaccctggtaaatgtgccgtgaaaatacaaagattcctcaatgttgacccagtgttgcctggctaagcatttcacagattcctcttaaaataaaataactaactttcaccccctattttttgtaatgtaaagtagtacaacttgtctgccgttttaggtgatcgacccaaatttgtcccaagtaagaagccgttttatttaaaaaagctcaatctgtattgatagtttacaacgatagcaacagtattataatgttaaaattgtcagtgaaagcaaaaaagaaacacataagcctttccctcccaatcaaaagccaatttctttaaattagggccaatctagaatcgtccagaatccgaatgcacggtgaaaggaagtgcgtcgaccatctggaggaatgccggtttttgatgaccacttccttggcgactgccatgatgagcccgaaggacttttgccgcgttggtggttcggtggctttgcctcgatgtgcgttgccttcgcagtggcgcccattgatatcgtgaaaactcacatgcagatccaaaggcaaaagcgttcaattttaggcacggtcaaaagaatacactctttaaaaggtaaattcctagacggatttttaatatatataatgaaataaaaacgatgatcccgattttaggatacttgggcttctacgatggcttctcggctgccatcctgagacaaatgaccagcaccaatatccatttcatagtgtatgatactggcaagaaaatggagtacgtcgatagggattcatatctgggaaagattattttgggctgcgtggctggagcttgcggttctgcgtttggtataccaacggatctgattaacgtgcggatgcaaaccgatatgaaggagccgccgtacaagcgacgcaagtattttgacctagctcgcgaataatcgccatcaatcttagagtttctattgcctcgatttcagctataagcatgtcttcgatggactcattcgaattcccaaggaggagggctggaaggcactttacaaaggtggatcggtagcggtcttcaaatcatcgctaagcacttgcagccagatagctttctacgatattgtgagtattcaaatgctagtacttaatctatttagtttccattcactgcgaattgtattttgatatcttttaagattaaaacggaagtgaggaaaaatatctctgtgaatgacggattgcccttgcactttctcacttcgctgggtacatcgatcatttcgtctgcgatcactcatcccctggacgtggtaaggaccattatgatgaactccagacccggcgaatttcgcacagtcttccaagcgtctgttcacatgatgcgctttggcgtaatgggaccctatcgaggatttgtgccaactatagtgcgaaaagcaccggccaccactttgctatttgttttgtacgagcaactgaggctccatttcggaatttgctccctgggaggggagaagtacaattaagacgatcgtgctgcgcattcggaatttgacaaaaataccatgtgaacttttaccaacgtttttttacgataaagatttccatgttaattcaaagaagtatttaagtgcgcttactaatggaataagaagtcctcgtaaagcagaattatagcaaataaaaaatcgaagcccagtgctcactggatcattgacctcaagaaccttttccttccgccgaacgaaacatcaaccacaactggtcgcattataaattgattacaactcgcaacgtgactaatgaacattaatttgtccaactccttgacaaggaggacgcagttgtgccaccgaagatggggctaaatgccagcacgtgctgtgtgtgtagttctagtttagatgccgccacgatgacaactaggcgtatgagcaacaatgcccggacaacgttggcggactccgccatcccatcctgccgccacacatccctccagtgccgcattctgcgttgtgtgggtgtcgtgtcacgtaaacgtgggtaaatgttgcacgtatgaacggcattgttgtggatggctggcgagcatatggaggacactccggctattactccacacgcacccactctcgactaccctttaatcgtgattgcaatcattgtggaaattgaatttgtaagtaggcaattttagaacgatggcaaggcgcaaaaataagaataacgcgactcaattaaactgaataaaagctcgatagatattactctcacaaccctctaccttaaatcatactagcactttacaagaacaacctcattttattctttatgtgctttgaaataaattaaacgatcgtaattgcctcataaaaagcacgaagtttttgcgagtgtttgattatgactagtcctttagcccaaactaacactcaggcggagcacccacgatttgcataaatgctttgagccaagtttatggctgacttgcgattgcatcgacgatgagttgtgcctcagatgtct

SEQ ID NO: 27506 - DNA, 909 bp, DROSOPHILA
atgccggtttttgatgaccacttccttggcgactgccatgatgagcccgaaggacttttgccgcgttggtggttcggtggctttgcctcgatgtgcgttgccttcgcagtggcgcccattgatatcgtgaaaactcacatgcagatccaaaggcaaaagcgttcaattttaggcacggtcaaaagaatacactctttaaaaggatacttgggcttctacgatggcttctcggctgccatcctgagacaaatgaccagcaccaatatccatttcatagtgtatgatactggcaagaaaatggagtacgtcgatagggattcatatctgggaaagattattttgggctgcgtggctggagcttgcggttctgcgtttggtataccaacggatctgattaacgtgcggatgcaaaccgatatgaaggagccgccgtacaagcgacgcaactataagcatgtcttcgatggactcattcgaattcccaaggaggagggctggaaggcactttacaaaggtggatcggtagcggtcttcaaatcatcgctaagcacttgcagccagatagctttctacgatattattaaaacggaagtgaggaaaaatatctctgtgaatgacggattgcccttgcactttctcacttcgctgggtacatcgatcatttcgtctgcgatcactcatcccctggacgtggtaaggaccattatgatgaactccagacccggcgaatttcgcacagtcttccaagcgtctgttcacatgatgcgctttggcgtaatgggaccctatcgaggatttgtgccaactatagtgcgaaaagcaccggccaccactttgctatttgttttgtacgagcaactgaggctccatttcggaatttgctccctgggaggggagaagtacaattaa

SEQ ID NO: 27507 - protein, 302 aa, DROSOPHILA
MPVFDDHFLGDCHDEPEGLLPRWWFGGFASMCVAFAVAPIDIVKTHMQIQRQKRSILGTVKRIHSLKGYLGFYDGFSAAILRQMTSTNIHFIVYDTGKKMEYVDRDSYLGKIILGCVAGACGSAFGIPTDLINVRMQTDMKEPPYKRRNYKHVFDGLIRIPKEEGWKALYKGGSVAVFKSSLSTCSQIAFYDIIKTEVRKNISVNDGLPLHFLTSLGTSIISSAITHPLDVVRTIMMNSRPGEFRTVFQASVHMMRFGVMGPYRGFVPTIVRKAPATTLLFVLYEQLRLHFGICSLGGEKYN

SEQ ID NO: 27508 - DNA, 4008 bp, DROSOPHILA
caccaggaattccaggtgtgcctccgcacatgcccacagtgggcgccccacgaggtcgaagacgaaaaatcctaaccggaatgttgcccgcgaaccatggaatcccagcaattgctgcgaaaaaacaacttaccgccacggtgtcaccttcgcagcagccaccgcaactacagactgctccgaaggatgtgtcgcccggcctcagccaagcggagattgcccgccagctgcaggagcgacgaccgacgccgttggagctattgagtccggaatgcacttcggccaccgtgcccacaacgatgctcagcgatgaaagcccctctaagtggtaataagttgtgcaattcccacgttgcagcaccaatctaataatcgtgttctcttagttatcccaatgaaagcctgcagcatctgatggaggacgactctcactcgcacgaggtggccgccgaggagtgcgtgcccatggagtacacaagttaatattctttactgagctaaatatgaaaatacgaaaataaattaactagatccagctggattgatatattatttagtttgtttttaaataactttcttggggctcctctacaagattgaaatttactaacatgtttattctttaaataatcgaaaagggcttacaaggaaattaaatggaaataaaatcattgtaaacattttaagcctttttactcccgataaaaaaaaaacaataaacatatataactttaatttatagctttaatttccctgatcagttggcaaactttaaaagcttaagaagcgagtagttgaaataaattaaagttaactaaaattcctacaaatgattgcaaaaattaaaatttttgttcgtatccctgcgttaatctgaaaattcgttggcgcgaaagtgcctgcttaccgatagacgctgtatatcgagtgaatgcgcagtcctggtcatcggtaattgttagccagccctgccgagcaaaacaccaatgcagaacaaccctgcctttgtaatttatttcgacgcgacgcgagtggagaaaaacaatcaaattaaattctctaagacgtgataaattctggcgctttaccagctaaacgcttcgaacggaccgcagccgatacgggtgccacccgatgagcagctcgtgaacgatggcgctgaacaaaaggaagagcccttactcggacccaatttcgggcgccgaagtggactacaagttgtcatgtcgctgctgcttgaagacgaacgtggagtacgtcaaactggactcggtgtcggtggcgcgcagtctggacccggcggacgccactgagaagataccgctccttcgttgcctgctgttctgcgtgagcgccgataatgcgccggagctgccgcaacacatatgcctcgagtgcagcaagagcctgcaggtggcctactacttccttcagaatgcgctgcgtgcccacgagatcctgtgccggaaactatgtcccaaggtttcaaagagactgaatggcactttggctcaggagcaggaaaagccagcgtgtgcagaggtatgtttgccctaaatagtggctttcacagctattgtttcactatcactattggttctcccttttcagccggtacagcccctaaagaccatgcggcacgagtgtcaggtctgcggagtagtgctctacaatcgcctggagctcaagcagcacatacgccagcatgcaggtacagtttgactttcgccacaagcgtaatttattgaactaaaagtgtaaatacttttccagagggtctttcatacaactgcaagttgtgcagcttcacgtcgttgaagcaacgaactttgttcgagcactatgtgaccatgcacaacatgccccttagccaggcagaggagtacgtaaaatcaaagcatcttccagctcctaaagaagaagaggttaaggcagtgtgcacgcttgaggatatggagttgctgatacccaccgtacttaggccggaagattacgtacagccgcatccgcatattgataacgaccaactgcgagacattgatcaccagctggccgtcagcatggatgaacccgtaccgtcagtggacagcctcacctccaccctgccgccgatggatacgcccaatgttagcatcggcaccgagtaccttgtccttcccgacggttcgctgcagcaggttaacggaagcggtgagttgaactatccatgggtgcatgattgcaaaatacaactcatactgatctttttcaggcgtggtcatcgagtatatagacgatagcaaaccgaatagttccagcaacgtcaatgtaagcctacaaaatctcctgtccagccataatgatccgatggatatcgatgtcaacgaattgatcgtggaggaaatgatgccacagataagaagtaagatccgtcccagtgacttacaatacgattctactattttttgtacgcttacagtcaagccaaaaccggccgttatcggaacatccattcacaagcacaagtgcaaattctgtccgaaaacattctccactgtagcgcgtctaaaatctcatcagttgactcacagcagttagtttaccccaccttcattaaatccagcccgctatcgttcattctgactaatcgaatctcttttacaacagatcttcccaaattcttctgcgaccaatgcgacttttactcgttgcgcagcgccgatctaatacagcattacaagatggtccaccatcgggttgatgaaaatggcaagaccggcaaggaacaggcgcaaggtatagagtctcgtgtctactcgtgcgatatgtgcctgttcgagacgtccaccgttagccagttgcgaacacactacaaggaacggcacacggtccagcccacggaggtgcagctgcgtcccagttggacgggcgagccaacgacaacgagaggcgttgccgccaagcagcagactccggccaagatattaaatcacaccgacatcccgttgggcattaaatgtgagtcatgagatcgttttaaccagggcatttaaactggtatcgactttcgccggttttttggacagttatgaaatgattcgcaaacaaaaattcgtattaatcttttcgttggttgaatgagttaatgttgatatttatttatttattattttcttattattcattaggtattttaccatactttttgttgagctctcaacttacttcgtgcaatacgtttttttttatcatattttttgcggtaattttgtgacaaaccatgaaccgaaattctacacaacagttaaattaaacgtttacactcgaaaatatgtagatcacagcaatgaaattttaaattgtaaaattagttgtacatacaaatttagcataacaccgtgtatatccaggctatgtcctctttctagtaaattgatgctcataatgatcataatggcaattagttttttggcattaactatcgggtaggattggggaaactctctttagctatcgcgctgatgaaactacaaaaacgttgaggcctttattccatgtaaataaaagcaaatcgaatacaagtggagggattgtggactttcggtaaggacttcaaaggagcactttaactcgtttttgataattaattgtttataattaccgtgtttatctttgagtttctccagcctgcactctaaccaaattttatttaagtccaacagtttaaatttgtatactcatttgaattccctggctttccgttttatatgtttcatgttggcatgtttgtaatgcaatgtcttccagatccgcctggtgttttggaaacgcaagcgccattgccgcaaccggtggtacatcaaccaatgcctgatccaatgcagcaaacggagccgatggccaccacatcgacgaccatcaccgaatcgggcgacatcaacgtagtggtggatgcgacgccgctcttctatgcggcaacctccaactccctgttagtgacgaacccggcaccggtgacaacggtggagg

SEQ ID NO: 27509 - DNA, 1571 bp, DROSOPHILA
tgcctttgtaatttatttcgacgcgacgcgagtggagaaaaacaatcaaattaaattctctaagacgtgataaattctggcgctttaccagctaaacgcttcgaacggaccgcagccgatacgggtgccacccgatgagcagctcgtgaacgatggcgctgaacaaaaggaagagcccttactcggacccaatttcgggcgccgaagtggactacaagttgtcatgtcgctgctgcttgaagacgaacgtggagtacgtcaaactggactcggtgtcggtggcgcgcagtctggacccggcggacgccactgagaagataccgctccttcgttgcctgctgttctgcgtgagcgccgataatgcgccggagctgccgcaacacatatgcctcgagtgcagcaagagcctgcaggtggcctactacttccttcagaatgcgctgcgtgcccacgagatcctgtgccggaaactatgtcccaaggtttcaaagagactgaatggcactttggctcaggagcaggaaaagccagcgtgtgcagagccggtacagcccctaaagaccatgcggcacgagtgtcaggtctgcggagtagtgctctacaatcgcctggagctcaagcagcacatacgccagcatgcagagggtctttcatacaactgcaagttgtgcagcttcacgtcgttgaagcaacgaactttgttcgagcactatgtgaccatgcacaacatgccccttagccaggcagaggagtacgtaaaatcaaagcatcttccagctcctaaagaagaagaggttaaggcagtgtgcacgcttgaggatatggagttgctgatacccaccgtacttaggccggaagattacgtacagccgcatccgcatattgataacgaccaactgcgagacattgatcaccagctggccgtcagcatggatgaacccgtaccgtcagtggacagcctcacctccaccctgccgccgatggatacgcccaatgttagcatcggcaccgagtaccttgtccttcccgacggttcgctgcagcaggttaacggaagcggcgtggtcatcgagtatatagacgatagcaaaccgaatagttccagcaacgtcaatgtaagcctacaaaatctcctgtccagccataatgatccgatggatatcgatgtcaacgaattgatcgtggaggaaatgatgccacagataagaaatcttcccaaattcttctgcgaccaatgcgacttttactcgttgcgcagcgccgatctaatacagcattacaagatggtccaccatcgggttgatgaaaatggcaagaccggcaaggaacaggcgcaaggtatagagtctcgtgtctactcgtgcgatatgtgcctgttcgagacgtccaccgttagccagttgcgaacacactacaaggaacggcacacggtccagcccacggaggtgcagctgcgtcccagttggacgggcgagccaacgacaacgagaggcgttgccgccaagcagcagactccggccaagatattaaatcacaccgacatcccgttgggcattaaatgtgagtcatga

SEQ ID NO: 27510 - protein, 472 aa, DROSOPHILA
MALNKRKSPYSDPISGAEVDYKLSCRCCLKTNVEYVKLDSVSVARSLDPADATEKIPLLRCLLFCVSADNAPELPQHICLECSKSLQVAYYFLQNALRAHEILCRKLCPKVSKRLNGTLAQEQEKPACAEPVQPLKTMRHECQVCGVVLYNRLELKQHIRQHAEGLSYNCKLCSFTSLKQRTLFEHYVTMHNMPLSQAEEYVKSKHLPAPKEEEVKAVCTLEDMELLIPTVLRPEDYVQPHPHIDNDQLRDIDHQLAVSMDEPVPSVDSLTSTLPPMDTPNVSIGTEYLVLPDGSLQQVNGSGVVIEYIDDSKPNSSSNVNVSLQNLLSSHNDPMDIDVNELIVEEMMPQIRNLPKFFCDQCDFYSLRSADLIQHYKMVHHRVDENGKTGKEQAQGIESRVYSCDMCLFETSTVSQLRTHYKERHTVQPTEVQLRPSWTGEPTTTRGVAAKQQTPAKILNHTDIPLGIKCES

SEQ ID NO: 27511 - DNA, 10468 bp, DROSOPHILA; identical to SEQ ID NO: 15715

SEQ ID NO: 27512 - DNA, 1469 bp, DROSOPHILA
agcattcgctcctacgacgtcagctgctcggacttcaattcaatttgtttttctccctaagttttttcaaccctaaaccgtagccatgtccgacgatgaagagtacacctccgaggaggaggaggttgtcgaggaaacccgcgaggagacaggagagggcgatccagagttcatcaagcgtcaggaccagaagcgctccgacctcgatgatcagctgaaagaatacatcaccgagtggcgcaaacagagatccaaggaggaggatgagctgaagaagctgaaggagaagcaggccaagcgcaaggtcacccgcgccgaggaggagcaaaagatggcccagcgcaagaaggaggaggaggagcgccgtgtccgtgaggctgaggagaagaagcagcgcgagatcgaggagaagcgcatgcgtctcgaggaggccgagaagaagcgccaggctatgctgcaggccatgaaggacaaggacaagaagggccccaacttcaccattgccaagaaggatgcaggcgtgttgggactctcgtccgccgccatggaacgcaacaagactaaggaacagttggaggaggagaagaagatctcgctgtcgttccgcatcaagcccttggccatcgaaggattcggcgaggctaagctgcgcgagaaggcccaggagctgtgggagctcattgtcaaattggaaactgagaagtatgacttggaagaaaggcagaaacgtcaggactacgatttgaaagagttgaaggaaagacagaagcaacagctcaggcacaaagccttgaagaagggtctcgacccggaagctttgactggcaaatacccgcccaagatccaagtcgcctccaagtatgagcgacgtgtggacacccgctcttatgacgacaagaagaagctcttcgagggtggctgggatgagatctccaaggactcgaacgagaagatctggaacgagaagaaggagcaatacaccggccgtcaaaaatccaaactgccaaagtggttcggcgagcgaccaggcaagaaggccggtgagcccgagacacccgagggcgaggaggacgccaaggccgatgaggacatcgtcgaggatgatgaggaggtcgaggaggaggtcgtcgaggaggaagatgaggaggccgaggaggatgaggaggaggaggaggaggaagaggaggaagaagaggaagaggaggaggaagaggaggaggaggaagaagaggaagaggaggaggaggaatagaccaatccacactctgggcccgccctcgcgcaccactttccttcaccacttttcgtaaaaacaaacactacatttaaataccaaagccaaacaattttaataaaagtaaatgaatgaactaagtagttaacaacttgctattcaaaatcaaaaactcaacatcttttttattgaatcgagaaatgtaagatttcttttaaaataaaacatcaaaacc

SEQ ID NO: 27513 - protein, 388 aa, DROSOPHILA
MSDDEEYTSEEEEVVEETREETGEGDPEFIKRQDQKRSDLDDQLKEYITEWRKQRSKEEDELKKLKEKQAKRKVTRAEEEQKMAQRKKEEEERRVREAEEKKQREIEEKRMRLEEAEKKRQAMLQAMKDKDKKGPNFTIAKKDAGVLGLSSAAMERNKTKEQLEEEKKISLSFRIKPLAIEGFGEAKLREKAQELWELIVKLETEKYDLEERQKRQDYDLKELKERQKQQLRHKALKKGLDPEALTGKYPPKIQVASKYERRVDTRSYDDKKKLFEGGWDEISKDSNEKIWNEKKEQYTGRQKSKLPKWFGERPGKKAGEPETPEGEEDAKADEDIVEDDEEVEEEVVEEEDEEAEEDEEEEEEEEEEEEEEEEEEEEEEEEEEEEEE

SEQ ID NO: 27514 - DNA, 10468 bp, DROSOPHILA; identical to SEQ ID NO: 15715

SEQ ID NO: 27515 - DNA, 1424 bp, DROSOPHILA
attcgctcctacgacgtcagctgctcggacttcaattcaatttgtttttctccctaagttttttcaaccctaaaccgtagccatgtccgacgatgaagagtacacaggagagggcgatccagagttcatcaagcgtcaggaccagaagcgctccgacctcgatgatcagctgaaagaatacatcaccgagtggcgcaaacagagatccaaggaggaggatgagctgaagaagctgaaggagaagcaggccaagcgcaaggtcacccgcgccgaggaggagcaaaagatggcccagcgcaagaaggaggaggaggagcgccgtgtccgtgaggctgaggagaagaagcagcgcgagatcgaggagaagcgcatgcgtctcgaggaggccgagaagaagcgccaggctatgctgcaggccatgaaggacaaggacaagaagggccccaacttcaccattgccaagaaggatgcaggcgtgttgggactctcgtccgccgccatggaacgcaacaagactaaggaacagttggaggaggagaagaagatctcgctgtcgttccgcatcaagcccttggccatcgaaggattcggcgaggctaagctgcgcgagaaggcccaggagctgtgggagctcattgtcaaattggaaactgagaagtatgacttggaagaaaggcagaaacgtcaggactacgatttgaaagagttgaaggaaagacagaagcaacagctcaggcacaaagccttgaagaagggtctcgacccggaagctttgactggcaaatacccgcccaagatccaagtcgcctccaagtatgagcgacgtgtggacacccgctcttatgacgacaagaagaagctcttcgagggtggctgggatgagatctccaaggactcgaacgagaagatctggaacgagaagaaggagcaatacaccggccgtcaaaaatccaaactgccaaagtggttcggcgagcgaccaggcaagaaggccggtgagcccgagacacccgagggcgaggaggacgccaaggccgatgaggacatcgtcgaggatgatgaggaggtcgaggaggaggtcgtcgaggaggaagatgaggaggccgaggaggatgaggaggaggaggaggaggaagaggaggaagaagaggaagaggaggaggaagaggaggaggaggaagaagaggaagaggaggaggaggaatagaccaatccacactctgggcccgccctcgcgcaccactttccttcaccacttttcgtaaaaacaaacactacatttaaataccaaagccaaacaattttaataaaagtaaatgaatgaactaagtagttaacaacttgctattcaaaatcaaaaactcaacatcttttttattgaatcgagaaatgtaagatttcttttaaaataaaacatcaaaacc

SEQ ID NO: 27516 - protein, 374 aa, DROSOPHILA
MSDDEEYTGEGDPEFIKRQDQKRSDLDDQLKEYITEWRKQRSKEEDELKKLKEKQAKRKVTRAEEEQKMAQRKKEEEERRVREAEEKKQREIEEKRMRLEEAEKKRQAMLQAMKDKDKKGPNFTIAKKDAGVLGLSSAAMERNKTKEQLEEEKKISLSFRIKPLAIEGFGEAKLREKAQELWELIVKLETEKYDLEERQKRQDYDLKELKERQKQQLRHKALKKGLDPEALTGKYPPKIQVASKYERRVDTRSYDDKKKLFEGGWDEISKDSNEKIWNEKKEQYTGRQKSKLPKWFGERPGKKAGEPETPEGEEDAKADEDIVEDDEEVEEEVVEEEDEEAEEDEEEEEEEEEEEEEEEEEEEEEEEEEEEEEE

SEQ ID NO: 27517 - DNA, 4378 bp, DROSOPHILA
ccaaacatcagttggatgtaaatggcaaaaaacagctgtttcagattggtttatcctcaaatttctagtttctgtagattctattggccttggaactttcgccgctccccaccacaataacgcccccttcagacatgcgccaagtgaacacggcgcctcctgcccgtacgcccatgagattgctgctgaggtgaagaagtggcggttgggtgaagaagcaagcagtgcgcgcgtcccaaattgcaaagtgatttttattcggcccacaaaagccggttatgtaaagaccgtataggccaaatatctacacacatatcgtactcgttaaattaagaacttgtagaaatgtttatggtcgtgtgttccaatttaaggcgtcccgggcacgtgggcgccgcatctgcagcgcgaaatataaactggctgatcagcgagggatatacaccgccgatccgggcaatggcgcgggtaagcttaattatagcaattaaccctgaaatttttcacctaaatacacgcaataaatataaacaaaatcaggccatcgctttctccttttttcaccacgttccagaactgaccaccagttccaatcccaccaatggtggcgggaaaatttaaattagccattgctaaaaatgtataggaatcgatttaaaaggtgcttttactacttaagaaaaatgcctttttatgagcacttcattttaaatgcactaaagacacagttaattgtggaattatcattttaagctgttcaactcttggaatataagagtactttatttttaaatatttgttgatgagtttctacgtccgttagcatatacctaacaaaggtaaacaaaggcatctattatctacaaaaataatccagattgagcaactgataagaacactgttcaaactcaccaccttgcacaaagcaccaagatcccaaacccaccacgctgggcgcacaaatttaaatgcttatcatatcaaaccaaaccagcgtgatcattatacacggaagcgctcggctaagcacttttgctaactgataaagatagtttcacaatctctagtcaaccacttgactgttgcctaactacttctactttggggccctttccttcgctctttttcgctttgtctctctttgtttgggggcaaacgccctcgttttgtgcgtgcttttgcttttgagcttgttgcacttggcgatttcagtggagacgaaaatcagttacgcacgaaagttcccgccgtccggatgcgaaagattctcaggtgcccaatgtaatacatctcgaaccgagtgaaggtcgccatagatctctgacgacgtgagtttttcctgcattattattcgcgcgaaaatgcagtgcggtgtctcgcagcaacagattttcagtgcgcatgctgctaacctgtggcacaaaggcggcttttgcgggggttgttgggttagtcgaacagttgacaaaggaataattcaaatagaaatcaaaatgcgtaacactgagaggcgtttggctagacacaagcacaaaaggaaactattcttgggcccgataagattaaagactatccatggtcagcagtgggatttgttgtgtgcactttgtggccgtcggtaattaaatttccgcccttatctcgtttccacagccatacgtccaagctccggaggcgcggccagtgcccgatgagcgctatccgggcagccagcaggataggaaggatatcgccacccagactgtgcggagcagcaagcccaaagacctgcgaccgccttcgccgccgacgccgtcccagaccctaaactcctcttcccttccgcccccaatgtccgaccaggatgctgatccctccctggatgtgcccaccggcgtggcgatgccctacaacatcgactggatattccctaggctgagaaacccctcgaagttctggtacgtggtcagccagttcgtcgtctccgccgttggaatcttcagcaaggttgtgctgagtgagtatctaaccggcagagccgaccttaccaaacaactggcccaaaggcacgtttatttttggccaagagatgcggcgtttgctcggagagcttatgcccctgaccgtgaatgcgaaaccgaatgcgtcagcgaatctctcgattgataaacgatgtgtgcggatgctggcgatctcgttcaacgaggtcaaacgtgtgccgtgttgttaattggcgccccccgccacaattatgcaaatgatgaactttcgcctctctttttcgttttgctttgcagtgtttttgaataaaccccgcgtctataacagggagcgactgatccagctgataacgaagcgacccaagggcattcccctggtcaccgtgtccaaccactactcctgcttcgacgatcctgggctgtggggctgccttcccctgggaattgtctgcaatacctataaaattcgttggtcaatggccgctcacgacatttgcttcactaacaagctgcactcgctcttcttcatgtttggtaggtatttcatagcttatttcctggtttcaggagtccacaataaaccgaggcatcattctttccattcgcaggcaagtgcatacctgttgtgcgtggcatcggtgtctaccaggatgccatcaacctgtgcatcgagaaggccgcactgggccattggatccatgtgtttcccgaaggtaaggtgaacatggataaggaggagctgcgtctcaagtggggcgtgggcaggatcatctacgagtcgccaaagatccccataattctgcccatgtggcacgagggcatggacgatctgttgcccaatgtggagccctatgtgatacagcgtggtaagcaggtgacgctgaatgttggccagccattggacctcaacgactttattctggacctaaaaaaacgacaagtaccggagccaacggcgcggaagctcattacagacaaaatccaggaagcctttcgggtaatagtaaattatccaacttaaattattattttttaacatgcagtttctttttaccttacttttttttacaggacttgcgggcggagacagagaaattgcacagagagcgcaactagaacgtgatcatggatgagcatagacatttgtaataatatttatttgtatagtattaagcctaaaatgaaccctcgaagcccttttgatccatttattataattataattatttccgtgtattgcgactagttcttcaagatgtatttgctggataggaacattaagtaaatcagtgtgcattattagtataaatatacaattgaaactaatttgatccaaaggcaataaattgcataatataaaaaagagtatatcttcaaataaatgtgattaacaaacttgacaatggtgccaataatatcgttttggataatggggcaacgttaccagtcacacagctgtttaggaatccgttataatcggtgaccatgtggagttcttaaaaaacttgcagatggcttagatatgggagaccttttattgaacacaccgaaaagaaagcaactgctcaaggatggtccacccgtacccactaggtgtcaggtactcggacgtggagcctacggcaccgttttcaaagctatttacagaggtaggcactaaaacgaaattcgtttgtagataattttcaatatctttttttttagatcgctccgttgctgttaagataattcgagcccaggcagcctcaactttgcacaatgagtctcatttgctgaatctggagcacaggaacattgtacgccttcttaagctggagtctgcggcagatttcggcttggtcatcatggaatgtccgaggggacaaagtctgcagaggatcgttgacactttggctctaccactgatgcacagggtcttgtatgatacttttactttatcccccctaaatactttgtaattaatcattatcttcttagaataactctggatgtggttgctgctctgagatactgccattcccaaaacgtattacatctggatgtaaagccaaccaatatattggttgccctgggaacaaagtcttccataacttgcaattcctcgaagatcaaagtgaagcgaagctacatctgcaagctctgtgatttcggctcctccatcgagatgggcgaattttgtgcttggcaggagccaagcgtggccaaaggaaccctgagatacatgtctccagaagctctgcgatcggatacccttaccgaagcctccgatatttactccctgggcattacaatgtggcaactgcaagcgcgtagattgccctatcacacactcgattgcaatgagaccatagcctaccaggtggtcaagcacgaactgcgtccggacaactatcatcaac

SEQ ID NO: 27518 - DNA, 1625 bp, DROSOPHILA
cattatacacggaagcgctcggctaagcacttttgctaactgataaagatagtttcacaatctctagtcaaccacttgactgttgcctaactacttctactttggggccctttccttcgctctttttcgctttgtctctctttgtttgggggcaaacgccctcgttttgtgcgtgcttttgcttttgagcttgttgcacttggcgatttcagtggagacgaaaatcagttacgcacgaaagttcccgccgtccggatgcgaaagattctcaggtgcccaatgtaatacatctcgaaccgagtgaaggtcgccatagatctctgacgacccatacgtccaagctccggaggcgcggccagtgcccgatgagcgctatccgggcagccagcaggataggaaggatatcgccacccagactgtgcggagcagcaagcccaaagacctgcgaccgccttcgccgccgacgccgtcccagaccctaaactcctcttcccttccgcccccaatgtccgaccaggatgctgatccctccctggatgtgcccaccggcgtggcgatgccctacaacatcgactggatattccctaggctgagaaacccctcgaagttctggtacgtggtcagccagttcgtcgtctccgccgttggaatcttcagcaaggttgtgctgatgtttttgaataaaccccgcgtctataacagggagcgactgatccagctgataacgaagcgacccaagggcattcccctggtcaccgtgtccaaccactactcctgcttcgacgatcctgggctgtggggctgccttcccctgggaattgtctgcaatacctataaaattcgttggtcaatggccgctcacgacatttgcttcactaacaagctgcactcgctcttcttcatgtttggcaagtgcatacctgttgtgcgtggcatcggtgtctaccaggatgccatcaacctgtgcatcgagaaggccgcactgggccattggatccatgtgtttcccgaaggtaaggtgaacatggataaggaggagctgcgtctcaagtggggcgtgggcaggatcatctacgagtcgccaaagatccccataattctgcccatgtggcacgagggcatggacgatctgttgcccaatgtggagccctatgtgatacagcgtggtaagcaggtgacgctgaatgttggccagccattggacctcaacgactttattctggacctaaaaaaacgacaagtaccggagccaacggcgcggaagctcattacagacaaaatccaggaagcctttcgggacttgcgggcggagacagagaaattgcacagagagcgcaactagaacgtgatcatggatgagcatagacatttgtaataatatttatttgtatagtattaagcctaaaatgaaccctcgaagcccttttgatccatttattataattataattatttccgtgtattgcgactagttcttcaagatgtatttgctggataggaacattaagtaaatcagtgtgcattattagtataaatatacaattgaaactaatttgatccaaaggcaataaattgcataatataaaaaagagtatatcttcaaataaatgtgattaacaaacttg

SEQ ID NO: 27519 - protein, 278 aa, DROSOPHILA
MSDQDADPSLDVPTGVAMPYNIDWIFPRLRNPSKFWYVVSQFVVSAVGIFSKVVLMFLNKPRVYNRERLIQLITKRPKGIPLVTVSNHYSCFDDPGLWGCLPLGIVCNTYKIRWSMAAHDICFTNKLHSLFFMFGKCIPVVRGIGVYQDAINLCIEKAALGHWIHVFPEGKVNMDKEELRLKWGVGRIIYESPKIPIILPMWHEGMDDLLPNVEPYVIQRGKQVTLNVGQPLDLNDFILDLKKRQVPEPTARKLITDKIQEAFRDLRAETEKLHRERN

SEQ ID NO: 27520 - DNA, 2871 bp, DROSOPHILA
ggagagaacgtgactgggttctgatgacagagccatggatgcagtgcatcggatccattgtgtgtgcgcaaataatcgagatgccatttggcaaatttgccgcgagtgggtgtctgtcgctgggcaactgggcaactgggcagctggtctgttcgatggactcggagcttggtaatcgagacacgcagcctctggagcggattcgtgggttcaattagcgggagccgtgacttctgccagactgggctggactgactctccagtggattctgggaagcattaccgcgtcaactgccatttacatggagcagttaccgcgttcccgcctggcttggttcacccggctcatttgcagccgcttatggaccatccaggcacatccacaggcggtaactaccataaatcaactgcagcgtctgcgcatgcgccatacttagtgctattaaaacgtcacggaagtcggaacgtgagcagcagcgagaatctgaaattcgaatgcgatggagccaacatatggcatcgtggtacaatcgatccatgggaaagcctagaccagtccaggcttgaacgcgatcaattaggctgagaaatttcggtggagaaattgtggcgaaattggacagaaattgccggcaagtgagcggcagaagacgcaaaagttggcgtgacccgaccccgcggagttgccgggattccggagactcgcatgtcaagaggtcatttggcccacgagaagtccttcatcaatctgtggaacgccgctgcgatgtgtctcgaatggcacgttaacgagttcaagtggctcaaacttaaagaaaaaaaaaaccgagttcaaaggtgtttgcctcgccaagagtctcgtttgcatgccgcactttgggaaaattctccacacgccaacaatggaaagcgggctgctcttttttgctttccccaccaactgctaaaaaaaattgggttaacaaaaagcagaaaaaaatgaaaacaccagagccgaaggttagttgatggcggggaagtaatagctatatacgggggctatgatttgattcgagctgattgtctgtaattggatgggtctacgtctatcccaaacccaaaagccgggagttaccaaataccaaggggtctatggactaattatggtgccaagaactcaccttatcacagccgccggatccggagatcgagcccccgtgccgctccagggacagagttcccgcctccgattcaacgggcgttctcggctggtggaccaactgaatcctgccctgcgagatctgtatgtaattcggaggtggtggcatactatcgagcacatcctccttgtcgtcctcatcgcagtccttctcgttttgcctgcaaacacaaagaataacatgagtatgggccttggttcttaagtcttaactcttatagctgattgcccaatcgaatcgccactaaatattcactttattcaaactcaaagtggttgcattgttggcatatttctcgcagattgccccataaagaagtgtcaaaatatttcctattgctcacgttgcttatcggaaaactccgaaaaacgaaacaagaggcaaagttattgcacaatgcgcagatataagccacaccaagtatagtaaatataggctaagcgaaaccatgtagaggcagctcataaattgatatgtccgatagttgcaaccaccaagcaatacactcaagaaattaaagcaaaactataaaatgactgggatttgtatagttttttttttttagtgctaataaaatatcacatcgttataggcaagcagtataagtcagtggatcgagtagcccatgcttactgtaactccaattgatggaggctaccaccttggggccatttctgacacgacccaaatagactgcgacagagatatcaattgtgttggtcactcgggtgtgcaaagtgcatggtgcatggtgcacggtgcatgggatcacctgctgctttttggggccttcgggggaactcggatatgtggtgtgcctgcacatggatgccgtggtatcctcagcatcccagtgctaacgacgaaaagtcgctcgttatttccaattgaatttgcagctaagtgcaaataattcgataaaattgccactcggaggcattcgagtgggcaaacacacacacagacacaggccaaaaagtggaaaatcaaatgaaaaaaaaaaaaacaccgaaatcaccatgaggccaaaatgctttcggcttgccagcttgtctacgttcacatctaacccaactccagccccctcagtccgctcagcatcatggcttttagctcggttttagcccggtccagctgcaatccagttttacacactctaactatcgagttgccgactgccgactgcagttgaataaatggccgcagaaaaaaaaaagagcttcaaacaatcttacaagctaatcgcacaaaatgtttcgtttcgtgtttgacgttgacaccgggacaagtgggcagtggccagtggacagtggacagcggactgtggacggtaccgatggatacacaaatatggccaaatgtatatgctgtgcccagcatatcggtgtccatatcgcgcgtatcgcttttccagcactcgcagcattctgctgcccacgtgccgcgtagaatttccatccgtctttgatttattggcatcgaataaagcaatcaaaatcaatttaactgttatcaagctggccattggcagttggtaattaagtgagacgccaagtagcgcatcgcgtgcaagtgcgtcagccatctgaaagtcatccgcagactggcagtcatcattctgccgcgtttgcgttagatgcaaacctaattagtcgagtcaaaaggccaccta

SEQ ID NO: 27521 - DNA, 273 bp, DROSOPHILA
atggccccaaggcaaaacgagaaggactgcgatgaggacgacaaggaggatgtgctcgatagtatgccaccacctccgaattacatacagatctcgcagggcaggattcagttggtccaccagccgagaacgcccgttgaatcggaggcgggaactctgtccctggagcggcacgggggctcgatctccggatccggcggctgtgataagacaatcagctcgaatcaaatcatagcccccgtatatagctattacttccccgccatcaactaa

SEQ ID NO: 27522 - protein, 90 aa, DROSOPHILA
MAPRQNEKDCDEDDKEDVLDSMPPPPNYIQISQGRIQLVHQPRTPVESEAGTLSLERHGGSISGSGGCDKTISSNQIIAPVYSYYFPAIN

SEQ ID NO: 27523 - DNA, 1491 bp, DROSOPHILA
tacagaactcaaataagttgcaacaagtagtgattataagcatactttcatgctgcgcggaaatcaaaaaaaaaattggtaaggctacgttcaataactaatagctaataaccaatagtgcacacaatgtgcatatttacaaatatttataatcataatcaaagccaatcaatcgcgcacacacccacgatgatttcagcccgaccttgcgcaaaatttaacagcaaacggggaataacaaatgctctccaaataaattgagaaaacaaagtacagcgggaaaaatatttagcgaattaagagagaacaaaaatattaaattctaagaaagaaagttgcccgattattcattatatgtatattcataatatgctgtctctattcattggtttacaaaatgccaaaatgcagtttcgaatttcagcccaagaggtgaaaacttaaaatgcttttcgaaacgtttgctgctgaaattcacggatactttcttgccttattattcaatgtgaaagatgtctaaaaatacaatcgcaatcacttccttaattaaatcgtcactaagcatatacgagcagatatctaagtggttttatggcgcagcgaatctaagtaaatgttgacagtattcattacaacgatgctcgtaaagctgcggattttatggcaaacagacgttgcgaactatggataggaaaaaaaaaagatacggatacgtatcacttgtatgtggaagcactgataaatatttgcaccttcggttcccaatcagcatggttgcgaatttccggtgcgaaacaaatttggcttgggcaaaaatgcaaataatattggttagacaaataagtttcaggcaatttccaaaaaaaaacttatagaaaaacaatttagaatgtatataaaattaataaaatattcttggttaaagctgtacgcattcgttgaaaaatacatgtatataaaaaaccccattaattaacattttaatttctccatctccatcttaatcatactgattactcacctccagaatgggacgtttgcagccgtgacagatgcccgagtagttcgacacgaagcaggcggagcagacgggctgaccatcattgatgttgaaggaggcctcggtgatgggacattggcagtccttgcagacgaagtgctccggatgccaggtcttgcccagagcggtaatgatgcgcagttggatgacctcattgcacttgtgacagatggacggttgctccgactggaggggggtggaattgggagagagcaaccgaatgaatgaacagcggatagaagtcattaatttcgcgcatttcaaatgaaaatcacgtacttcaaatatttcataatacaccataattgtgggcgaatttttctgggagcgggctaatgggattcatcggagattcagctcatcagcgggttcaaaaaccgcagagacagctgctggcgcgaatttacgtaatccaataccaaatgccaaag

SEQ ID NO: 27524 - DNA, 306 bp, DROSOPHILA
atgacttctatccgctgttcattcattcggttgctctctcccaattccacccccctccagtcggagcaaccgtccatctgtcacaagtgcaatgaggtcatccaactgcgcatcattaccgctctgggcaagacctggcatccggagcacttcgtctgcaaggactgccaatgtcccatcaccgaggcctccttcaacatcaatgatggtcagcccgtctgctccgcctgcttcgtgtcgaactactcgggcatctgtcacggctgcaaacgtcccattctggaggtgagtaatcagtatgattaa

SEQ ID NO: 27525 - protein, 101 aa, DROSOPHILA
MTSIRCSFIRLLSPNSTPLQSEQPSICHKCNEVIQLRIITALGKTWHPEHFVCKDCQCPITEASFNINDGQPVCSACFVSNYSGICHGCKRPILEVSNQYD

SEQ ID NO: 27526 - DNA, 2863 bp, DROSOPHILA
gatcggctaatccacgaatccgaaacttgtttttacattttgcattcataaacaaggtaatttgacattaaagttgaattaacaaattgtttttcgatatataacattctatgcctttggttagtcatctgaacttgaaattagcaagttattagcgtttaatacggttcatttacagaggtgaaaagtcttaagtattagatttcgtattagtatatatgggattacgttataacttaaacttagcagtggttttgaccattatttctatgttgtaatacagtttaaaattaggctagaccagctcctcaattgtctgcgctatccagtcgtcataggccgaaacttttgtgtaaattccaggaaacatggcgtttgcgcatccaaatccccaggacacaatgccgtagagctttagacggccatctatagatgtgacaagtggaccgcccgaatctccctggcagctatctcttcctcccgcctgagttcccgcgcagaacatggtgttggtcacggtgccagctccgaaatagtttctggcacactggttctgatctctcagatggacaacggtgtagcgaagacgcttttccggctgcatttgtgagatcgacgtgctgccccagccgcttacaaaaagctgtgcggtcggcataatgatgtccttactggtggccaagcttatgggtcgtatatcctgactatagacaaggggttgctgcagctgaacaatggcaatgtcattgttcatcctcgtggggtcatggaactcaggatgcggaatgatctttttgacgcgaatatagctgccgcccttcgtccaatcgctagatccggctcgaatcacgtaatattgcggtttactgtactccagcacacagtgagcagcagtcaagatgatgttgggcgaaatgatggttccaccgcatgcatgccgggtgcccaactgcagggatacttggtgcggaaagaaggtgatgtgcgtctcccagccgccgacaatgcggccatcctgttcgacatccgtggagttctgggcagccgacgtacagattagccagagagctactgccagtctgaaatccaagctcgtcattttctctttgattgcccgtgactgtgatggaaatcactgtggttcaggtcttttataagggaactccaagacacacggcttatcttatcggcggacccaactcttttggtggcccctgaccttctcggactatctttcgggatttatagatatttatggatagatggcttgggacaaattaaacagatggcggaggtcaagggtgctgctagtgtctaggcttttgctcttccaatcatctttccatggccgtcacctgctccttgaggtaatccaagtggttgacactgtcctgcatcacatcgtactggtagcccacgtgctgcagaatcagcgtcatcttctgcagattctggtggctgtaatccgagaccacgtccacttgggtgaagttcttcagggtttggtgcataatctgtgggcgaaactgctaaagtagtatttattattcaagggattaaagtctcagcatacctcattgctcttggaacctcggactacttgtcgggccacagaacctattgaacgccacgaaagaaaaagagttcatatcgattttgctgggatatactcgtattaactcacccaaattatttgcattctcacccacgcggacacacaatcgcttcttagactcgtcgaataaatgccgagcacttgaactggtcgcagaggccattttatttatgattaaactttgtttaaatgctaataaactcgaaaaatgtaaacaaagtcaaggtaaaacagctgagatagattgggtgtccattaacagcagtgtgaccaagtgtaccacaaggtacgagttaaaacattgcgttggccaacgggttgaaacccttgctagactattagcggtgaccgaaaccctggaatatggagacatctcacatggaggaaatttgtagagtttacaaacaatgttgtagacattaaacgctgcttttcggaataaaattcctaaattcaattcatcgagttggaaaacgtacccttaatttaaatctaaatctcatttgttggaaataaaatgaattctttacttcgatattttaaattttgcaatataattgtttttaaattcaatttaccttattttagggaatactttatgttcatatttctgtcgaagttgccaattggatgatttttctttctaataggcaattcttcgaaagaaatcttccccacttgctgaatgatccttggagcctctctgcattccaggatcccgtcgccaggatgctgaagtcgcgacacactgtcgacagtgtgaaatgcactgaacctgacccctcagttcatcctggctctcattcggattatacgtagatttcccccccaaaaaaaaaaaaaactattcagaattccatgctggctggcgccaaaaggcgtgtcgctaattgtccctaaacgtcggcattaggcgccaactttcaaaacaggaagtaagttgtaggagttggggctccgcctgcgttggttcgttctcccacattttggccacttagttgccacatcgtagctaataataaaggctaattaagcgattctgtgccaacacctgtagttcatttcgaaccaaccatctccagctcccctaatgacaataaattgccgctaaatgtcagcaataggcatcttcatctccatcggcatcacgaaaagataacgatttcactccaggttcgactagagcgcttctaattaatttatgattttcctcaccgcattaatctccctcgtatggcggcgtctcga

SEQ ID NO: 27527 - DNA, 737 bp, DROSOPHILA
ccaatctatctcagctgttttaccttgactttgtttacatttttcgagtttattagcatttaaacaaagtttaatcataaataaaatggcctctgcgaccagttcaagtgctcggcatttattcgacgagtctaagaagcgattgtgtgtccgcgtgggtgagaatgcaaataatttgggttctgtggcccgacaagtagtccgaggttccaagagcaatgagattatgcaccaaaccctgaagaacttcacccaagtggacgtggtctcggattacagccaccagaatctgcagaagatgacgctgattctgcagcacgtgggctaccagtacgatgtgatgcaggacagtgtcaaccacttggattacctcaaggagcaggtgacggccatggaaagatgattggaagagcaaaagcctagacactagcagcacccttgacctccgccatctgtttaatttgtcccaagccatctatccataaatatctataaatcccgaaagatagtccgagaaggtcaggggccaccaaaagagttgggtccgccgataagataagccgtgtgtcttggagttcccttataaaagacctgaaccacagtgatttccatcacagtcacgggcaatcaaagagaaaatgacgagcttggatttcagactggcagtagctctctggctaatctgtacgtcggctgcccagaactccacggatgtcgaacaggatggccgcattgtc

SEQ ID NO: 27528 - protein, 105 aa, DROSOPHILA
MASATSSSARHLFDESKKRLCVRVGENANNLGSVARQVVRGSKSNEIMHQTLKNFTQVDVVSDYSHQNLQKMTLILQHVGYQYDVMQDSVNHLDYLKEQVTAMER

SEQ ID NO: 27529 - DNA, 2258 bp, DROSOPHILA
cagcttggcttacaacggaaacggcaatggcaacggcaacaagcaacatcggcagcaactgcgtgctatatgcctttttaacttgatttaatgagtgcagggagagacatcaacaagaaaaatgaaataactgtcattgaagacatgaaaaagggagccacgatggggtatagaccatgttggcccaagttttctgatgcgttgtgttctgatggagcacgaggctgcgctacttaactgccatgcgatggaagggtccgtcctttctctgtcccatctacgtagtcctgggtgtggcatggcgcaattatgcagcaaattaacgctttatatttattaaaaggaaacccaagaaaatgggcctgggcgtatccctctgaagaaggggatgaatgtgtccacacgtagacactgaattttctttgacagctggcaacaaaaaaatgtggttagcattctgctggaaaagatacctcgcttgcttaaaagcctatctatacgtttccttgttgaagatagaggaaataaaaatctatgcttgtttatatttatgtttgagtattagcaagaagggtggttaactttcaagaaaacatttcaccaagcagttttatcaaaaaaggcgctacaaggtcggtagtttaaaaaatcaaagggctgttatcagcagacaatggattttatgatgttaatgatttatcgaaactatctgtctgcgtgatatcaaaattgtgttgttaagggaatgtgaaattgaaataaaacatttattgttaacaaaagcactttgtattaccatatcaaaataaggttcagcacttaaaaccaacttgttcgactttccattaatgcatcgtatattaaattgatatgcttttaaaactttgctttgaatgcaaactttgaatcatcactccgattagtcatccttagtttcagtctatatatttagcgtttagtttacatagttcttatagcaatcatttgacaacaacacaatctacatgatgacacacaggccacactcctccatgacacaacaggctcctagcagcatgcagcactcggcgtcactgggtccttgggggggtcctggctgattgtagctgggttgctccaccacaaccaccggctggttgtaaacgggcgagggcattatcacctctacggggggcgggggtccaataacattcaccacctccacgggcggctgatagtagggatcgatcacgtccacctggtagcctgcgttgtacattctccttgttttacttttttactaatttaatgacggaaactcctagttgataactagtaactggcctaaactgctcgactaagtgagccccgttcggtaacacgcctttaactgaaacatcgaacacaaatggttggcggtttggtggaaatatcttactcattattatctaaagccggtaggcatttgatcaatgccctgccctgattacgaatttgtgtacacgcaaataacatagaaaaactacaggtacagtggaacacatttgaatattcattggaaaacacacccaattttttttaaaaacgtcgctcagataaatattctaaatattatgtgtagataaacattggctcaaacttaccaaatttgtaccccattattaatttctttcaagctaaataaataaatatataatgtaaaaaatcaataaaaaaaatatcaatcgtaactaacaataaccaatgcagcaaattgactattttggattttaaaaattcgttcaagcgatttacaccacttgctgtttctaaacttggccccaaccgctttctaaaaaaggcagtactggtatttccatttttattaagattacatgttagcccaagtatctcaagtattttatattaaacttggaaaacaggttaaaagtgttaaattttcctactctgttaaactatgggattttttcagcctgttcacttcgatatcaataccacggttttccgtctgaattatcacagtgcgtatgagtaataaggtttgggctttagataaacgtttggcaaagaagcattgcgagtcagaaattatgttaaatgagcagactactaactttggaaaaaggcactcgcattcgttgtccgactcccgcccacataatgtcccactttggggaccctcgtcaaaatatttggggcgagagctccgacgctgcggttgcaattcaagagccaagagtcataaaatcctttatcaaatgagagcagcatgggcctgg

SEQ ID NO: 27530 - DNA, 258 bp, DROSOPHILA
atgtacaacgcaggctaccaggtggacgtgatcgatccctactatcagccgcccgtggaggtggtgaatgttattggacccccgccccccgtagaggtgataatgccctcgcccgtttacaaccagccggtggttgtggtggagcaacccagctacaatcagccaggacccccccaaggacccagtgacgccgagtgctgcatgctgctaggagcctgttgtgtcatggaggagtgtggcctgtgtgtcatcatgtag

SEQ ID NO: 27531 - protein, 85 aa, DROSOPHILA
MYNAGYQVDVIDPYYQPPVEVVNVIGPPPPVEVIMPSPVYNQPVVVVEQPSYNQPGPPQGPSDAECCMLLGACCVMEECGLCVIM

SEQ ID NO: 27532 - DNA, 2639 bp, DROSOPHILA
gaaacaaaatcaacaaagaagcaccaagaacagcaggggtcttctcgtttgaaaagtcttgaatacacttttcgtataaacatttaagaagcacttctccttatagtcagaacatatgtaaaaatttacatttatatagctggtattgctgaaaacagtcggaatatctgcttgagtaaaaagatttaaaatcaaaatttttgtaattttaggatagtatttatttatacttgtgtttaggcaaaaacccacattattgcataataaaaataaatttttctcaaagcatgtatgtaaaaagtgggcacaccaatcagctaaatgctagagtatctccgatagaatagagccagcaaaacagcttaaagactttggctgtgccaactgcttactcacttgccaaattcgcaaagcggatttagcttgtagccaaactttaaatgagttcaagcagattttgagcgcccatcgagctccaacatcgcccccgtttccagttacgcccccgccccccattgatgactgtacttctggcgctgatgaagcataatgatgatggctttgcctgattgattgattgatagctgaaggattggtcgcgagcgctgggatggtgccccctcaatttgcacttgaaacttaagcgcacggccggccgcgaatgaattcctaacaagaagaaattcagattgctcatacgccgcgtcagccgtcgtgcggtgtataattttagaccatcaacgatgcaccacatatagcacccccaccttcggctcactcccccctcgcggtacgaccaattaatttcgttcaaataattatgaatgttggaatattttttgtacacaatatttgtatgtagcattggggcaacgagcgccgcttttttacgacgaccgtgagccggaagtgctagcgaaaactgtcgcaccagcgatgccagtgggcacatggcacatggcattttcgatctccctcggcggcgccagttgcattcggaatggatcagtggacgggtgtgcaccgggcgttcgtcatacgcgcctactacaagagcaatgactccatcagcaccgcccagcggctcttcaagaagcagttcagcatttaccaaacgccgccgacgaatgtcatcaagtcatggctgagacacttcgagagcacaggatcctcgcaaggaggttgtggaggatatgcacgatcctcgctgcctgtaagtgaagtattcagacccagtaaggggaatagagatgaactgtaacgctccaaaagtataaagttgtaggctatactttttttttaatgatttgttctataaatattgaattcaagtctttaactgtaaatgattcggactattaattaaagattctctgataaatctataagaactttaaagacgtggtgcatatagttcgacttcattcagcaagtaaaaagaaaggaacgctcggtacatcttactagcaaatggaataccttatgtggtctagcccctactagttatttaattttataatttctttggtcaaatttgtttcccattaaaaggcaatttgtatcattccagcaaatcttctgtaccatttgcaatcagtgcctgagtaatgagaagaactttagcagctccgtgaagtgaatatgcacatggggcataagttaatctgtttatcgtaaataagttagtgtgtatggttcgcaaataaatttcttggctaattaacaagcttgccaaatcaacacatctgcccgctggctggctgtcttgacccacttgctcgtttgcatttctgaaaaatgtatacgcaaaaaccaaaatcagaaattcttttgagcaagtgtgtcatgaaattgccattcgtttctgctctatatacctgggcagcagataaaacaaatattttccaagtataccaaccgacgggggtgtacacatcacgtcaacgccgcaaattggtaagtaatccagccagattaaatcgaaattcattgccattcccgccacaattctcccgatccattaggttcgttccgctgcaaatttttcaggctctaatatgtcaccttggtcacagctgaaaccgatggagtggtgtaaggccgtttacagggactatcattcctggtcattcgtcaagtgttccctggcattctgtgccggtgtcctcctggtccgaagcctcgatggaaagttgccggccagcagctagaaacccgaaatttagacctataactaattgaatataggatcatattgccagtcatctaaccaaattgtcgtcgacgaaggagcgaaagaaatcaggatgactcaaacgctttaaatttagctggtatattcgtttacttgttgacttaaataaaacaacaaaaattaagttcacaagtttatagttttttaaaaatttgaccaaaaacaaatcatggcagctggaatctaaaataaatatgaaatcgacgagcgtcgtacactgtgccaaatttccattgattggcatgcaattttaaattaactttaagaatactttccatttttttttataataaacaagcctttgcttcatggactttagctcatccttagtggcctttgtgactttcatttggtttatgacacaactcaagtccttgcgaccaat

SEQ ID NO: 27533 - DNA, 282 bp, DROSOPHILA
atggatcagtggacgggtgtgcaccgggcgttcgtcatacgcgcctactacaagagcaatgactccatcagcaccgcccagcggctcttcaagaagcagttcagcatttaccaaacgccgccgacgaatgtcatcaagtcatggctgagacacttcgagagcacaggatcctcgcaaggaggttgtggaggatatgcacgatcctcgctgcctcaaatcttctgtaccatttgcaatcagtgcctgagtaatgagaagaactttagcagctccgtgaagtga

SEQ ID NO: 27534 - protein, 93 aa, DROSOPHILA
MDQWTGVHRAFVIRAYYKSNDSISTAQRLFKKQFSIYQTPPTNVIKSWLRHFESTGSSQGGCGGYARSSLPQIFCTICNQCLSNEKNFSSSVK

SEQ ID NO: 27535 - DNA, 9688 bp, DROSOPHILA; identical to SEQ ID NO: 12796

SEQ ID NO: 27536 - DNA, 2038 bp, DROSOPHILA
tttattttgcagtcacaatcgcggtcacactggtcataggcaataagaaaaaaaaactccacggcacggtcgttcaattaagttaatttttctaagtaaacatacaagtgcagatactccgtgcgcatccaagcgatcgtaaaactgaccacgccgcagttgataaacgcaaatcatagacgcgcttcgtagttgcgccagcatcgcgctccacgtgtgaaaatagccaggaaaagcgaacacacaaacggacacacacgcacacgcgcgcatacgtcaagtacacgtacacaaatgcgcgcgagggaaaagcgctaggtcagaggaaagtgaaaagtgaaaagcgtgaggagagcgcgacgacgcaggaatcggacgacgtaaccaggtgggggaaaatggcgctgctcgcctaccgggacaagcacatcctgagtgcccagcagctgaggaagctcagcgaacacaagtactcctgcttcagtgtcagcctgctcgatccgctgctgcagccgtggtggaactggctggtcgcccagacgcccctttggctggcccccaatctcattaccatcgtgggactgatcctcaatgtggtcaccaccctgatattaatctgttatagcccaaatggcgttgaggctccgccgcgttggacctgcttgctctgcgcgctgggtttgttcatctaccagagtctggactccatcgacgggaagcaggcgcgacgcacgaatacctcatcgccgttgggcgaacttttcgaccatggctgtgactccatatcgacggtgtttgtggccctctcggcgtgcatctcctgccaactgggccactatcccaactggctgttcttccagtgcttctgtgctattgcgctcttctactgcgcccactggcagacgtatgtgtctggaacgatgcggttcggcagaattgatgtgacagaggctcagttctcaattatagccattcatttggtttcggctgcactgggtcctgagatctggctcaccaagatcggcattggcagtatacagctttggtatgggccggcagtgacgacaattgtgtgcggtctgctctccctaacttatgtgttttccgtcattaaagccggtggtgttggcaagaacggctcgacagttgctggcaccagtgtcctctcgcccagcattccgctcacgctggtggtgctgcccgccctgatgattgcccagaagtcgccgcagaacctcttcaccgagcacgcatcggtgtacatcatggcgttcggcatggtggccgccaaggtcaccaataagctggtgatcgctcacatgaccaaggcggagatggagtatctggactggtcgctgctcggcccctcgctgctgttcctcaaccagtacttcaactgcatcgtgccagagatctggctactgtggttcacgctcatctggggcacccaggatctgctgcgctactgcgcccaggtgtgcctcgagatttgccagcacctgcgcatcgatctcttccggataccgtacacgcccaaaggcgcgaccccgcatccagccaccgcatcggtgagcagccagagcaactttggcagcagtgcggacaagaacggtggcagcgcgcatcgaaagtcgaagagcaaaccgcactaggctccggttatgcgctacattaattagtaattttacaaatttacgtcgttagaaccgagggatactcgtagaagcaggcgaagtgggagcgcaattaatacaaaccaaacccaacaaaattcaccgtcgatgttttggctaaataaacataaccaaaaccactgagaaacaaccaaacgaaatgaaactaaacaataaagcagatagtgaagttagcgaaagggcgaagcaagatgtggctcctacattttaggatatagtttacaacgcgtcgttgtagcaaagaaggcaaagtggctaaggctgctgggagacagaactgttgcagtctccggatatcaattatatggctaaatatttaaagaaaataaatacctatattttgt

SEQ ID NO: 27537 - protein, 417 aa, DROSOPHILA
MALLAYRDKHILSAQQLRKLSEHKYSCFSVSLLDPLLQPWWNWLVAQTPLWLAPNLITIVGLILNVVTTLILICYSPNGVEAPPRWTCLLCALGLFIYQSLDSIDGKQARRTNTSSPLGELFDHGCDSISTVFVALSACISCQLGHYPNWLFFQCFCAIALFYCAHWQTYVSGTMRFGRIDVTEAQFSIIAIHLVSAALGPEIWLTKIGIGSIQLWYGPAVTTIVCGLLSLTYVFSVIKAGGVGKNGSTVAGTSVLSPSIPLTLVVLPALMIAQKSPQNLFTEHASVYIMAFGMVAAKVTNKLVIAHMTKAEMEYLDWSLLGPSLLFLNQYFNCIVPEIWLLWFTLIWGTQDLLRYCAQVCLEICQHLRIDLFRIPYTPKGATPHPATASVSSQSNFGSSADKNGGSAHRKSKSKPH

SEQ ID NO: 27538 - DNA, 5465 bp, DROSOPHILA
aggtcgaaaaaggaaaatgcgagaatgagcagcagaagaaatgcagagagcaagaacggagaaagaaatgcgaagaggaggagaaaaagaaaaaatgcgaagaggaagagataaaagagaaatgcgaacaggaactccaaaagcttaaatgcgccgaagaagcgaaaaagagaaaatgcgagaaactgaaaaagaaactggaatcgcttaagaacgaagaaaaagaactgaactccaagttaaaagacctaaaggacaaggaagaacgattgaagaaagcggatgaagaagagaaacggaaaaaatgcgaggaagataggattttgaaagaatgtgatgaattcgatcagaaagagaaagccgccgaagcagaggaaaaaaagaagaaaaaataaacctatcctgaaatttaatctcttaaaggaagagaacgtatggcttggataacctataatttgtaacgcagacaggtggacaactgcgcttttaaggagcccaaaatatcattgcttgcccaaggagaaaggcttaaaggaccacggcggtcgtcaaggccgcttgtccttcagttgatgcagcggatttcctaccctaggatatatttccctagatatatgatttctagattttcagaccaggtaatcgactgtagcaactgggctatcgtccttgccaccgtcaccgtggtcttggccacctcgcacgacagcaatggaaagttatgggtactgtgaaaagcgagtggtacattgatcacctttgaccccgttgcctttctagtagacgcccaggtcatcagcattgttgtccatatttccttgtgtttcgcactcgaagttgtcatgaattttatttcactttgcttagttttttaataaaatctccagtgactgcccccacgtaaacttggccttagtttcttttttttattaaccatccaaatttcattggtaaccgcagcacttagaaggacccttccgcagcaatcgtgctctttggaatgtttcgcaggtttattaacttgccgctaaaacgactgtgggtctgtcatcaacccagtccatacatccaaccctggaccctggtaaagagcaatggatctgcatttagtcagcagactaccttcttccaggatgatcctccgatgtcatacgacattctcaccaacgatctcagccaaacgggctcttcgccatcgataagacaggttccacaaaaggtctgcattgtgggcgaagttcacagactcaaagtctgtggatacagacaccctggcagctgttattttatcagtcagatgggacgcctctaccataaagaatcgggcaggggcaaaagggaatcccgtccagacgtctatcaacgagctcggcgttttagggaaagatcgaatggaaaaatgaacaaacgtctaagggatctaatgaacgagggtgttgacggattagacaagggaattgagaagaacgaaaggactaaccgcatgaagcggtctaccaaaaagaaatactcgccgagttcctctcacagatcatatccagatgataaggaggcgtacctcgagtttaaggaacccaaacgtacattcagaaattttgttaccatgctcatgtcaaagggtagaaaagtaaggcaacaattgcaggagggaaaggatgccgatcttctgagataccactcagataacaaggctctaatgcagcattatcaaaataaaaggaaatacaaacggcaaataacgcaaagaaagccaaaggcaaagccacaagttccaaaggcaaaatataatgacgattcgatagattggacctttttcgaagaatctttaaatccacagaggcaaaataagttgggtcaggatgcatttttcccgttaaaaactaaatccaaaagtgttggaagagcaaacgacaaagaaatatcttcacataacaaaccaatacttcctcactcaatggaagtaataaaggaacgtgaggagaaactcataagtaaagccaagaaggaaactgagggtcgtcttccatgtcttagagaatcttctttcaagtctattaaccaaaaaaatgtgagtcgaattgataacaaaaatatatgcgtaaaatgcattgatccacaggtgccttcatcttctgcagaacagaaagtggattctaagagggtcaacggaaatatcatggactcatgttcccacaatttgggtggtcagaaaaacgagtcaggacccaaaatgattccaccatatgatcaaaaactaacgggcttctatgacactttaaagaaccgaattctgtgtgataatagttcggaaaaaaaagattgtaaagctgcactaaagccacccaatactgctgattgtatctcgaaaattccttgttcaaatgctgcaaacgtggataaccagccaccatcttgtcaatccggcaacagcttgcataaagtatttaaaagccgtgttcacaaaaatctatggtgttcacctgaaaatgatatcgacaaaggaggcataaagtctaagaaagatattgatttctcaaagtttttttcaatgttagatgataaagacaagctgaaatttcgagtagcagagctaatggttaggtgtatgttcctgatggagaaaagaatgcaacaggatttgaaaggaaataaagtctgcaatgttgaggaaaaggacaataatgtaaatcaattagttgaaaatttctggaggcattacatacagtgttgtgagtgccagaaaaaggatgcttgcgctctttcgaatccatcaatgttgggaaatacggaatatacgggcatattaaataaagtagatgttattattaagcagtgcacacacataaaagaggtgatcgaaggacggtctctgaagaaccaatgtattaaacacggtctaagccaaagcattgcagaagaattctacaaagctatggctaagctagaaaagatgagtgcaaatgaaaaacttaagactgaatctaatgaatttggtctgaatcgaaactgcgccattgagtctttaaaggataagtgtcaagaaaaaaaggatttcgttgaagatgtgctaaaaaatatgtctttagagtgcaaaacatctgacaagtacgagcaagaccttttgtcaaaaatgaagctcgttataaaagaattgcaaaaaaagttagcagaagaaaaggaaaacattataagcacaaagcaaaaggatttattttctgaaaaatgtgcagaagaagaattgaagagtaaatgtgctaaagaagaactgaaggaaaagtgtgcaatagaagaattaaaggagaaatgtgctgaagaggagttacggaagatgtgtgcaatagaggatctgaaagaaaagtgcgcagaagaagaattgaaaaaaaaatgtgccaaggaaaacttaaaagaaaaatgtgccagaaaagaattaaagaaagcatgcgcagaagaagagttcagaaggaaatgtgcagaaaacgaacttaaggaaaagtgtgcagagcaagaattaaaggaaaaatgtgcattaaaagagtttagggaactttgtgcgaacgaagaactgaagcaaaaatgcgcagaaaaagatttcaaggacaaatgttcggatgaaaatctcaaagagagaagctcattaaatgagcagcaaagacaatgcgaagaattctcctggagaaagagatgtgctgagttcgccctaaagatgaagtgtgaaaataataatagaggcaatttcttgaattcactaggagagccaaagaaatattcggatgagtataagaattcaaaaaagttatgtaccgatgagaagcccaagaagaactctaccgaaaaggatcagcatcgcagtaccttaggaaaacttaaagagaaggtaggacttacgggaaagggtaacggaaatgtggacaagtttatatcaacgaaagctaataaatggcatcagtcgtttggcagacgaaaaatatcggcaaaagaggacattcataactggggacttataaagaagattttggacaaggaagacaaggcgatgcgaaacaagggacttcaacatgaaaaaaactctgaactcgagggattaggtatcttcttaagatctgccctatcaagacccaggagaagaccacaacgaggattggaagacgaccactgtacgcgtgacagaaacaggtttttcaatccacgtcagtggtctttatttcccgggcttgcccctctgtactaccaaaatttgcgacggagtcctctgctggagaccaactttctcgttcgccaattgcttcccaacctgaagccactggccatcaacgattacctcagtgtgttctggctccatcccttgaattcttgtaaccctttcggcaaacggtgctacaaaagggacgatttctgcaggggttcgtcctttttgtatccctttactgaaatggttacgagaaatttcaaagatgagcgccagtaaaaaataatcgaaattgcggagagatcctgatgagctgctactatgtgatgatgccaacttaaaaatacatattttaacccaaatttaaataaaaagcaatatacaacttaatagaaaagaaaagaccagcaaaactactttgaaacgcagtaaaataaattcactgataagagagtttcacaagactgaggaatgcaaattttacagccgttttctaatattccatcatgaataaatatatatggattgcatacaaatatgccgtctatttatttaggagtatcgcttgggccgaatggccaaagcaaacaaaatggacagctcacaatattgattgctgtgttgttttattgatgaaataatgaatttgccaccgccaccagccacccagacaacatcagataatatgctcaatgtctgtcatagacatggttatgaattttacccgacatgatagcgaaacttatcgggtatcgaagcaagccagcttgaggtgatggccttgtgtttgatcagggacatggggcacgggcaggatgtcaggacgtcgcttatttggttttcatttcgtattgattcgcagttagtccgttggccaaagcaaatttgcagacgcctgtgacccatcatcaacagccatccgtttaaattattaacgtatgagtaatttttatgacatataaacaaaagtctgtgccgggggcacggctaacaggatccttctgctccggtttctgctatatgtcatgtgttgtcttgtcggctcgtttcgggttttccatttcccagacgaccagaccccttcgagtcccatgcgaagaagctttttggggagtggtttttgtgtgcgacaaatgagatgtgtgtaattaagttcgggatgctcacaaaacagactcttagttgcccagggaatttgcgggacgcaaattgcaactgataatcggactcctttaatgtcctagctcatagaatttgtacctcaaaacattactcgtta

SEQ ID NO: 27539 - DNA, 3465 bp, DROSOPHILA
atgtttcgcaggtttattaacttgccgctaaaacgactgtgggtctgtcatcaacccagtccatacatccaaccctggaccctggtaaagagcaatggatctgcatttagtcagcagactaccttcttccaggatgatcctccgatgtcatacgacattctcaccaacgatctcagccaaacgggctcttcgccatcgataagacaggttccacaaaaggtctgcattgtgggcgaagttcacagactcaaagtctgtggatacagacaccctggcagctgttattttatcagtcagatgggacgcctctaccataaagaatcgggcaggggcaaaagggaatcccgtccagacgtctatcaacgagctcggcgttttagggaaagatcgaatggaaaaatgaacaaacgtctaagggatctaatgaacgagggtgttgacggattagacaagggaattgagaagaacgaaaggactaaccgcatgaagcggtctaccaaaaagaaatactcgccgagttcctctcacagatcatatccagatgataaggaggcgtacctcgagtttaaggaacccaaacgtacattcagaaattttgttaccatgctcatgtcaaagggtagaaaagtaaggcaacaattgcaggagggaaaggatgccgatcttctgagataccactcagataacaaggctctaatgcagcattatcaaaataaaaggaaatacaaacggcaaataacgcaaagaaagccaaaggcaaagccacaagttccaaaggcaaaatataatgacgattcgatagattggacctttttcgaagaatctttaaatccacagaggcaaaataagttgggtcaggatgcatttttcccgttaaaaactaaatccaaaagtgttggaagagcaaacgacaaagaaatatcttcacataacaaaccaatacttcctcactcaatggaagtaataaaggaacgtgaggagaaactcataagtaaagccaagaaggaaactgagggtcgtcttccatgtcttagagaatcttctttcaagtctattaaccaaaaaaatgtgagtcgaattgataacaaaaatatatgcgtaaaatgcattgatccacaggtgccttcatcttctgcagaacagaaagtggattctaagagggtcaacggaaatatcatggactcatgttcccacaatttgggtggtcagaaaaacgagtcaggacccaaaatgattccaccatatgatcaaaaactaacgggcttctatgacactttaaagaaccgaattctgtgtgataatagttcggaaaaaaaagattgtaaagctgcactaaagccacccaatactgctgattgtatctcgaaaattccttgttcaaatgctgcaaacgtggataaccagccaccatcttgtcaatccggcaacagcttgcataaagtatttaaaagccgtgttcacaaaaatctatggtgttcacctgaaaatgatatcgacaaaggaggcataaagtctaagaaagatattgatttctcaaagtttttttcaatgttagatgataaagacaagctgaaatttcgagtagcagagctaatggttaggtgtatgttcctgatggagaaaagaatgcaacaggatttgaaaggaaataaagtctgcaatgttgaggaaaaggacaataatgtaaatcaattagttgaaaatttctggaggcattacatacagtgttgtgagtgccagaaaaaggatgcttgcgctctttcgaatccatcaatgttgggaaatacggaatatacgggcatattaaataaagtagatgttattattaagcagtgcacacacataaaagaggtgatcgaaggacggtctctgaagaaccaatgtattaaacacggtctaagccaaagcattgcagaagaattctacaaagctatggctaagctagaaaagatgagtgcaaatgaaaaacttaagactgaatctaatgaatttggtctgaatcgaaactgcgccattgagtctttaaaggataagtgtcaagaaaaaaaggatttcgttgaagatgtgctaaaaaatatgtctttagagtgcaaaacatctgacaagtacgagcaagaccttttgtcaaaaatgaagctcgttataaaagaattgcaaaaaaagttagcagaagaaaaggaaaacattataagcacaaagcaaaaggatttattttctgaaaaatgtgcagaagaagaattgaagagtaaatgtgctaaagaagaactgaaggaaaagtgtgcaatagaagaattaaaggagaaatgtgctgaagaggagttacggaagatgtgtgcaatagaggatctgaaagaaaagtgcgcagaagaagaattgaaaaaaaaatgtgccaaggaaaacttaaaagaaaaatgtgccagaaaagaattaaagaaagcatgcgcagaagaagagttcagaaggaaatgtgcagaaaacgaacttaaggaaaagtgtgcagagcaagaattaaaggaaaaatgtgcattaaaagagtttagggaactttgtgcgaacgaagaactgaagcaaaaatgcgcagaaaaagatttcaaggacaaatgttcggatgaaaatctcaaagagagaagctcattaaatgagcagcaaagacaatgcgaagaattctcctggagaaagagatgtgctgagttcgccctaaagatgaagtgtgaaaataataatagaggcaatttcttgaattcactaggagagccaaagaaatattcggatgagtataagaattcaaaaaagttatgtaccgatgagaagcccaagaagaactctaccgaaaaggatcagcatcgcagtaccttaggaaaacttaaagagaaggtaggacttacgggaaagggtaacggaaatgtggacaagtttatatcaacgaaagctaataaatggcatcagtcgtttggcagacgaaaaatatcggcaaaagaggacattcataactggggacttataaagaagattttggacaaggaagacaaggcgatgcgaaacaagggacttcaacatgaaaaaaactctgaactcgagggattaggtatcttcttaagatctgccctatcaagacccaggagaagaccacaacgaggattggaagacgaccactgtacgcgtgacagaaacaggtttttcaatccacgtcagtggtctttatttcccgggcttgcccctctgtactaccaaaatttgcgacggagtcctctgctggagaccaactttctcgttcgccaattgcttcccaacctgaagccactggccatcaacgattacctcagtgtgttctggctccatcccttgaattcttgtaaccctttcggcaaacggtgctacaaaagggacgatttctgcaggggttcgtcctttttgtatccctttactgaaatggttacgagaaatttcaaagatgagcgccagtaa

SEQ ID NO: 27540 - protein, 1154 aa, DROSOPHILA
MFRRFINLPLKRLWVCHQPSPYIQPWTLVKSNGSAFSQQTTFFQDDPPMSYDILTNDLSQTGSSPSIRQVPQKVCIVGEVHRLKVCGYRHPGSCYFISQMGRLYHKESGRGKRESRPDVYQRARRFRERSNGKMNKRLRDLMNEGVDGLDKGIEKNERTNRMKRSTKKKYSPSSSHRSYPDDKEAYLEFKEPKRTFRNFVTMLMSKGRKVRQQLQEGKDADLLRYHSDNKALMQHYQNKRKYKRQITQRKPKAKPQVPKAKYNDDSIDWTFFEESLNPQRQNKLGQDAFFPLKTKSKSVGRANDKEISSHNKPILPHSMEVIKEREEKLISKAKKETEGRLPCLRESSFKSINQKNVSRIDNKNICVKCIDPQVPSSSAEQKVDSKRVNGNIMDSCSHNLGGQKNESGPKMIPPYDQKLTGFYDTLKNRILCDNSSEKKDCKAALKPPNTADCISKIPCSNAANVDNQPPSCQSGNSLHKVFKSRVHKNLWCSPENDIDKGGIKSKKDIDFSKFFSMLDDKDKLKFRVAELMVRCMFLMEKRMQQDLKGNKVCNVEEKDNNVNQLVENFWRHYIQCCECQKKDACALSNPSMLGNTEYTGILNKVDVIIKQCTHIKEVIEGRSLKNQCIKHGLSQSIAEEFYKAMAKLEKMSANEKLKTESNEFGLNRNCAIESLKDKCQEKKDFVEDVLKNMSLECKTSDKYEQDLLSKMKLVIKELQKKLAEEKENIISTKQKDLFSEKCAEEELKSKCAKEELKEKCAIEELKEKCAEEELRKMCAIEDLKEKCAEEELKKKCAKENLKEKCARKELKKACAEEEFRRKCAENELKEKCAEQELKEKCALKEFRELCANEELKQKCAEKDFKDKCSDENLKERSSLNEQQRQCEEFSWRKRCAEFALKMKCENNNRGNFLNSLGEPKKYSDEYKNSKKLCTDEKPKKNSTEKDQHRSTLGKLKEKVGLTGKGNGNVDKFISTKANKWHQSFGRRKISAKEDIHNWGLIKKILDKEDKAMRNKGLQHEKNSELEGLGIFLRSALSRPRRRPQRGLEDDHCTRDRNRFFNPRQWSLFPGLAPLYYQNLRRSPLLETNFLVRQLLPNLKPLAINDYLSVFWLHPLNSCNPFGKRCYKRDDFCRGSSFLYPFTEMVTRNFKDERQ

SEQ ID NO: 27541 - DNA, 3777 bp, DROSOPHILA
gcagccgagatctatggcctgccacgtacccgcgagatctatgagaaggccatcgaatcgctgcccgagcagaatatgcgccacatgtgcgttaagtttgctgagttggaaacgaagttgggcgaagtggatcgagctagagccatctatgctcattgctcacaggtatgataatatatatagatttctaatgcatcacttaatctaattattgtttgcattcttcaggtttgtgatccccgcatcactgcagacttttggcaaacttggaaggagttcgaagtgcgtcacggcaacgaagacacaatgcgcgaaatgctgcgcatcaagcgctctgtgcaggccacttacaatacgcaggtgaacatgatggccgcccaattcctgagcacaaacaacggagcggctgcggatgctggagcaggagctggaccggatgccatgcgattgctggaggagaaagctcgccaggcggcagccgagtccaaacagaagcccatcgagaaggcggcctcgaatattatgtttgtgcgcggtgagactcagggtggtgctaaggataaaaaggatacggtcgtcaatcctgatgagatcgacattggagacagcgacgaggacgatgaggaggaggacgacgatgaggagaacgagatgacgaacgagaatcaggccagtgcagcggtcacgaaaaccgacgaggaaggcctggtcatgaagaaactgcgcttcgaacaaaaggccattccagccaaggtcttcggcagcctcaagccctcaaatcaaggcgactctgatggagagtaaatgtttatacatatatatgacttttttcggggtaaatacatgtatgtcgaaagttttacaattgtaattgatcggtttttatgttctggcctcaattagattcttaaatggtactttgatattaattgttgtcaaacgaagggggcctgttagatattgtctccgttttggatgatctagttagtatagccttaggccaaacagaggaacacactttcaactgtcattccaaaattgttaggcacttcgtgatctaaaaaagctaaccagacgtgcgcaagggcggactaaccaggactaaccacacaccgtgtatctcgaagatggcatccacacgcatgatcagtgcttttacgcgcaatccaagattatatcaacaggtcacggcaccctggaaatcgtacaatctgtttggaacaccactttttaaccacagacttcagccagcggattctcaaatctggaggggattagcagacaagtgtgacaacaagactgttatcaagggcgtggtggtgggcgtctactccaaggagggcgacggtaaggaggtcaagatgacgtccagcggcgagaagttcgacgaccgaactcagggcaaggtctcggagctgttgcgcgaaactggaatcaagggggaactgggcaagggtaaggtcttcatgaacgtggatgccgaattccgggcagtggctgtggtgggtttgggccaagaaggtgccggcttcaatgacctggagaatatcgacgagggtatggagaatgcccgcgttgccgctggcgtcggagctcgggcattgcaactgcagggttgcacggaagtctttgtggactccatggaatatccggagcaggcggcggagggcagtgctctggccatctggcgttacaatagcaacaagcgcaagcaggatcgcactcaggtacccaaactggatctgtacgactcaccggatgtggatgcctggacgaggggtctcttcaaggcggaatctcagaacttggctcgaagattgagcgattcgccggctaatcagatgacccccaccatattcgcccaatcggcggtggatgccctgtgtccgtgcggcgtttccgtggaggtgcgatccatggattggatagaaatgaatcatctcaattcgtttctaatgatagccaaaggcagctgcgagccaccggtggtcctggaggtcagctactgcggcacagcacccgaggatcggcccattctgctgttgggcaagggtttgacctacaacagtggcggattgtgcctgcggccaaaggattgcctgcatatgtaccgcggctgcatggcgggagcagccgtttgtgtggccgccgttcgagctgcggcagccctttccctgcctgtaaacatcacggccgtactgccgctctgcgagaatatgccatcgggaatggctgtaaagccgggtgatgtggtcaccctgctcaatggcaagacgatgggtattgtggatgtgagcaaagctggaacggtggtattggctgatcccctgctctttgcccagacgacgtacaagcctcgtctggtggtggacttggccaccgttggctatggcgtctgtgctggccttggagaatcggctgccggattgtttaccaattccaatttcatagccaagcagttcgagaaggctggcggcctgactggagatcgtttatggaggctgcccttgtggcgctacttcaagcagctggtaaccccgaatctcaccttcgacatcagcaataggggcattggtcccgcctccagttgcattgctgccgccgtgctgcacgaactggttccatgcgcggattgggcccacattgatatccggaatgtgggcatgctgacacgccacaatccgctgccgtatctgctcaaggatcggatgaccggccgacccacccgcaccatcgtacagttcctgtatcagatggcctgtccggaaagcaagtagtctccggatctggatcgtccgcacctgtggcgctagttaccaccattgctcgttctattttacatttgttacgtgtcccgtttttggtgtttgttcttttcacaatattgtctccatgtccaaatttttggtttagtgttccgtgagcagctgggtaacgacacattgaagacagttttacggacaaatggaccagctcagttattaatggtggaagcagttcgactggcttctatggatcgtctcccagctgcacaaaattaaatgattttaaagtgcaacatttatggttacttctaatttatttaataatcgtataatctcattgcataatctcgttattctagtggagggtatagatctgtctgtccgtataaaaggacagtgatcacattgtagtaaattatttaagttttttttaagcattataattataaaagcttgacccctccacacatcaaatgctacttacttcagttaattgagcgagaatgcgaaatgggagcgcagggaaagtgttttatataaacttgacagcccactccacgccaatcttgcttttggccctttttcttgttgttgcagcactgttacgagggcggcttattagcctaattgcgtgaagttggctttaatgagtcgcaaaaggggccaagcctggcccacaaaaggccacaaagcaaaaggcgccttctgtttgttgctgctgctgtcctgttgtggctttgaatttatgacacggctttaatgggttaactgggttaatgctcatgcctcagctcatcaactatcacccccctcccccctcaccaacgttccatggctcgaatttttgacaattaagccgacatttgcgttcccagctagaattcctcgaggattcgggaaagataagggaggatgctacttgaaggatccccttggcagctaaaagtgcgaagagcgcgaaaatcttaatacggcgacattttgcacaagtcattaggccatgcaaagtgat

SEQ ID NO: 27542 - DNA, 1777 bp, DROSOPHILA
ccaaacagaggaacacactttcaactgtcattccaaaattgttaggcacttcgtgatctaaaaaagctaaccagacgtgcgcaagggcggactaaccaggactaaccacacaccgtgtatctcgaagatggcatccacacgcatgatcagtgcttttacgcgcaatccaagattatatcaacaggtcacggcaccctggaaatcgtacaatctgtttggaacaccactttttaaccacagacttcagccagcggattctcaaatctggaggggattagcagacaagtgtgacaacaagactgttatcaagggcgtggtggtgggcgtctactccaaggagggcgacggtaaggaggtcaagatgacgtccagcggcgagaagttcgacgaccgaactcagggcaaggtctcggagctgttgcgcgaaactggaatcaagggggaactgggcaagggtaaggtcttcatgaacgtggatgccgaattccgggcagtggctgtggtgggtttgggccaagaaggtgccggcttcaatgacctggagaatatcgacgagggtatggagaatgcccgcgttgccgctggcgtcggagctcgggcattgcaactgcagggttgcacggaagtctttgtggactccatggaatatccggagcaggcggcggagggcagtgctctggccatctggcgttacaatagcaacaagcgcaagcaggatcgcactcaggtacccaaactggatctgtacgactcaccggatgtggatgcctggacgaggggtctcttcaaggcggaatctcagaacttggctcgaagattgagcgattcgccggctaatcagatgacccccaccatattcgcccaatcggcggtggatgccctgtgtccgtgcggcgtttccgtggaggtgcgatccatggattggatagaaatgaatcatctcaattcgtttctaatgatagccaaaggcagctgcgagccaccggtggtcctggaggtcagctactgcggcacagcacccgaggatcggcccattctgctgttgggcaagggtttgacctacaacagtggcggattgtgcctgcggccaaaggattgcctgcatatgtaccgcggctgcatggcgggagcagccgtttgtgtggccgccgttcgagctgcggcagccctttccctgcctgtaaacatcacggccgtactgccgctctgcgagaatatgccatcgggaatggctgtaaagccgggtgatgtggtcaccctgctcaatggcaagacgatgggtattgtggatgtgagcaaagctggaacggtggtattggctgatcccctgctctttgcccagacgacgtacaagcctcgtctggtggtggacttggccaccgttggctatggcgtctgtgctggccttggagaatcggctgccggattgtttaccaattccaatttcatagccaagcagttcgagaaggctggcggcctgactggagatcgtttatggaggctgcccttgtggcgctacttcaagcagctggtaaccccgaatctcaccttcgacatcagcaataggggcattggtcccgcctccagttgcattgctgccgccgtgctgcacgaactggttccatgcgcggattgggcccacattgatatccggaatgtgggcatgctgacacgccacaatccgctgccgtatctgctcaaggatcggatgaccggccgacccacccgcaccatcgtacagttcctgtatcagatggcctgtccggaaagcaagtag

SEQ ID NO: 27543 - protein, 549 aa, DROSOPHILA
MASTRMISAFTRNPRLYQQVTAPWKSYNLFGTPLFNHRLQPADSQIWRGLADKCDNKTVIKGVVVGVYSKEGDGKEVKMTSSGEKFDDRTQGKVSELLRETGIKGELGKGKVFMNVDAEFRAVAVVGLGQEGAGFNDLENIDEGMENARVAAGVGARALQLQGCTEVFVDSMEYPEQAAEGSALAIWRYNSNKRKQDRTQVPKLDLYDSPDVDAWTRGLFKAESQNLARRLSDSPANQMTPTIFAQSAVDALCPCGVSVEVRSMDWIEMNHLNSFLMIAKGSCEPPVVLEVSYCGTAPEDRPILLLGKGLTYNSGGLCLRPKDCLHMYRGCMAGAAVCVAAVRAAAALSLPVNITAVLPLCENMPSGMAVKPGDVVTLLNGKTMGIVDVSKAGTVVLADPLLFAQTTYKPRLVVDLATVGYGVCAGLGESAAGLFTNSNFIAKQFEKAGGLTGDRLWRLPLWRYFKQLVTPNLTFDISNRGIGPASSCIAAAVLHELVPCADWAHIDIRNVGMLTRHNPLPYLLKDRMTGRPTRTIVQFLYQMACPESK

SEQ ID NO: 27544 - DNA, 6163 bp, DROSOPHILA
agtatttgagttacactgaatataaaaaaatgaaaagcttcctaaaactatatacaaaacttaatttttcttgttcattagcacttcataaaagtattcttaagttattttaaaaactttttttcatttaaagacattacacctctactcaagtttaaaattgaaaaatgcctggcacttcaaggacatttttcgctacaacttaccgaaactgagttcgcttttccagcaaactgattggcagtgctttccttagcggagctggcgaactcccaggcgtagaggcgtctccattggccatttcacgcgcccgctgcatatcttcgggattcatttcgaacttaattacaaccgttcgctggcaacgttcgccatcaactacgctcagattttatgcagttcacacgaccagataggcacgcatcgcacacctgccgcacgcacacgcaaaaaaaaaaaaaaacggcgagcacaccttgagttcggcgggcaaaaaaggcgaaaacatgcggctaaaacacgatcgcgcgcattaacacaatggcacaagattttagccgcgtaatgaacatggctcgtaccgcctgagggcgcaaaacatatagcctcagcatcggcgatagcaacatacactttcgattcgcacccaaatcgatgcaaactaatgctttctgacaggcccaagtgcgtggcaaccacgtgaatccaatccaatccaatccgattccgattcgattggatccaaagacagtcgcgaggtgaacaacatgcaacaagtggcctgggagaggcgctctaaaaaccagtccagatgatctgggtgtgccggctggaactacactaatgcgaaatctacaaggcgaagctggaggagaacacatttcaatcagtttgcaatcaggcttaatctacagcacaacttgacaatgttttataagttatgttcaagctaaatttggtaaaatgcttgaaacattccattaatttgcggctacaagctgaatttacaggtattattttattaagtaatatataattcaattgcttatctttttagaagtgggactttttaatgttaattctcaaagatttgagattcattcattcaatgctctctacaactttttgctacagtttgcaactgcatttatatttaactagctgaaatgtacaatattgcaagagcactggcgtttcgaacagtaaaagttataaaatgatttccatacatttggcaaatgtgtttaaacaatttgttaccgaaaatactacaaaaattacacactaagcaaagggcgaaagcattagaactacaactaaaagccctaacctacggtttctattagctgcagggacttacgcactacacatcgtacaatttcatgttctcgatctcgtccagcgtatcctccgatccggatgccgtcagatccgacagctcgtccaggcacttctgtcgcttgcgcacattccagtgcagtccgtcggctagggaggcgaaccagtcggatatctgatcctgggcgcagatgcatggcacgggataaatggaggtggtcacgcgaaggctgtcgccatggaagagctcctgcctgttgcgtccatcgaagctaacccacgatgtgttgcggctctcgggggatactgatatctgaaaatgtagcagatgttagaaacggatctatgggaattatgagtaaagcgacccaccttcagctccactcctgctggcaccacaatgggtcggaagctaagcgaatgcgggcagatgggagtcaccataatcgccggcacggagggatggatcatggacgcaccggccgccgccgcatatgccgtgcttcccgtgggcgtcgatacgatcagaccgtcgccctgcaccgacgtgatatactttccgtccagaaacagatcaatattgctcagatacggcgatggaccacgatcaatgaccacttcgttgagcaccagtatgctgttggctgcaggtcgcgcctcaccatctagatctgcctccagagtcttagcctcgtgtttcctatcgctcctgcgatgcataacacagcgcaaacgactgcgaagcgttagggcagcgtgaccctccaggacgctggtcagctgctcctcaaagttatcgaaacggaagggtgtgagaaagccgagggagcccaaatggaaggccatgacggggggcacagattgctggaagagcagcgaagcatacagcagggtgccatcgccacccaggcaaactataaagtctatgcgatcggtcagatcatctcggccatctctgcgggcataatgaataggttatttatattatatacacattctcattaaacaccgactcacttgaaagtcactagcttatcccgaatggccttgaatcgcacattttcgttgagctggacatcctccagcacggccgactccacccaaacgaccatgttcttctcctgcagcagccagtccaccaggtagacgaacggtgccagcaccgaggcatcgctgaccttcttgatcacgagcacggtgagtggtggcttgtaccaggtgagacgttgactagccggatcctggatctgcatcaccatggcggagtttttcatgatgcgaccacatggtccgaactgctggacaggcgagggtgcattcaagctgcgagtgcgcctgtaaaatagagttgggaaaacagaacaattagtatggataactttgttgtacctagctccttaaagaccttaaaatatggcgattggttttgggccttagaattggctcctcccgaatgcaattgttattgcaatcatttatatcctcccacttcacattgttgaactcttcgatgctcaaggagctgtggagcggaaacgaggcaaccgcctgcggctgatcaggacgcaggggaaacatttgttcaatatttcaacaggattttcagaatatttggcttgttttctccacctttgcagtatgcagactaagttctctcaactgtaaatcaaccttatgcaaatggcgactgcgaaggcagacagaagtcgagagaaaaacattggggaacattggtgggatacgattccccagaatcgcatttccaattccccttcctgcttgcattcgtagatgcactaagaaaaacaggggcttggttaaacattcagttgtaagggaacttatgtacaataaagtaagcaacaataaagtatttgatttaaaagatctactttaaatgctataaaagttttgaaattcgaacatttggaacaataaatctttattccacttgaatatgtaagtaggaaccatatttttgccagtgcacttattgcgccatcgtaccgatttggatttggattacgaattccatgcttttcgcatgcaatttcatagctaggggaacctttcagctgtttgtccacttacggccaggtgccggaacgcctgcgtcgcccaccacctgacgacgacgaatcaatggcattggcattctcccgggaacgtccccgtgccagacagtttccgttgtggtccggctgcactttcctctgcagattgcgctcgagacagagccgcgtcatggcactgaatccgacatgatgataatgatgctgatggtatatgtggtggctattgggcaatccgtagtgccagcgctgctccaagcgattctcgtgcaaggtggccaaatcaatgtccgacaatgccatttctgcgattgtaactccacttttgtgtccaaaaaagaatgcggtttcatacacttgcgctcatggaatgcagtcggacggcattgtttttggccagcggaaaagggaccaaggttagagttttgttttcacaacacgagagtcggttgcttttaaaaataacacgcccacgcacttttcatcgatgagccaacaaaatatgagcccaaaaaatgtgaatgtgtcggccgtaaaagagaaagtgttttatcagcgaatgtgacacacaaactggtaatcagaaatgcattacgctgatggagtgtttaagaaaaactaggctttatgctttatgtgttcactttaactttatgccaagggtgagataattttccaacgattttccaccactgattattgcgcacaaatgggcggaaaattgatggccataatggaaatgacggagggccctgaatttgtcaaccgggcgatcgcgagtgcgagcaacaactgagcgcctgagttgaccacgttggtccgcagcggactgggttttctactccgcaccattgacagcttcccgattccaatccagatcgcacttagctgagcgcaggcgcagaggccttggcgatcaattagcagttcaattgataacatcgaagctatcaaagcgtatcaattgccgaaattggcacaagtctagaccaaatcgcttttcaatttctttcgtttaaatggaattaagaaaactattttaagatgggttattcaacttttacgaggaaaacatgagtgaagaggttatatctatgagttcctaaacttacttaatatggttaattatttatgcttacaaaattcctgccaagaacctagtacatgccttttttgccattgtactaataaacttaagcaacatagcacttttgttagcctaaaatcgatgtcagcctagttaattaataattagtaagcttatagtaatatattaaaaacaaacaaacaaaacatacactgaatgctagtcgcgtgccaggtcaatggaattatcgcttaaagcacctattcgtacggccaccactgtgttgttgcatgtgagatgggaatccgataagagttgtgtataagaccgcatgattacaaattcgggcaggtgattgggaccttaccaccaccagctgctggtcatgtggttgccgcccagtcccggagccgaggtggatgcagttgctccatccaccgttccaggggcatgcaacagatgacttccatcggcagcggcgtccttttcggtgcagaaatattcctcttggtcggaggagtttaggtcctctggtgctggcattccacttgtatgcctgcagatgcttggagagatcagggacacatctgtgccctatctggaggaatgccgtgctatatatgccgtttaaatgcagtacaccgcactgattgttaacgaattctttcgatgcaaaaaaaaaactggtcaaagttttggctagggctgtcaataagtcgattaaataatcgatagcatcgatttcttggcccatcgcgaaagtaagcgcgaaatttaaaaacccaacggatgtcttcaccttcgtcattcagaagagcattcgtcattcataattaatgtcgacaaaggagtgtacttggcattgcaaattagtcaggcacgtgaaaacaccatttttatttttagcctaatttgtacgtgtttttgagtgcttttaacctctcaaacaaacatttttgttgtttatttttagaaccgcttataaacaatatacaactatatggcggagaaatggcattgtgtgaaaaactttaattagatctaagaatatcatttaatatattgttttttaatgtgtttttattgcacagatagctattaatagcacttggaatctttctttaataggaaatctactatagacactgttgaaactagctttagctgtagtttttgtataaaacctagtctaaactacatgtttactatgtttacctctttatttcccttcctgtgaagctttcttagtccacccacctgaattgtttacgcctctcactcaaatccaggactcttctcaatggcttgggtgagttgcccggcgacgtggctgccgctccatcattttcctcctccagagaactggacaccgaggtacttgccaccatttggagggccaattggagatcctcctcacgcattttttgttgtttttttttattggaaaagtatgaaaaaaaaaccgagttttgagacgacaacctcgttgttccggtggcgagatccaactaagtgacttctcgtgcttcgttttccaaaatatatacaatgcatgcgcatatgtaatacttggcagtgcgatcggagaggtaagttgttgaatagatgctatgcccgcctcgtacactcgtactttgaattcattaagagccttccgatatttaca

SEQ ID NO: 27545 - DNA, 2007 bp, DROSOPHILA
aagaattcgttaacaatcagtgcggtgtactgcatttaaacggcatatatagcacggcattcctccagatagggcacagatgtgtccctgatctctccaagcatctgcaggcatacaagtggaatgccagcaccagaggacctaaactcctccgaccaagaggaatatttctgcaccgaaaaggacgccgctgccgatggaagtcatctgttgcatgcccctggaacggtggatggagcaactgcatccacctcggctccgggactgggcggcaaccacatgaccagcagctggtggtggtaaggtcccaatcacctgcccgaatttgtaatcatgcggtcttatacacaactcttatcggattcccatctcacatgcaacaacacagtggtggccgtacgaataggtgctttaagcgataattccattgacctggcacgcgactagcattcagtgcgcactcgcagcttgaatgcaccctcgcctgtccagcagttcggaccatgtggtcgcatcatgaaaaactccgccatggtgatgcagatccaggatccggctagtcaacgtctcacctggtacaagccaccactcaccgtgctcgtgatcaagaaggtcagcgatgcctcggtgctggcaccgttcgtctacctggtggactggctgctgcaggagaagaacatggtcgtttgggtggagtcggccgtgctggaggatgtccagctcaacgaaaatgtgcgattcaaggccattcgggataagctagtgactttcaaagatggccgagatgatctgaccgatcgcatagactttatagtttgcctgggtggcgatggcaccctgctgtatgcttcgctgctcttccagcaatctgtgccccccgtcatggccttccatttgggctccctcggctttctcacacccttccgtttcgataactttgaggagcagctgaccagcgtcctggagggtcacgctgccctaacgcttcgcagtcgtttgcgctgtgttatgcatcgcaggagcgataggaaacacgaggctaagactctggaggcagatctagatggtgaggcgcgacctgcagccaacagcatactggtgctcaacgaagtggtcattgatcgtggtccatcgccgtatctgagcaatattgatctgtttctggacggaaagtatatcacgtcggtgcagggcgacggtctgatcgtatcgacgcccacgggaagcacggcatatgcggcggcggccggtgcgtccatgatccatccctccgtgccggcgattatggtgactcccatctgcccgcattcgcttagcttccgacccattgtggtgccagcaggagtggagctgaagatatcagtatcccccgagagccgcaacacatcgtgggttagcttcgatggacgcaacaggcaggagctcttccatggcgacagccttcgcgtgaccacctccatttatcccgtgccatgcatctgcgcccaggatcagatatccgactggttcgcctccctagccgacggactgcactggaatgtgcgcaagcgacagaagtgcctggacgagctgtcggatctgacggcatccggatcggaggatacgctggacgagatcgagaacatgaaattgtacgatgtgtagtgcgtaagtccctgcagctaatagaaaccgtaggttagggcttttagttgtagttctaatgctttcgccctttgcttagtgtgtaatttttgtagtattttcggtaacaaattgtttaaacacatttgccaaatgtatggaaatcattttataacttttactgttcgaaacgccagtgctcttgcaatattgtacatttcagctagttaaatataaatgcagttgcaaactgtagcaaaaagttgtagagagcattgaatgaatgaatctcaaatctttgagaattaacattaaaaagtcccacttctaaaaagataagcaattgaattatatattacttaataaaataatacctgtaaattc

SEQ ID NO: 27546 - protein, 375 aa, DROSOPHILA
MKNSAMVMQIQDPASQRLTWYKPPLTVLVIKKVSDASVLAPFVYLVDWLLQEKNMVVWVESAVLEDVQLNENVRFKAIRDKLVTFKDGRDDLTDRIDFIVCLGGDGTLLYASLLFQQSVPPVMAFHLGSLGFLTPFRFDNFEEQLTSVLEGHAALTLRSRLRCVMHRRSDRKHEAKTLEADLDGEARPAANSILVLNEVVIDRGPSPYLSNIDLFLDGKYITSVQGDGLIVSTPTGSTAYAAAAGASMIHPSVPAIMVTPICPHSLSFRPIVVPAGVELKISVSPESRNTSWVSFDGRNRQELFHGDSLRVTTSIYPVPCICAQDQISDWFASLADGLHWNVRKRQKCLDELSDLTASGSEDTLDEIENMKLYDV

SEQ ID NO: 27547 - DNA, 4032 bp, DROSOPHILA
agtatttgagttacactgaatataaaaaaatgaaaagcttcctaaaactatatacaaaacttaatttttcttgttcattagcacttcataaaagtattcttaagttattttaaaaactttttttcatttaaagacattacacctctactcaagtttaaaattgaaaaatgcctggcacttcaaggacatttttcgctacaacttaccgaaactgagttcgcttttccagcaaactgattggcagtgctttccttagcggagctggcgaactcccaggcgtagaggcgtctccattggccatttcacgcgcccgctgcatatcttcgggattcatttcgaacttaattacaaccgttcgctggcaacgttcgccatcaactacgctcagattttatgcagttcacacgaccagataggcacgcatcgcacacctgccgcacgcacacgcaaaaaaaaaaaaaaacggcgagcacaccttgagttcggcgggcaaaaaaggcgaaaacatgcggctaaaacacgatcgcgcgcattaacacaatggcacaagattttagccgcgtaatgaacatggctcgtaccgcctgagggcgcaaaacatatagcctcagcatcggcgatagcaacatacactttcgattcgcacccaaatcgatgcaaactaatgctttctgacaggcccaagtgcgtggcaaccacgtgaatccaatccaatccaatccgattccgattcgattggatccaaagacagtcgcgaggtgaacaacatgcaacaagtggcctgggagaggcgctctaaaaaccagtccagatgatctgggtgtgccggctggaactacactaatgcgaaatctacaaggcgaagctggaggagaacacatttcaatcagtttgcaatcaggcttaatctacagcacaacttgacaatgttttataagttatgttcaagctaaatttggtaaaatgcttgaaacattccattaatttgcggctacaagctgaatttacaggtattattttattaagtaatatataattcaattgcttatctttttagaagtgggactttttaatgttaattctcaaagatttgagattcattcattcaatgctctctacaactttttgctacagtttgcaactgcatttatatttaactagctgaaatgtacaatattgcaagagcactggcgtttcgaacagtaaaagttataaaatgatttccatacatttggcaaatgtgtttaaacaatttgttaccgaaaatactacaaaaattacacactaagcaaagggcgaaagcattagaactacaactaaaagccctaacctacggtttctattagctgcagggacttacgcactacacatcgtacaatttcatgttctcgatctcgtccagcgtatcctccgatccggatgccgtcagatccgacagctcgtccaggcacttctgtcgcttgcgcacattccagtgcagtccgtcggctagggaggcgaaccagtcggatatctgatcctgggcgcagatgcatggcacgggataaatggaggtggtcacgcgaaggctgtcgccatggaagagctcctgcctgttgcgtccatcgaagctaacccacgatgtgttgcggctctcgggggatactgatatctgaaaatgtagcagatgttagaaacggatctatgggaattatgagtaaagcgacccaccttcagctccactcctgctggcaccacaatgggtcggaagctaagcgaatgcgggcagatgggagtcaccataatcgccggcacggagggatggatcatggacgcaccggccgccgccgcatatgccgtgcttcccgtgggcgtcgatacgatcagaccgtcgccctgcaccgacgtgatatactttccgtccagaaacagatcaatattgctcagatacggcgatggaccacgatcaatgaccacttcgttgagcaccagtatgctgttggctgcaggtcgcgcctcaccatctagatctgcctccagagtcttagcctcgtgtttcctatcgctcctgcgatgcataacacagcgcaaacgactgcgaagcgttagggcagcgtgaccctccaggacgctggtcagctgctcctcaaagttatcgaaacggaagggtgtgagaaagccgagggagcccaaatggaaggccatgacggggggcacagattgctggaagagcagcgaagcatacagcagggtgccatcgccacccaggcaaactataaagtctatgcgatcggtcagatcatctcggccatctctgcgggcataatgaataggttatttatattatatacacattctcattaaacaccgactcacttgaaagtcactagcttatcccgaatggccttgaatcgcacattttcgttgagctggacatcctccagcacggccgactccacccaaacgaccatgttcttctcctgcagcagccagtccaccaggtagacgaacggtgccagcaccgaggcatcgctgaccttcttgatcacgagcacggtgagtggtggcttgtaccaggtgagacgttgactagccggatcctggatctgcatcaccatggcggagtttttcatgatgcgaccacatggtccgaactgctggacaggcgagggtgcattcaagctgcgagtgcgcctgtaaaatagagttgggaaaacagaacaattagtatggataactttgttgtacctagctccttaaagaccttaaaatatggcgattggttttgggccttagaattggctcctcccgaatgcaattgttattgcaatcatttatatcctcccacttcacattgttgaactcttcgatgctcaaggagctgtggagcggaaacgaggcaaccgcctgcggctgatcaggacgcaggggaaacatttgttcaatatttcaacaggattttcagaatatttggcttgttttctccacctttgcagtatgcagactaagttctctcaactgtaaatcaaccttatgcaaatggcgactgcgaaggcagacagaagtcgagagaaaaacattggggaacattggtgggatacgattccccagaatcgcatttccaattccccttcctgcttgcattcgtagatgcactaagaaaaacaggggcttggttaaacattcagttgtaagggaacttatgtacaataaagtaagcaacaataaagtatttgatttaaaagatctactttaaatgctataaaagttttgaaattcgaacatttggaacaataaatctttattccacttgaatatgtaagtaggaaccatatttttgccagtgcacttattgcgccatcgtaccgatttggatttggattacgaattccatgcttttcgcatgcaatttcatagctaggggaacctttcagctgtttgtccacttacggccaggtgccggaacgcctgcgtcgcccaccacctgacgacgacgaatcaatggcattggcattctcccgggaacgtccccgtgccagacagtttccgttgtggtccggctgcactttcctctgcagattgcgctcgagacagagccgcgtcatggcactgaatccgacatgatgataatgatgctgatggtatatgtggtggctattgggcaatccgtagtgccagcgctgctccaagcgattctcgtgcaaggtggccaaatcaatgtccgacaatgccatttctgcgattgtaactccacttttgtgtccaaaaaagaatgcggtttcatacacttgcgctcatggaatgcagtcggacggcattgtttttggccagcggaaaagggaccaaggttagagttttgttttcacaacacgagagtcggttgcttttaaaaataacacgcccacgcacttttcatcgatgagccaacaaaatatgagcccaaaaaatgtgaatgtgtcggccgtaaaagagaaagtgttttatcagcgaatgtgacacacaaactggtaatcagaaatgcattacgctgatggagtgtttaagaaaaactag

SEQ ID NO: 27548 - DNA, 1841 bp, DROSOPHILA
ttcgcagtcgccatttgcataaggttgatttacagttgagagaacttagtctgcatactgcaaaggtggagaaaacaagccaaatattctgaaaatcctgttgaaatattgaacaaatgtttcccctgcgtcctgatcagccgcaggcggttgcctcgtttccgctccacagctccttgagcatcgaagagttcaacaatgtgaagtgggaggatataaatgattgcaataacaattgcattcgggaggagccaattctaaggcccaaaaccaatcgccatattttaaggcgcactcgcagcttgaatgcaccctcgcctgtccagcagttcggaccatgtggtcgcatcatgaaaaactccgccatggtgatgcagatccaggatccggctagtcaacgtctcacctggtacaagccaccactcaccgtgctcgtgatcaagaaggtcagcgatgcctcggtgctggcaccgttcgtctacctggtggactggctgctgcaggagaagaacatggtcgtttgggtggagtcggccgtgctggaggatgtccagctcaacgaaaatgtgcgattcaaggccattcgggataagctagtgactttcaaagatggccgagatgatctgaccgatcgcatagactttatagtttgcctgggtggcgatggcaccctgctgtatgcttcgctgctcttccagcaatctgtgccccccgtcatggccttccatttgggctccctcggctttctcacacccttccgtttcgataactttgaggagcagctgaccagcgtcctggagggtcacgctgccctaacgcttcgcagtcgtttgcgctgtgttatgcatcgcaggagcgataggaaacacgaggctaagactctggaggcagatctagatggtgaggcgcgacctgcagccaacagcatactggtgctcaacgaagtggtcattgatcgtggtccatcgccgtatctgagcaatattgatctgtttctggacggaaagtatatcacgtcggtgcagggcgacggtctgatcgtatcgacgcccacgggaagcacggcatatgcggcggcggccggtgcgtccatgatccatccctccgtgccggcgattatggtgactcccatctgcccgcattcgcttagcttccgacccattgtggtgccagcaggagtggagctgaagatatcagtatcccccgagagccgcaacacatcgtgggttagcttcgatggacgcaacaggcaggagctcttccatggcgacagccttcgcgtgaccacctccatttatcccgtgccatgcatctgcgcccaggatcagatatccgactggttcgcctccctagccgacggactgcactggaatgtgcgcaagcgacagaagtgcctggacgagctgtcggatctgacggcatccggatcggaggatacgctggacgagatcgagaacatgaaattgtacgatgtgtagtgcgtaagtccctgcagctaatagaaaccgtaggttagggcttttagttgtagttctaatgctttcgccctttgcttagtgtgtaatttttgtagtattttcggtaacaaattgtttaaacacatttgccaaatgtatggaaatcattttataacttttactgttcgaaacgccagtgctcttgcaatattgtacatttcagctagttaaatataaatgcagttgcaaactgtagcaaaaagttgtagagagcattgaatgaatgaatctcaaatctttgagaattaacattaaaaagtcccacttctaaaaagataagcaattgaattatatattacttaataaaataatacctgtaaattc

SEQ ID NO: 27549 - protein, 453 aa, DROSOPHILA
MFPLRPDQPQAVASFPLHSSLSIEEFNNVKWEDINDCNNNCIREEPILRPKTNRHILRRTRSLNAPSPVQQFGPCGRIMKNSAMVMQIQDPASQRLTWYKPPLTVLVIKKVSDASVLAPFVYLVDWLLQEKNMVVWVESAVLEDVQLNENVRFKAIRDKLVTFKDGRDDLTDRIDFIVCLGGDGTLLYASLLFQQSVPPVMAFHLGSLGFLTPFRFDNFEEQLTSVLEGHAALTLRSRLRCVMHRRSDRKHEAKTLEADLDGEARPAANSILVLNEVVIDRGPSPYLSNIDLFLDGKYITSVQGDGLIVSTPTGSTAYAAAAGASMIHPSVPAIMVTPICPHSLSFRPIVVPAGVELKISVSPESRNTSWVSFDGRNRQELFHGDSLRVTTSIYPVPCICAQDQISDWFASLADGLHWNVRKRQKCLDELSDLTASGSEDTLDEIENMKLYDV

SEQ ID NO: 27550 - DNA, 3081 bp, DROSOPHILA
tagcagtctgcagttggccgacataagtatgtcagaccattatagaagcgaaacatctttacgtattcctagcaattttagcgacctagtagcccacagtgcgtttagctcacgcacacgagaaatcgagggtcattgtgtttaaatttaaatttgagcacaaaacacttttttaataattaaagtactgtgacaaagcaaacacaaaaagttcattaatttgtggaatgagtcactcaattcatctttgcaaattcaattaacaatgctatgcaaatatttgtttatttatgcattgttcctcttgaaataagccttacctccttgtttgccgactgttcgttctcctggttgagcttctttatctccttctcctggctgcttagcttttgcattagcttttgaatggtgcggcatgcctgctcgtggatgcgctcgcgctccttgagcttctcctgggcttcctgcagctcgcaaatcttatccgccagttgggcgcccagatctcgattggcctgaaagtgagcagagaaaaccggaaatggctacagcattgggaggaataaaaaaaaaaaagaccttagcttagaattatctgatacgtttaatgaaacaattattaaattcagacggggggatatgtgagcaaatttaatacactttaacaaaaaatttgtcgacgtctgagagagcaacattgttctaatagaatatggacaacatcggattcatttgattggatttctttgaacgatcaacgaaagcggaacgatcaaatgatgatcaaatagagtacagaatgccagccaacggcatggaatgccccagctcaaaggacaccctaagagggatatggacattctggaggcaggagtgcaaccgcatagccaagaggatgatcttgagggctaagtgccccagcgccaaaggaactgccgaaatccagtcaagcttggcagcgaatagttgtagaaggccgtacttggcgcggtcatggccattaactgggtatgtctggtctggtggtggccctgatgataaacgtactgcggacacggatacgttgcttgttgctgcagctgtggacgacgacgttttaggagctgaccacactgttcgctggatggtaagtgcttcacctgactgcctttccaatggcaaaggctcttgtgcgacgatggtccctgactgccacacaaaacgctgatcgatgagaagtttgaatgcaatgaggatgtgctgccgctacgttcaagagaagatgtgataccaaccccggcatccgccgtcatgcgcatcggctgcacgatggccacgccgcgatccagttgccgcacctccttctgttgtaggttttcggagagctcacggaagtaaacattctgttgcctcatagtctccagttcggcgtttaacttggctatcagtgcctcatagtttagcacgttcttctgcatacttccgcacgacttttccttgcgcttgattgtggcctttttaagggggaaggattgctaggttgagctgggtatggctgaggaagtggaaggttgcgactcacttccaagagcaggatggactgacgctgcacgtccatcgtattggcggcctccttcatcgagcggacttgtcgcttcatatcatgttttaaggttcgaatggaggtcaccagatcctgattctctttcctacaggcttctaattcaaccttaagagagtctatggcctcctaaatatacagggttctctcaaacccaattaccaaacactctacctactctacaggggaattactattaaacggatttacttacgttggatgactcggcggatgctgtttccttttcaagacgctctaccagttcggaattcttgatggccagctcttgaatcttgccctcacaggctgttagggattctaggcgctcggccaacatgaattccagctcgttccgggctgcaacgttacgagcttcgatattcaccagttcctcctccaatctctgcacctccgattcaaggcgcaacattttcctggttttggcaatattttcgacaggttgaccaccagactccgccatctagttaaacaaacaaatgcaattggttactgctttcagataagtgtcgtgctcgtagataaaaactcacctgataggcgtgtatttgctcttgcaactcgtcgattattgcctggctgtcaatgtctgctttgcgctgcaattcctcgtgatgagaaatggctcgagcggcatccttgagcagctccatctttacatcgacagtttttctcaatgtcgcgatttcgatcttggcatcgatgagctgtttgcttaaggattctgtggagctgtctgcccgggcacccggctgaccctcctcgaggaagtagatgcgcagctttagattgaagttctccttgcgcagcgcggacatctgctcctccaattcgcgtacagagcgaccctgtgacggcaagggcgagttgccgccgcctggaggtcgtggaacgtcaaaactggcatctgcaaaggaaacaaagggattgatattgatttagagtgtctaggataatccataaggttatctttactgactaagaatctttagatttctcgaattgtgcgaagacgacgttcgattactattcatgattttatagctttctcctagccgttagggagcaaccacatataaaatataaaacgccaacagtgcggccgaataaatgtgctaatgctcgtgtgtgtagccaaaacggaatcctaatatgcaatggtttccattctaataaaacataacattaagttcataggctgcttgaaaagcagtggaaaaacaggcgaaattcacaaagatctctcaattctaacaccagtgatataagcatttcgaaagcaggaaatatttggcatattcatcgtgaaacttacatgagttctccatggtgacatcttgcagggctcccggactggtgctgtaaaaaaaaaaagaagagagagagagaaatctgttaattaagctcactaaaagcaactcgctgtggtgacctcgcagcacaacatccaataaaacaagtcg

SEQ ID NO: 27551 - DNA, 798 bp, DROSOPHILA
atggcggagtctggtggtcaacctgtcgaaaatattgccaaaaccaggaaaatgttgcgccttgaatcggaggtgcagagattggaggaggaactggtgaatatcgaagctcgtaacgttgcagcccggaacgagctggaattcatgttggccgagcgcctagaatccctaacagcctgtgagggcaagattcaagagctggccatcaagaattccgaactggtagagcgtcttgaaaaggaaacagcatccgccgagtcatccaacgaggccatagactctcttaaggttgaattagaagcctgtaggaaagagaatcaggatctggtgacctccattcgaaccttaaaacatgatatgaagcgacaagtccgctcgatgaaggaggccgccaatacgatggacgtgcagcgtcagtccatcctgctcttggaagccacaatcaagcgcaaggaaaagtcgtgcggaagtatgcagaagaacgtgctaaactatgaggcactgatagccaagttaaacgccgaactggagactatgaggcaacagaatgtttacttccgtgagctctccgaaaacctacaacagaaggaggtgcggcaactggatcgcggcgtggccatcgtgcagccgatgcgcatgacggcggatgccgggcgttttgtgtggcagtcagggaccatcgtcgcacaagagcctttgccattggaaaggcagtcaagctgcagcaacaagcaacgtatccgtgtccgcagtacgtttatcatcagggccaccaccagaccagacatacccagttaa

SEQ ID NO: 27552 - protein, 265 aa, DROSOPHILA
MAESGGQPVENIAKTRKMLRLESEVQRLEEELVNIEARNVAARNELEFMLAERLESLTACEGKIQELAIKNSELVERLEKETASAESSNEAIDSLKVELEACRKENQDLVTSIRTLKHDMKRQVRSMKEAANTMDVQRQSILLLEATIKRKEKSCGSMQKNVLNYEALIAKLNAELETMRQQNVYFRELSENLQQKEVRQLDRGVAIVQPMRMTADAGRFVWQSGTIVAQEPLPLERQSSCSNKQRIRVRSTFIIRATTRPDIPS

SEQ ID NO: 27553 - DNA, 22788 bp, DROSOPHILA
gaacgttggtacacagggcaatgtgatgggcgggggggtggtggttaaaagaaatgggagagatgggagaaatgggagatggccgaaacgggacaattgtgtgcattgcatttcgagtgttgtaaagtgccataaacttattaggcgaaagtgtttcgtgagtgcgagagattgtgcatgaatgtgaatgcgtaatgagtgctattcactttgttattcatttggggaatagttttgcaggcgattgtaattgtttaaccaccgattgagtggctatcgatgacctgagagtgggatccttcgccgcttaagaggacattttccttattgaataaataatttaattaggctgtgtgggttgcgaccttaagtgagtggtttttgtttttatgtaccaaatatgttttaaaggactttgaacagtgtcgataaaaagaaagttttaactttaaacttataggttttgaaacatttcattccaaaaacatccagtttgtagctagactacattggatatatttatttcgaatatttgtgtatataaatctcgaatgtgaaaaacccccgttttatagaatcttcactgtatgaatgtagtcgcagagaatgtttttaaattgtggtaaataattctgaacgcagcaaacgagtcacttgcggttatccagagcatttcgcaaccttccgcacacttgcaaccgagtcctctgcttcttcttcactttgaagtattatatcgtgtgcactaaatactcacacagatatatatgtacctacatacagcggcatacacacgcacacctcgcgaccccacacacatgtcattgtgttggttgctgcgcctattcgcggctattttgtatacattttgcattaattaaaaacaaaataaacagctaaagtcgcgggcgcttggcctgcacggaggcatgaaaataaaaactgaaaagcaaacacattctgatttaaatgtgattgttttcttgttttctttttttatgccatcgtcttttttttttggtttttatcctcttcgttttacgtacccagcaagtggtattaattttatgatttttcaacaaaatgatacttgggaattatgtacatgcatatgtatagaacaaatcattaaaacgccagatttatttgcaatagttaagcgagcctacgagaaatgcaagttttgaaatatttctaatataacctttgcattaacatacatttttaaataaagtaatggtcttaattttgtacagggggaaataaaagaatctattttaaacattatctattccatttaaagatacggttaggcatttttatatagacaaatgtgtagatacttctctatatgtcccatataccccttgattacacgattgaggggtatcgaaagcgctgaagtaaggcagaacagaaacaaaaacaacaacaaaagcggagccgacgccaacacaacgcacactagcacataagttctcacacagatactctggcgttctggttctcttttctcagtcgacttcggcattctgccactgattagaagtgtctttgccttttatgttattgtttctgcctctgcacagctttctgtgttttttaaggtttgttttttgtacacattttgagacgtctttttatgtgagtgtgtgtgagtgtgatttttgccaatggctgtgtgcacttgcgattttcatgaaatttcgctacggcttttcaataatttgtgcacgtcttgcaagtgaatttcttttgattactcttgccaagtcagcgatgtagttgccattgttgttgagtgttaatcgaatcgtgcttcccatcaatgcagtatatacgatatgcgttatatgtacatgtgtaacactaatttatgtataatttctcactgtgtgcgccgcagctgaataaatcaaattacaatcaaaagaactcgagatcgacgaagaaaactgtgaagaaaatcaaaagccaaatgcgcccgcgaagtaaatgcaacaaaatgctatattttcgacgctgctcagcactgtcgacgtcgttacacaacactggtccgaaaagttcaccctatcgtgtggtagcctaaaatctccccacaaatccccggaccaagtctaccaacgcgcttttaaaaatcatcgtgctaaagctgttcaaacttttgtgtctatatatccgaagtgttttcaaaaccgaactctcgactcttaatgtccgaactactcaaaaactaaactaaatcttcgcccaagccagcaaaagctaaaaacgaactatctatgaatatttgggtaagatttgggtaactaatgagagtttttattgctttcaatgttattatcatttaagcttgtcccactttttaagttgtggataagagcaacataatagttttaaaattaaattgttttcttatctacaaaatgttttcgttctttagattttctatatagctcattactattttgtaattgatcgaatacagtttcaacttattttttaggattatatttacactgtagcattgagaaactttatattactataacgtatactttattttctctcctaatttagcaacaaaaattcctgaaacgacccgcggaggatgttgacaatggccctgacagctttgaaccgccgcacaagttgcctaataataacaacaatagcaatagcaacaacaacaacggcaatgcgaatgccaacaacggcggcaatggctccaataccggcaacaacacgaacaacaatggcaacagcaccaacaacaacggcggcagcaacaacaacggctctgagaatctaaccaaattctcggtggaaattgttcagcaactggagtttaccacatcggcggccaattcgcaaccgcaacagattagcactaatgtcactgtaaaggcgctgaccaacacatcggtgaagagtgaaccaggtgtgggcggtggcggagggggcggcggtggaggcggtagcggtaacaacaacaataacggaggcgggggaggcggcggaaacggtaataacaacaacaacggaggtgatcatcaccagcaacagcaccagcagcagcagcaacaacaaggcggcggactgggtggcctcgggaataatggaaggggcgggggacccggcggcatggcgacgggtcccgggggcgtggccggtggacttggcggcatgggcatgccacccaacatgatgtccgcccaacagaagtcggccctcggcaatctggccaatttggtggagtgcaaacgggaaccggatcacgattttcccgatctcggctcattggacaaggatggcggtggcggacagtttcccggctttcccgatctactcggggatgataactcggagaacaacgacacgttcaaggatctcatcaacaacctgcaggacttcaatcccagtttcctcgatggcttcgatgagaaaccgctgctggacataaagacggaggatggcatcaaggtggagccgcccaatgcccaggatttgatcaatagcctgaatgtgaagtccgagggcggtttgggtcatggtttcggtggctttggcctgggtctggacaatccgggcatgaagatgcgtggcggcaatcctggcaaccaaggtggctttcccaacggtccgaatggcgggacaggtggtgctcccaatgctggtggtaatggtggaaactctggtaatctcatgtccgaacatccgttggctgctcagacactcaagcaaatggccgagcagcatcagcacaagaatgccatgggcggcatgggtggattcccacgaccgccgcacggcatgaatccgcagcaacagcagcagcagcaacaacagcagcaacagcaacaggcccagcagcaacatggtcagatgatgggacaaggacagccgggtcgctataacgactacggcggcggctttcccaatgactttggcctgggacccaatggtccgcagcagcagcagcaggcgcagcaacagcagccgcagcagcaacacctgccgccgcagttccatcagcaaaagggtcctggcccaggagccggcatgaatgtgcagcagaatttcctggacatcaagcaggagctcttctattcctctcaaaacgatttcgatctcaagcgtctgcagcagcagcaggccatgcaacagcagcagcagcagcaacaccatcaacaacaacagcagcagcagcagcccaaaatgggtggtgttcccaatttcaacaaacaacagcagcagcaacaggtgccgcagcagcaactgcagcagcagcagcagcagcagcagcaacaacagcaacagcagcagcagcagtactcacccttcagcaaccagaaccccaatgcggcggccaacttcctcaattgtccgccaaggggcggtccaaatggcaaccagcagccgggcaatctggcgcagcagcaacagcaacccggggctggaccgcagcagcaacagcagcgcggcaacgccgccaatgggcagcagaacaatccgaatgccggacccggcggcaacaccccaaatgcgccgcagcagcagcagcaacaatcgaccaccacaacgctgcagatgaagcagacgcagcagttgcacattagccagcagggtggcggtgcccatggtattcaggtgagtccatatatccttatagccagctaagaagcgtagtaaacaccgtcgagaaatccacaatgatagccctaaaaagagccaaatgtgtgtggcccgttgcctatatggagcttatccaatggcataacgctacttaatgccattgacacgtatgtaaatttccatgcatatttaagttatcagcgtaacgaagtcaacagcttttcacgaaaatcccaacagcagaggcagcagcggaaaagctcctagggggtggttttttcacattgagtgaaactgcttttccactcgaccatttcactcagtcaaatgactgctgcttgttttctttatatttatctgcctttgtttttgttgtcgcgaaaggatcataaatcatgttggggcaaacaagacgagcaaacgaacctttgcccgcttttcccgctctctctctctcgctctctcgctctccccatctctctcgttcgccgagttttcactctcttgcctggcgtttaaccctcggttttccatttccactcgctaggcgagtttatctctgtccattaattttaccacacatctgttcataaaattgctcggcgacctggcgctcggcttcagtgagtcctcggcagcgagcgagtgtcctggcgctgcgggcttctctcgtcggcgtccaccgacctcagccagtcgcttttcccgccaccccacttgcctcgaatttcccgagctccatgtgcgccattttcattacgtgagcgagaaaagggacgctaacagcaaaaaatgtggaattgagcttggcttctatattgctcggttgtgttttagggtttttcttgaatggaaatttctgtttcaagtagcgaaaaaggagctttaagatctaagaaaaagcgtgtaggaaaccgaaaaaggaagctaatctatgcacaaaaatgtccagacaagggatgcaatggagaacgtgagaagccttagaagatctagccaaacagaagctatttgtagcttaagggaacaatgaaacaggggaaatgccaggaaaatgaaacattatttgttaaagagtattatttattgtattatttttgtttttctaatgtatatttgtattatataaatgtggataatataaataatgcaatcttagtccacattatttattacaacatctctattctagttatttagtatagtattctagcattctatttctagttttttttctagctgcctagtctagtcgcatatatctgatccttatttattgagctccattttggaaacagccccaaagtgcatgggcccatgaacatttactgagcttcgtcatcactcatccatatagtaatgcattcatcatttgattgcgccaccacgaccccgccccctagctccattgccccccacccccctttgcctttgcctttgatgggcacttttttttccggaaaatgcatgggaatctctctcacaaaagcaatattccctagccacatgcatccttacatatacatatgcactaaacctaacccatattcattatccgctccaaattgttttcctgttatttcgcaacaacaacaacaacatacaacaacaacaacatacaacaacagcaagaacaccccaacatttcatttacaaaatgaaagtgcaaaactttttaagttaagtttcatgtcgctgagtagttttcatcagagaacagccaaaaaagcataaaagagagaaatgcgaaagaaagaggagacagagggagagggatatagagatagagggagagaacaaaatgcttttggcctggtcgaaaaagggacacggcaacggaatttcatccgatttttggtcagttacactgcaaaaaaaagctgagctagttataattataataattagattttatacccactttttccatctcattacaagcaacatataaatatagaaatagaaacattcagaaaattgcgtaataatttaaggtcacttaattgtagtcataaaatactttgcatcttttggcatgtaaaactaaaacaagctaatttttgtacgtgcaccttttcctgggcgcatttagctcaagttttaccatgaatttcgttcatgcattaaccctcggttgcctgagacttttccctcttagccaccccaaacctccgttgcatagaaaatagttgaagcaagttgagtgccgtcgaaaatgatgggagagcgggatataacagcttggggaggcgaaacttgttgacgattgagattgaaatttttcgaggtttattataattttttattcagactgcccactcagtggcagtttcccttgtcgcccttcgtgtccttggcgtctagtttttcgccctcactgcgattttcctcagtggaccataatcaaaggctgtcctggcgaatccttttcgctcgcttatcgggccaagacacaacacgtatacacacttaagtctaacgatatatttgcataggactcattaaaaatgcccccaaaagaggaggcatttggcaacgagggttgcaaaaagccaaaacagcatcggattcaacgagttttcttggctcaataatattttccaaagtgggaagcaaattgtgggggaaacctcttaagtgcaagaaatgagcgggcaaagtgtaaaatgtacaatgaatttgacaaagaacggtgtggcacaagaagcaaatgctggtgtatgtatatgcacaataaattaagcgcggaggagaaaaaaaataaaataaaatgccgagaagaatataaagttggaatggtagaatgtgtagaaaaggagcagcgggcaaaatggaaattatacattttactaatgaggttctttgcccaagaaggatgacaggccatttttaatggcttttcatttggcaaatttttaaaagggctattcaggttttcgtattatatattttaagcttagcagcatttgttttaatcattttaaatgcttcttgtgactttaagaacaaaagctaaacaaataagtcagacatatttttaagcaaactaaaaacctatctcaaacccaaaatactaccccattacatgagtattgtaaataatatttatcagatacttattgtgcaaaatgtatcttgtagctataaccaaagcaaccgacggggcagaaaaaccaggcaacagccaaaccgaaaacaagcgtgtagtcccggctaaaagttcaatgaattcaaaatgctggccattttgcatgtcctgcattaactcgttaaaatgccaggaacaacagcagggtggtgtagttctagccaccaacaaatttctgtaaaatacaataaaaagtggtgaaggagaaggatggatggggggggtgtgtgtgtgtggggatggatagaaattctgggagaacgagttgcggaggaggcttcggttggtcgatccgcaggcgaaagcgtcatcaaaatgccagggcgcacaaaagtatgcagcggaaatgtgcaaaacgtgaaaatgtgcggaaattatacttgcgtcaggcacacacacacacacacacagagagagagagagaaagagatagatagacagatagaccgagagagataggtagagtggctacacaacgaaagagacagctagaatgctccgactgtgcagagagggtcatatcagattttatgacttggcccggtcgacttaatgaagtaagcaagaaatgctagcacatgcgaccaacttcgaactgtgcgagtcatcttgtatcaaaaaacaataaataatttatagcagcaacgaacgaggaagtgttgagatctaggcaacagcgaacatccgaaagtacacatataatgaaatgaaagtggcgaaaaagcggaaaaattaaacaacgcaatgcgcaggcgccaaggcaataaaagcaaatccccaaaaattcagttagcttcgcagattcccggacaactcttcacataactcgccttgacgtggggattatggggccaggagttattggacagattctacatctgtataacggctatataacctctataaatttaatttccccccacggtgaaagaagcagaaacttcggcactaagtgaaaacgagaggcaacgagagacaatcggcctatttatgagcgaaaaactttggctacaaaagaaaatatgatatttttccctgctgtttcataattcaacgaatttgctgttgtttttacgtatccagttttacggataacgcttcgcttgagatttcggcttcagtttcagttacagttacattttcatgttcagttcagttcagttaggttttgttttttttttgctttctgacccggcccattacctaacgcatttgatgctctcaaaggtcacattatttaccttttatattcccattcgtgtcagtgtgaggggaattttccggcaaggttggcaagatggtttttggtttggcgcagcgaaagcgaagtttcgtaatattttcattctgtttttccactcctgccgctctctttttcggctgcgtttcaatcaatttgcaggtgttgagcttttctggggggaggtggcaaaaaggtgagcggaaaagttgatgaactttggcggtaagcgtttttggagcttaaccgtttcgccagagttttgaagatgtgtgaaaatcattttattcccacctttcgctcatttcgctgagttttccattttaatatgtgtatgtatgtttgtttgtatcttaagttgcccagcttcgcaattatagttagccaccttccatttgagggattatttcggcagcttatggcagcaatatcaatcagtttattcacacatatttaccattttagctggtatatttcattttcctggggcttagctggctttctatctcttttttttttctttttggtagtaggcgggccggctgcatgattgcctctgcttttgctcacctggccactttgattgctacctttccgttttacccattttatccgacatttccctgcggcgttttctttcagcacctccgctcagctattttgccttgctgttggcgtaaaatttaatatttgcccgtgttcttaaccccacaatgccccccggttgcctgggtgtgtgtgtgtgtgcctgtctcccccttcatcgtgattattatgccatgtaatctgcttcatataacactgagatgaagacgtggcagtgggaatgcgtaagcaagtggcaagtacttttaatactttcacctccttggggcatcaggatagcacccacacatacacttgccacgcacacacagcccccagttgatgtgttagatatacatatataaatatttcagtttttaatctattttaatggaaattattcgcgaggaacaaagtttttgttggagctactggttttgcattttatttgctataatttgcctttcgccacttgttattcagcagctcctcctcccgcgctccaaacttatccttttctaagtttaatttttctaatctcgcaaacaaatcctggtggacgttggaaagtatgctatgctttttacaaggcgctccttcgccactttgtgtgtgtgtgtgtttgtgtgtgtgcgagtgctttccgcaaacagctcacgtcgcatatttataggctgccagggcataaaaagcgatttcaactggagccgaagcttgccaaaaagatttacaaaatgtttccgcctttgttttttttgttttgtttttattttctctgcgcttattttgggtacatttagattggctttggacggctgcaaaaacttttgtttaggtatcagttagtctggtattttctggctcaaaagttcggttgttatcaccatatttgcagcagtcgtctattcaaattagtttctatttgagccggagaacggaactcagtgccgagacatgctgtctggccggcaaggttgacactcatatcaaaaacaaagtatttgcgcaatttgtttaaatttcatgcgccactcagacgcaaatgcatgttaaatgtaaaaaccaacgagaggcaaacgagccaaagacagaacgtttggcaaacaaacgagtcttggtcaagtgtaaattctggtcaggatgagccaggaaataaactgagaggtggggtgttacattgcacttccaatccaaacacacgcacacacacacacacacatgcctcagcatttgaaattccattaaatgttgttgctctggtcgcaggcaaaataatttccagtgacattttccctggcttttcgttgacaaccgaactcatttcattaactacccaaacagaacgcacaatctgttgccactacacacacacacacacacacacacacacacgcacagtgttatatgtatgtatataaatatatatgttctcgaccataaatatgtctgcggggccctcacgcccttcaacaccacccaaatccccttcccccccccactaacccgcagcagccacccctcataaaaacaccttgggcatccaagccacccaagccacccactcgctgcagaaacgttttgcccggccactttatcaaattaattactttgccaacaagcgggatgaaggatgtgcgggggtgttggggctgttgggggcttcgccgggaggtcaagtggtcaggaaagttgttgttcacttacatttgccacacttttacggccataacacgaaatccgactgcgaaaacgatgaggaggatattggcaaaagggtgaagggctcaagtggaattatgaaattgcaaactggattcataacagctgcagcaggtacttgatcggacacagaaggatctaccaggataagctagggatagagcacagaacattaactagttacattaaataaaccaaaggcattaagaagaacttaaactattgatgctgccgcagagaaaaaaagtatttgcttagctttcttcactacaaggattctaagccgtcgagctgttaacgtcaattagaaaacaacgtaggtgttttgcctctcagacggcatttcaaataccaatcatatgcagatatgcattttattcctacctacttaaaaataccttaaatagaatagaacgttgacgtcagttggaaaattaatgttaaatatagcggcgactgtagcaaaaagttgtctcgtttttctcggtcccagtggggaaaatcaatataatgttgaagcgaatggtaaccagtgtcacgctaaataataaagtaattgttgttttatgtgtgttggtaaacattccatgaatattatacgtggagcaatggaaaggaattcgccttcaaagtgcgagagattattaacccccggttttaatttgtgtgcaaaaaaaaaaatagaagaaagccttttgtgcgacaacgcccactggaaatcgtagttctcctctgagggcccacgtggcgtatgtgtaattccatattgtctactttcatttgatcttggagtggagggcgtgtgagcgtgtgagggggcgtggctgcggtgcgtgtctaatgctcgtcacttgaaaactcgccgagccaaagtaattgaaaatgtaaatggttgaggttagtggcagtggaaagcggatgaaaatgggacgacgaggatgtggaagtgcagaaagtgagtgaaatgttagtgcaaaaaaaaaagggaaacgaaaagttttcggaaaactgttagggatcagctttggtcgacttaattccctttttggcggttaaaacgttacgttgatggctttaacatactttcataattaatagttgcaactatatttcactttgagttttctaaatttcgtatacgcaaacctatgtttaaacaatatatcgatgataaatcttgtggaaaagccggcagcatcaaacggcatacctttcaagccagccatctaccaatttttcatctgtgggctggaaaatcaatgcgaaaattcgtgccgccgtatttaggtgaaaatgcagacgaaattttccatgcaggtgatgtggtgatcctgtggggaaaattggaaaagcaaaggggcagccggattcatatggctggataattctgccaaatttgcagctttgcttttttgtttgttgtttgcattctgttgtgttctctatttaccaaagtgtgtgtgtgtgtgtgttcgagtgtgcgtgtgcgtgcgcctatgtgtatctgcctgtgtgtgtgtgtaaataaaattaacgaatgttgaactttctgctgacaaagttccggcacatgcataagcaaatatgttgaaaatttgcaataggaattgattttcaatttaccgaataagaggggatatataaccaatttgttcctggttttccattaagggctctaaatgtttaataataattttcgtaggcataaaccccatttattggataaagtagccaaatgcaagctaaatcccatatcttctatctcatttaactgaatgattttcagctttctcttaaatcttccgtgtttcttgtttatttttttttaaacattgtcacgttctgacttttattgcgaatcgctggctgagtcagaagcgcgcgcgtttcatttgcgattcaatttgtacctcatagatgcagtcattcgaacagagagtgaaagaatcgcgacgcgaagaattcttctcaatgctattttcatgttgatcgtgcgccgctgctttgttcaccctgtcgttgttgttgttgttgttgttgttgttgctgccgttgccatgcagctggtttatctatcagatgccagctatatgattcatccgttttatgtctttagctacggattttccgctttcagcacgcttatcgtctgcagataagcacgatataaacgatctgatctcatcgagattcaaattgctttgttctcgttaatacaggaagtcgtttgcagttccatatcattatgattgcgaccaaatcagatcgtctcagatcagatctggctgatcgtgtaatgatcgccattagctggcacattttgtatatagtaatcacggagtaaatccaacatcggattggattgcattgcattgaattggattggattgggcacgcaaaatatttacactaattagccacggtccagtacactcaactacaaacgacttgcgtttgcggcggcattaagttcccattaaggcaactggcggctgccacggcagcaaattaaaaatgcaattgcaaattaaatttaatttaaaaatccatcaagtcgaatgaacgacttgggaacggtgaactgcaaaatgccttttgatttctatgcactcccgccgcatcgtaattgatgaagagaaatggaaaaaggtgggcaacataaattcaactaatgaaatcatgaccagattaggttctatatttgccgatgttgatgtttcacattccctgactattcaatattcacggaagattgtgccttttggcctcagaagtagctaccaatttcgtggaaattggcaaaacatcaagagagaaaaatcatttagtatattttattcatgcctagcattcgaatatgctgaaatattttcttgaaagagcttacttttcagaaattgaaattcttagaattaaatatttttcaatacgtttttaacttagcattcctcatatattgtataatgcttctggattgataccaatcatatgccatttagaaaatcgttttatgcatttatgtttttaatagttttgcattgcaattagttcgataaacttaagcctgaaattggcttgcttttcctatcatatatgtatatattgtgatgatgccgcctggttgttggggctttgatgaaaaatccggctcgaactcgtaaacttttgacagacgatccattaaaatgttttcataaatttgccacaggtgtgcctgagcggtgcctgtgccgcctgtcgtatctcgctatttatgtatctgtattggaaaacccttcttctgaaatgaagccaacaaacaaatcgaagtcattcatcgcatcgaacgaaaaagccaaagccgaacctcaataatttaagtcagtccccccagtcagccagcccctctcacgcccaccattccattttgggtgtctcccttttggccccccccttttggccccccttttggcccccttttggcccccttttggcccccttttgacccacatggcacatgcatacagtgcagttcatttcgggcacacacatacatgtatatgtacgtacatatgtatgcattttgggggccacactcatggccatttatgccaaaatttaatttataattattgcaagtttaatttatgatcattgacatgctgcagcagccgaaacacacagaggcacacggaaaccgcattgaaagcgggtgttgtgggtggcgtccatgtgggtggtggttgctggttggctattgtatctattcctcgcttctatacacctcccatcgctgccgattgtctgtcattgtgtggaaactgcaactgtttcaaaagtttttcgctaccttccattgggaaaaactagggtcctttgggtggcagcaacagcaatgagagcgggaaaatggggaaaaggggaggaaactcacaccgcttgatgcgctgaaagttggctgatatgtcggcatcaacaatgatgatgatgacgggaatgtgcatgtgagtgtggatgtggatgtggatgtggatgtggttgggcgcgatgcagttttcctgcacaagtgtgtgtgtgtgtgtggaaagttataaccccgcgcgagcgggagatttcccctgtcttctttggacaggacaggacgggcttgcctgcatctcggaatgcgaatggcatgcagagtgtgctgggagtgtgcaatctgcacgcgggcattcgccagcgtatgtgagcataattacgtggcattgaagtgaatggaatgatggggcaggatcggcttggtctcctcaattaactctaaaaggactctcaaaggagatgagatcaatggtcttataacgttacgaactcagtacgctgcttatagctcgatactcaataacaatattacattttcaattatgaaaattccacttactaatcatcatgagttacttgaattttcctacaaatccgattatctgccccaaccgctgcaatcggattttgtgagccctgctctcgtcgctggcaattaaaaatcaaattcgctctgctctaacgcttttccaaatgagatttcgcctgttccctatatcttctcctatatatccatcccggttgctgtcataatttcgttaaataacgcagcgcggacacctcattggatgggatctgatgtgatgggatgtgatgggattggattggattggagtggattggtttagctaggatcgcagagtagttcgcagcggggtttgcaaggcagctagtttatgtcacacaaatatcgagtgacagacgaccagcgggtggccatccgcccacctcccatctcccacctcccactcccggaattcccttggcttcattttggattttttggcttcgctgccaaaataataacacaaaaaaaaaagaaaactgaagaaaataacatggcgaggcggcagggaaatgggaaaagagcaaaactaaatcattttgggggcagttctaagtgggcgtttgtgggcgtggcctctttgctaatttcattgactcttcaatttttggtcggctgccaagctgcgccaagtgggtgggtgggtgttttatgagttacttacgccccgtttgccctacagtagtacctccttaacacaaaactacatgaaatgtattgcattttcgaaaggaattttatatcttatttgttaagtactatagactttttacagacatagtttagttgtggataattgccatgccatcgcaatgaacagactttgataataattactcataaaagcctttactgagattattcgcacctgtacgtttttgggtctgggaagtttttcaattactttaagtgcaagtgggcaacaagtttggctgcggcattcgtcactcgtgtggtgggtacagttgtgcctggtcagtcgagcggagttgaagatatgtgtggaaagtcctcggaaaaaggggaccgcagttcctttagagttttatgttcttcgtttcgtatatttgttcttttctgtttttttttttttgctgatactccagccttacatgtgtcacacacacacacatgcaggccgggaggacactggcgggatggtcacatatatcattgtcaagtctatatgcaaggcatccccctgccgccgccactgtgccccttgtagcagcaccccttgccccacgaacctcattcccttgacagcgcgtggggcgtgcggcaatctttttggcttgtcaaatgcgcatttcctgcttagagtccttgctctatgtgtgtgtgtgtgtgtgtgcgtgtgctggtgtgtgtgtatctcctcgttgtgcgcttgagtgtatctgtgtttgtctccagcgcaatcaatacggcggcgcttgggtaatagctgcaggatttacgcgctcgtgcggcgtctccggtttacccgcaagctcctcctgctgctccacctcctcctgttggtggtcctccaaccaccccgcaaaatcgtacgccttcgtcctcggcagttacctttaaacttttttttttttttattgatattttatgtattagtggggctgtatccgccggtgggtgcaaaagtgtgtatatggggtggctgggctttcctgttcgttgtcttctttttatgaaagcggctgtaatgatttgttttatgaacttgttcctgcgcttcgatccgcagccaatcgatgtttaaccaaggcccatcgactttatttggtttaggtatttatgacagacagtgcaggaagaagctgtgatccatgggcttagcaaagccaacaagtttgtgggtgcagagagagaaataatgaatgagacttaagtagatatatcttattgttaataaatgcatggaaaatagctaagtaatgagtaattattatggataataaatgtatctatagcaccatttctctgtctgtatgagaccacatataacacgcctaaaacccttagttcgcttgccacacgaagccaacattttacaccttacctttgaattcagagaggcaggcgcatgatttatggccaacattcgaacgttggtgggtggtgggttgctcggctatttagcagaaggttgcccacacagcgacgaccaatgccaaagccaaggcactaaacttcaattagccccgacgagagtccatgacttttaatcagcgtactttacgccactcactcgcactcccttccactcgcactcgcggcgtcctcctgctcgcacgcgagctcaaaatgaaaatgcgtggagcactgcagaaaacacacaataaattaaaccaacaagcaattacaacagcaacagcaccaactgaaaagaggcacagaagcaaaggcaacagtcgaaaggttcgacgttaggatatcctgcaagttgagcactttttgctggaattcattacatctaaaaagcagagaaaatcttgattttctggctataatgtcttattgaaaagtggtttagatacaaatattgatatacctttacaaagtacacccatttaactttcctaacttgcaacgtatcatacaaacaaaaatttgcaaattactgggtaccaaagggcaaacgcgacctaaaagttgcttagtccgctcgatgttactcctgctgtagtggctgctattgcttttgctgatggtcacacatgaaatgtggaaaaacaccttgaggggtgacgagagaactaagccttgaattttaccccacacggtgggtcacagtggctcaaaagcgagaaaaatcattgtcggaaactatggaaactatgtgaaactattcgagtacagggtgtgtggtgtgtccggtgagaagatttatttgctgcccgcatattcgagtttggcgaggtggcagcgagttccgaggacaaacatccaaggggccaagtggtggtgaagggctcttttgggtgggaaaagtgggagttgactgcgggatgtgtggcattgaagttgctgcagggtcgatcgctggcgttgtcctttcgctcattttgcatgtttgggcccattacaataacaaatgaatggcaaatttgctgctcagtagggggaaacccccctccacacacacactcacacacatacacatgcagtacagatggacaaacagacagacgcagcaaagtagactatgaaaaagtgccgaaagatttatgcttctgcttctctctcgctgtacttgtgtgtgtgtgtgtttggcagtcaatgcggattcaaaagccatccaggcgataataagcttgaaagcccgccacccacttccaatccacccgctctgcagaagtgtttctgtgtgtgtgtgtgtgtgtttgcgacacatcgagctgacagcaaatgagacagctgcaaatggagaaggtaggaagtttggcctgcccgcctgcctccatccgccttctgcctttctggcactatgaatgccaatctatgtgtcgggtattagccccaaaaatccttcgcgccggcagcccaggcaaattaccaaagtgccagcagccggtgacaaccgttcgagtggcctgtcgcctgtgggtgttcatgtctcaggcatatagcaagcataagatcaaagatctttgcaaaagggatagttcctttcatgtgctccttaaaatctgtccaattactatggttccttttaaaaaggattccctttgtctcgctcaaatgggaaattacatgatacttcctatctagaatgaacatccttaaatctcgctgtgtttctataaagctttcggggcttctgatatctaccataactatctgctgtatatatatattaaatagctcaacatatatgtacattatccccttacaggtgtcggctggtcagcatctgcatttgagtggcgacatgaagagcaacgtctcggtggccgcccagcaaggtgtcttcttcagtcagcagcaggcgcaacagcaacagcagcagcaacagcctggcggcaccaacggaccgaatccccagcagcagcagcaacagccgcatggcggcaacgctggcggtggagtaggcgttggcgtgggcgtgggtgtgggcaacggaggtcctaatcccggacagcagcagcagcaaccaaatcaaaacatgagcaatgcaaatggtaagcgagcatagcaaaatttagtgcattgaacatacattcatgattccatgtgaattccattccagttccctccgatggcttctcgctctcccagagccaaagcatgaactttaaccagcagcagcagcaacaggcggccgcccagcagcagcaggtgcagcccaatatgcgccagcgtcagacgcaagcgcaggcagcggctgcagcagcggcagcagcggcgcaggcgcaggcggcagccaatgccagcggaccgaatgtgccgctcatgcagcagccgcaggttggagtgggcgtaggcgtcggcgtgggcgtgggcgtgggtgtgggcaatggtggcgtggtcggtggacccggttccggtggacccaacaacggtgcaatgaatcagatgggcggacccatgggcggcatgccgggcatgcagatgggtggacccatgaacccgatgcaaatgaaccctaacgcggccggtccaaccgcccagcagatgatgatgggcagcggcgctggcggaccgggtcaggttccgggacctggccaaggaccaaatccgaatcaagccaagttcctgcagcagcagcagatgatgcgcgcccaggcgatgcagcaacagcagcagcacatgtctggagcacgaccaccaccgcccgagtacaatgccaccaaggcgcagttgatgcaggcgcagatgatgcagcaaacggtgggcggcggtggtgtcggcgtcggaggtgtgggcgtaggcgtgggcgtgggaggggtcggtggtgccaacggtggccgctttccgaacagcgctgcccaggcggcggccatgcggcgcatgacccagcagcccataccgccatccggtccgatgatgcgaccacagcatgcgatgtacatgcagcaacatggaggagcaggcggtggcccaaggaccggtatgggtgtgccctatggtggcggagcaggcggtccaatgggcggtccgcagcagcagcagaggccgcctaatgtccaggttacgcccgatggcatgcccatgggttcgcagcaggagtggcggcacatgatgatgacacagcagcagacgcaaatgggcttcggtggaccaggaccaggtggacccatgcgccagggacccggtggatttaatggaggtaagtcttgaatagttctaaataccatcacttcacttcacttcaactgtcatccctctttgcaggcaactttatgcccaatggagcacccaatggtgcagcgggcagtggacccaacgctggcggcatgatgtccggccccaatgtgccgcaaatgcagctgaccccagcgcagatgcaacagcaactgatgcgccaacagcagcagcaacagcagcagcagcagcagcacatgggacctggtgccgccaataacatgcagatgcagcaactgctgcagcagcagcaatccggaggcggtggcaacatgatggccagccagatgcagatgaccagcatgcacatgacccagacccagcagcagatcaccatgcagcagcagcagcagttcgtgcagagcaccaccacgaccacgcaccagcagcagcagatgatgcaaatgggtccagggggcggtggtggtggcggcgggccgggatcggccaacaacaacaatggtggcggcggtggcggagcagcgggcggaggcaactccgcatcgaccattgccagtgccagttccattagccagacgatcaactcggtggtggccaactcgaatgatttcggtctcgaattcttggacaacctgcccgtggacagtaacttctccacgcaggatctgatcaactccctcgacaacgacaacttcaatctgcaggacttcaatatgccgtagacgattgtcgataaccactcaaacaccacctccagccagcaccaaacacaaccaccatcaccaccataaccaccacgatgttgcctcagttttgtttagattttttttaattttgttgcctcttgttgttattggcctggacagccgaacccaaccgacccgacctgacgcccaaccgccccacacggccccgccccccttgttcctgccaacgaagttattttgtttgttatatgtgtgtgaatttattcctaagctaagttcgttcgtctatgttctctaatttcgtgagctccactgtattgtattgtattgtattgtattgtatttgatcgtatttgtatgtattattagagctgttcccaaggtccaaggcgagcggccaatgggcgtggcagaggcgagagttcgcaaaagacattccatatgcagcggtcgaacgaaggaattagggaaattcgagaaagtatttgcaagtactttgaaaacaatcgaacagatttcagattctcatacaccgatacagatacagatactacagactcgttgtgcaacttaagcacttgtacttaatgcaaatttgtagtgccacgcccagcggattgcacgccccatttcgtttgattacttaagcaaaaaccagatgaaatgatggtagcaaacacaaaaagaaccaacaacaaaacaaaatcgaaaaacaaaacacaaaatagttgtacattttatattgtatttaatttaatttaatttttataaaaacaaaatcgacaaactaagagaaacaaacaaaaaagcgaaagaaaacaaaaacaaaaaaatgggaaaacagatcgagaaactttcagaataaagagcaaaaatattggtgatattttaaatgcttaaacacaaattgagaaataagcgaatcaaatgagaaaacaacaaaaagcgaagaccacaaagcatagtgaaagggaagaacttttaaaaaaaaaaaagcgacataaatttgagaatg

SEQ ID NO: 27554 - DNA, 4510 bp, DROSOPHILA
gccatcgtcttttttttttggtttttgcagctgaataaatcaaattacaatcaaaagaactcgagatcgacgaagaaaactgtgaagaaaatcaaaagccaaatgcgcccgcgaagtaaatgcaacaaaatgctatattttcgacgctgctcagcactgtcgacgtcgttacacaacactggtccgaaaagttcaccctatcgtgtggtagcctaaaatctccccacaaatccccggaccaagtctaccaacgcgcttttaaaaatcatcgtgctaaagctgttcaaacttttgtgtctatatatccgaagtgttttcaaaaccgaactctcgactcttaatgtccgaactactcaaaaactaaactaaatcttcgcccaagccagcaaaagctaaaaacgaactatctatgaatatttggcaacaaaaattcctgaaacgacccgcggaggatgttgacaatggccctgacagctttgaaccgccgcacaagttgcctaataataacaacaatagcaatagcaacaacaacaacggcaatgcgaatgccaacaacggcggcaatggctccaataccggcaacaacacgaacaacaatggcaacagcaccaacaacaacggcggcagcaacaacaacggctctgagaatctaaccaaattctcggtggaaattgttcagcaactggagtttaccacatcggcggccaattcgcaaccgcaacagattagcactaatgtcactgtaaaggcgctgaccaacacatcggtgaagagtgaaccaggtgtgggcggtggcggagggggcggcggtggaggcggtagcggtaacaacaacaataacggaggcgggggaggcggcggaaacggtaataacaacaacaacggaggtgatcatcaccagcaacagcaccagcagcagcagcaacaacaaggcggcggactgggtggcctcgggaataatggaaggggcgggggacccggcggcatggcgacgggtcccgggggcgtggccggtggacttggcggcatgggcatgccacccaacatgatgtccgcccaacagaagtcggccctcggcaatctggccaatttggtggagtgcaaacgggaaccggatcacgattttcccgatctcggctcattggacaaggatggcggtggcggacagtttcccggctttcccgatctactcggggatgataactcggagaacaacgacacgttcaaggatctcatcaacaacctgcaggacttcaatcccagtttcctcgatggcttcgatgagaaaccgctgctggacataaagacggaggatggcatcaaggtggagccgcccaatgcccaggatttgatcaatagcctgaatgtgaagtccgagggcggtttgggtcatggtttcggtggctttggcctgggtctggacaatccgggcatgaagatgcgtggcggcaatcctggcaaccaaggtggctttcccaacggtccgaatggcgggacaggtggtgctcccaatgctggtggtaatggtggaaactctggtaatctcatgtccgaacatccgttggctgctcagacactcaagcaaatggccgagcagcatcagcacaagaatgccatgggcggcatgggtggattcccacgaccgccgcacggcatgaatccgcagcaacagcagcagcagcaacaacagcagcaacagcaacaggcccagcagcaacatggtcagatgatgggacaaggacagccgggtcgctataacgactacggcggcggctttcccaatgactttggcctgggacccaatggtccgcagcagcagcagcaggcgcagcaacagcagccgcagcagcaacacctgccgccgcagttccatcagcaaaagggtcctggcccaggagccggcatgaatgtgcagcagaatttcctggacatcaagcaggagctcttctattcctctcaaaacgatttcgatctcaagcgtctgcagcagcagcaggccatgcaacagcagcagcagcagcaacaccatcaacaacaacagcagcagcagcagcccaaaatgggtggtgttcccaatttcaacaaacaacagcagcagcaacaggtgccgcagcagcaactgcagcagcagcagcagcagcagcagcaacaacagcaacagcagcagcagcagtactcacccttcagcaaccagaaccccaatgcggcggccaacttcctcaattgtccgccaaggggcggtccaaatggcaaccagcagccgggcaatctggcgcagcagcaacagcaacccggggctggaccgcagcagcaacagcagcgcggcaacgccgccaatgggcagcagaacaatccgaatgccggacccggcggcaacaccccaaatgcgccgcagcagcagcagcaacaatcgaccaccacaacgctgcagatgaagcagacgcagcagttgcacattagccagcagggtggcggtgcccatggtattcaggtgtcggctggtcagcatctgcatttgagtggcgacatgaagagcaacgtctcggtggccgcccagcaaggtgtcttcttcagtcagcagcaggcgcaacagcaacagcagcagcaacagcctggcggcaccaacggaccgaatccccagcagcagcagcaacagccgcatggcggcaacgctggcggtggagtaggcgttggcgtgggcgtgggtgtgggcaacggaggtcctaatcccggacagcagcagcagcaaccaaatcaaaacatgagcaatgcaaatgttccctccgatggcttctcgctctcccagagccaaagcatgaactttaaccagcagcagcagcaacaggcggccgcccagcagcagcaggtgcagcccaatatgcgccagcgtcagacgcaagcgcaggcagcggctgcagcagcggcagcagcggcgcaggcgcaggcggcagccaatgccagcggaccgaatgtgccgctcatgcagcagccgcaggttggagtgggcgtaggcgtcggcgtgggcgtgggcgtgggtgtgggcaatggtggcgtggtcggtggacccggttccggtggacccaacaacggtgcaatgaatcagatgggcggacccatgggcggcatgccgggcatgcagatgggtggacccatgaacccgatgcaaatgaaccctaacgcggccggtccaaccgcccagcagatgatgatgggcagcggcgctggcggaccgggtcaggttccgggacctggccaaggaccaaatccgaatcaagccaagttcctgcagcagcagcagatgatgcgcgcccaggcgatgcagcaacagcagcagcacatgtctggagcacgaccaccaccgcccgagtacaatgccaccaaggcgcagttgatgcaggcgcagatgatgcagcaaacggtgggcggcggtggtgtcggcgtcggaggtgtgggcgtaggcgtgggcgtgggaggggtcggtggtgccaacggtggccgctttccgaacagcgctgcccaggcggcggccatgcggcgcatgacccagcagcccataccgccatccggtccgatgatgcgaccacagcatgcgatgtacatgcagcaacatggaggagcaggcggtggcccaaggaccggtatgggtgtgccctatggtggcggagcaggcggtccaatgggcggtccgcagcagcagcagaggccgcctaatgtccaggttacgcccgatggcatgcccatgggttcgcagcaggagtggcggcacatgatgatgacacagcagcagacgcaaatgggcttcggtggaccaggaccaggtggacccatgcgccagggacccggtggatttaatggaggcaactttatgcccaatggagcacccaatggtgcagcgggcagtggacccaacgctggcggcatgatgtccggccccaatgtgccgcaaatgcagctgaccccagcgcagatgcaacagcaactgatgcgccaacagcagcagcaacagcagcagcagcagcagcacatgggacctggtgccgccaataacatgcagatgcagcaactgctgcagcagcagcaatccggaggcggtggcaacatgatggccagccagatgcagatgaccagcatgcacatgacccagacccagcagcagatcaccatgcagcagcagcagcagttcgtgcagagcaccaccacgaccacgcaccagcagcagcagatgatgcaaatgggtccagggggcggtggtggtggcggcgggccgggatcggccaacaacaacaatggtggcggcggtggcggagcagcgggcggaggcaactccgcatcgaccattgccagtgccagttccattagccagacgatcaactcggtggtggccaactcgaatgatttcggtctcgaattcttggacaacctgcccgtggacagtaacttctccacgcaggatctgatcaactccctcgacaacgacaacttcaatctgcaggacttcaatatgccgtag

SEQ ID NO: 27555 - protein, 1366 aa, DROSOPHILA
MNIWQQKFLKRPAEDVDNGPDSFEPPHKLPNNNNNSNSNNNNGNANANNGGNGSNTGNNTNNNGNSTNNNGGSNNNGSENLTKFSVEIVQQLEFTTSAANSQPQQISTNVTVKALTNTSVKSEPGVGGGGGGGGGGGSGNNNNNGGGGGGGNGNNNNNGGDHHQQQHQQQQQQQGGGLGGLGNNGRGGGPGGMATGPGGVAGGLGGMGMPPNMMSAQQKSALGNLANLVECKREPDHDFPDLGSLDKDGGGGQFPGFPDLLGDDNSENNDTFKDLINNLQDFNPSFLDGFDEKPLLDIKTEDGIKVEPPNAQDLINSLNVKSEGGLGHGFGGFGLGLDNPGMKMRGGNPGNQGGFPNGPNGGTGGAPNAGGNGGNSGNLMSEHPLAAQTLKQMAEQHQHKNAMGGMGGFPRPPHGMNPQQQQQQQQQQQQQQAQQQHGQMMGQGQPGRYNDYGGGFPNDFGLGPNGPQQQQQAQQQQPQQQHLPPQFHQQKGPGPGAGMNVQQNFLDIKQELFYSSQNDFDLKRLQQQQAMQQQQQQQHHQQQQQQQQPKMGGVPNFNKQQQQQQVPQQQLQQQQQQQQQQQQQQQQQYSPFSNQNPNAAANFLNCPPRGGPNGNQQPGNLAQQQQQPGAGPQQQQQRGNAANGQQNNPNAGPGGNTPNAPQQQQQQSTTTTLQMKQTQQLHISQQGGGAHGIQVSAGQHLHLSGDMKSNVSVAAQQGVFFSQQQAQQQQQQQQPGGTNGPNPQQQQQQPHGGNAGGGVGVGVGVGVGNGGPNPGQQQQQPNQNMSNANVPSDGFSLSQSQSMNFNQQQQQQAAAQQQQVQPNMRQRQTQAQAAAAAAAAAAQAQAAANASGPNVPLMQQPQVGVGVGVGVGVGVGVGNGGVVGGPGSGGPNNGAMNQMGGPMGGMPGMQMGGPMNPMQMNPNAAGPTAQQMMMGSGAGGPGQVPGPGQGPNPNQAKFLQQQQMMRAQAMQQQQQHMSGARPPPPEYNATKAQLMQAQMMQQTVGGGGVGVGGVGVGVGVGGVGGANGGRFPNSAAQAAAMRRMTQQPIPPSGPMMRPQHAMYMQQHGGAGGGPRTGMGVPYGGGAGGPMGGPQQQQRPPNVQVTPDGMPMGSQQEWRHMMMTQQQTQMGFGGPGPGGPMRQGPGGFNGGNFMPNGAPNGAAGSGPNAGGMMSGPNVPQMQLTPAQMQQQLMRQQQQQQQQQQQHMGPGAANNMQMQQLLQQQQSGGGGNMMASQMQMTSMHMTQTQQQITMQQQQQFVQSTTTTTHQQQQMMQMGPGGGGGGGGPGSANNNNGGGGGGAAGGGNSASTIASASSISQTINSVVANSNDFGLEFLDNLPVDSNFSTQDLINSLDNDNFNLQDFNMP

SEQ ID NO: 27556 - DNA, 2449 bp, DROSOPHILA
ggtttcttaaaatgtagatggtaaagggggaaaatcttttcggttgcacgctaacgtcagggtggaagaatgaaaagcagttaatttctagagaatatatcgtatcgttaatatttaatagtcttccttacaaaccttagacataattgtgaaaaagtataatttatgtagtcatcgggaaaccaatttctggaagctgtcggacgagtacttgtaactgtagtcatttatcacaggcatcttttgcaaataccttggctcaaaggacctcatttccccatgctctcccttttggtctctttctgtctacccatcccgcttgcacttgatcctgtgcctaggccataaatatcgtattaaatatttgccttagtatcgcctgcgatgtcggcgtttcgcgtttgcattaacgccgaatgttgtctgtttatctcgctagttattgttcgcgctgcccataggtggtgttttgccattttcgaggggggtgttcatgtgtccatgggccataggggaaggggaagggggaagggggaaggaaggaggcttgctggcaagaggaacaagggggggggagggtttcggctctggtttggtggttgcaaacttttgtggcattgccagttgattggattgccatgagatgaacttggcgtcgcatgtgaatgtgtgcgtgtgtgcgaatgagtgtggcaagtgatttatgagtccccagtgctgatatgggatacgctatacgctatggatatacaatagatacaatgtcattagcgctctcgccgatacactgctcctttttccaacgtaaactccctatttctttcgtcgattttaatttaagcacataatggcgatatcattgacacccagtagtttaacatttaattttagcaagttttgcttgtgttaacattatttgggtttcactgtgctgcagagcgcacattccgaaaggaaacacttaactgcttaagggaatctaggagcttgcgacattcctgtaacgaacactgacaaaaatcaactaaatttcaacaagtggagtttctgtttctatctctctctcgatcgacaataagttggagttatttctagaaaaaacgaagcatattgaagatgatgcagccagcggaacagatcttctcctgcggattcgaactcttcgggcgagtacagggtgtgtgtttgcggaagcagacacgagatctggccacaatgaaccaggtgcgcgggtgggtgatgaacacggacgagggcacggtgaagggacagctggagggcacactgcccaaggtcaacgtgctgaagttctggctactgaatatcggcagtccgcgctcgattatcgagcgggcggaattcacgcccaccaaggagatcacttcgcacaactttagccgattctcgattcgctaccacaatgtggcagcaacgaaaaaggccatttaataaagaatttagacttgtagtctactaccgaaaattggaactgtgtatttgctgtaactatttgtttggacctttaaattgagctgcctacgaatggagcccagttgtgcttctgcgagcatcatttataaacctctaaaatgaaaaacaggctgctgccagccactaattaagccgcacaaagaaatgctcagcgcaattacatggaggctggcacatccactatgtacttattttaatatatgtatctacaaagtaaatatatgtacatatgtatatatatatatatgtgagatgacttggttagacagacacctgcagcttcagcttcagcttcagttttagcctcggcttggccacatttccagttgagcgacgccccaaactggcaatgagtttttacggcacacaaacagcagccaacaggcaacagacaatactggctataaggaaaatctagaataacaacagagagccacaaatatttatcgcagtgcgctgaacaagaacagattgactatttgattgaaggtgaaaatctagtaagtcgtgacttctcaaggcggaaggaaatgccttgaaatgcatttttgggtaaatgttatctgttatgagaataacggtagatatatatatatgaattatacgtatacatatatgtacgtaatccgctgtctattcaacgaatgcatttattgcataggaagttaagatttcaagtgttggaaagttcactgtactgtttccgaatttcattattgacagttacatgtgttagcctgctgttagaaaagtgcaagctggtttcttaagtaatatactaagtaatattaagtgtaactctgtttgtaaataccatatttccgaatttgatgatgcttattccgatttaaacccgtgtggttttaaatcaaaatcggattgaaatcaaagtgccacatgcatgtcttatcacattttcgagttgtccaagtgtaactcgtaactcggagcgagaatc

SEQ ID NO: 27557 - DNA, 449 bp, DROSOPHILA
gtaacgaacactgacaaaaatcaactaaatttcaacaagtggagtttctgtttctatctctctctcgatcgacaataagttggagttatttctagaaaaaacgaagcatattgaagatgatgcagccagcggaacagatcttctcctgcggattcgaactcttcgggcgagtacagggtgtgtgtttgcggaagcagacacgagatctggccacaatgaaccaggtgcgcgggtgggtgatgaacacggacgagggcacggtgaagggacagctggagggcacactgcccaaggtcaacgtgctgaagttctggctactgaatatcggcagtccgcgctcgattatcgagcgggcggaattcacgcccaccaaggagatcacttcgcacaactttagccgattctcgattcgctaccacaatgtggcagcaacgaaaaaggccatttaa

SEQ ID NO: 27558 - protein, 110 aa, DROSOPHILA
MMQPAEQIFSCGFELFGRVQGVCLRKQTRDLATMNQVRGWVMNTDEGTVKGQLEGTLPKVNVLKFWLLNIGSPRSIIERAEFTPTKEITSHNFSRFSIRYHNVAATKKAI

SEQ ID NO: 27559 - DNA, 2738 bp, DROSOPHILA
cgatatagatgctatgaaatcagtggctgaggcttcacacaaacgttccctggccgacttccaggctgccctcaaggaatacaaaaaggagctcgccgaggatgtgattgtgcaggcgcatttgggcacgttatacgacaccatgttggagcaaaacttgtgccgcatcattgaaccctactctcgtgtgcaggtgagatagattataacgtcttggcttgtttgccctcactaaaatctgtttttttcctattggcaggtcgcccatgttgccgagagcattcagctgcccatgccgcaggtggaaaagaagctgtcccaaatgatcctggacaaaaagttcagcggcattctggatcagggtgagggagtactgattgttttcgaagagacgcccgtggacaagacctatgaacgcgtgctggaaaccatacaaagtatgggtaaggtggtggacacactgtaccagaaggctaagaagctgtcgtaagcggtgtgcaggagacattattcaactcaaacatgatatcagcatacttagcagacttttcatagtttccttttgtattttccaacaactcccaagcattgttcaagccaaacatgttttatgtttctgcaaaagcaaaatgaattggtgaagatagcaacaggagcagcaacaaccacaaaaaaatgtaaaacaaaatccattaaactaacataagcaaaattattaatcattgagtgggatcgaattgtttacgcaagtgcggtataataagcaaaatattcaaataactacaaaataaaatgataaaagaaaaccgtaaactgatacgaaaagcgtatatttaatccaggttttgaaatggatgttcatattctatttgctcagtgaaatatatatttttttgattttaagaagggtaataatttagcagatagcttcatagcttttttgattattttttattttgttttaaataaattagtttctacatctataccagggtaatatttaaccgaagtggtgggaaagtcccaggccagcaccaaagtttggcttctggttggcaaacggaccactcgtccacttgctcgccgatcccgtgaggtccaaggtagtagcacgattgggcgatgaccagagattagcacgtccgtccaggccgagttgctggccgattcctgggaagttgctgtgcgtcaaggatccaccatgtccgttgatgtgggagtaatccagaccagctccattgcgctggaactcgaagccattggccagtttattttgtgaagcaaagaccttggcatccagattgtgtctgccattgttgaataaattggcatgggcctcctgctggaagacatccttcactccgggcgtgtgtgttttggtcaaagaggcaccatgaccagcacttcaaaaatgaatagaatagagttaatatagcctctagtaatctcttagcttagagaactcacttgttgtaggccaaagttccgccagttgtgactggaccgctttgagtgtttccggcggcgaaaacctgacctaccacattatggttgggattgccaatgcccttgctgagattcaaccgagcatcagcccctccagcgggattggaggctaaggaacctccaagcacctggcgacggacccgaatgggtcctgttgtgggaactgcctctgcgatggcgaaaagtgccaagataaggatgcttgtcttctgcatgttgctggactggattgctggagctaactgatgtccaaggtgatctgatgatccgcttttatacgtaatcttaggggaagaactttgttggtaaattactagattcatctcggtgtcgttttcagctggcttgccttatcagttaggacttccccccagcgttttgatgggtgatttacgtgtggcattattgtgtgtttgtcacctttcttatttgatgacccatagactttttccccagggctctcaaaacatttctatacttaaataaaaacatgtttctgtaatagctaatttaatgcaaatttttatttaatctctatatttctattaattataagcaggcatttagccgtatgactattgaaataagaaattataatggaaaggcgaggcaaataatttgtgaaactcctgctaatttgagaaaattaattaaataaagataaaattaagctgtagttgtgaaatatacctcatcttaatttaaaaattaaaaggctagcgttaagcgatagcatcatcattatctcctaggcttgagtttctgttgattgaaatcgcgtagtttcttatcataaacaagctaagcatctgtttgaaataattaaatactcaaatgagtatcgatccgaaatgtaccctttaaatcggtttcatttgataatttcaatgtatttttcatagggcatcgtatttttggttagaagtttagaacgcaaaagatgagcctgattcaattaaaagatattttattaattaatccttataaaaaggataaacacagatgctgaaaatttttgtagataacaagtatctttttacactactaggaacgaatatttaaaaaatcaaacatttacttctgcaaattaaattctattaacaggctggaactttcagattaaaataatcgtcatttttgttgctttgcttaggtcagtgtctaattgattctaatgataatgatgattttgattcatcaagttagttaaattaagcttatcatacattatg

SEQ ID NO: 27560 - DNA, 674 bp, DROSOPHILA
caatccagtccagcaacatgcagaagacaagcatccttatcttggcacttttcgccatcgcagaggcagttcccacaacaggacccattcgggtccgtcgccaggtgcttggaggttccttagcctccaatcccgctggaggggctgatgctcggttgaatctcagcaagggcattggcaatcccaaccataatgtggtaggtcaggttttcgccgccggaaacactcaaagcggtccagtcacaactggcggaactttggcctacaacaatgctggtcatggtgcctctttgaccaaaacacacacgcccggagtgaaggatgtcttccagcaggaggcccatgccaatttattcaacaatggcagacacaatctggatgccaaggtctttgcttcacaaaataaactggccaatggcttcgagttccagcgcaatggagctggtctggattactcccacatcaacggacatggtggatccttgacgcacagcaacttcccaggaatcggccagcaactcggcctggacggacgtgctaatctctggtcatcgcccaatcgtgctactaccttggacctcacgggatcggcgagcaagtggacgagtggtccgtttgccaaccagaagccaaactttggtgctggcctgggactttcccaccacttcggttaa

SEQ ID NO: 27561 - protein, 218 aa, DROSOPHILA
MQKTSILILALFAIAEAVPTTGPIRVRRQVLGGSLASNPAGGADARLNLSKGIGNPNHNVVGQVFAAGNTQSGPVTTGGTLAYNNAGHGASLTKTHTPGVKDVFQQEAHANLFNNGRHNLDAKVFASQNKLANGFEFQRNGAGLDYSHINGHGGSLTHSNFPGIGQQLGLDGRANLWSSPNRATTLDLTGSASKWTSGPFANQKPNFGAGLGLSHHFG

SEQ ID NO: 27562 - DNA, 4070 bp, DROSOPHILA
gctcttatatatttgattaatagcatacatgattgtctaatctaaaaccagatatggcgtctaagaatcttaaaaagaaagtttacaaaatacgcattaactattctcctattacagcaaataaaacgagtatatcgtgaccctagtaaatattgagcctttccatatcccggatttccatgatatccgtcttcagtcgctgcttaacgatctcccgccaaatggcttcccgatcccggttgtccgtcacgcccattctttgcagtgaggagtctgtgatccggagtagagcccttccggttatatcgtgctgtgtacatggaaagaaattaaacaagatcagtaggcagttatagtgatgtctaaattttagcaaaaggtaaccgggaattttcctgtttgtgttttgaggtgctgaaatgacggaactgctgaaggaaaaccgttccaacgaggctcgacggtaagtgaagtagatcaaggactacgatttggattgtgggctcaactcacctgggcgaagagctgctcatactgggtgtattcaccgcagtggcggcgataccacttgagcacatcgctaactgtccacaggtacactgccttcggtcgcgtagttttcgttctggttttgttttgcgttgagttaatagtttcttcacccatttcacaaaaaacaaatcgagaaatttaagatttatttgcaaatagcaacaaaacaaatagtgatggtagctaggcgatattaattaggtgtgagacaagatatcgattacagttgtattactgtaatgtaaatataaaaaaatgtaaattaggggtgacacaatcggccgataagttccctaatccgactgatttaaatcaaaggtataaacgatatcctaagaaattcacgagttgtgtgcgatatatcgacaacaagcactagtacgacattcgtggcctatcgatgcccgctaagactcgcatatcgaaatcgcaccagctctaatcgtgactggcgcttaataacaacgaccgaaaggtgaaaaagtcagcattaaacacgtaaatacgcaatcaatacacaccggaaacgatcgaacacaaagaaaaaattgtcgcattgctagtagctgagttgagacaagcttagttgattgattgattagtaaatttttgagttgagcgcccccacatctcatctcgtctcgtccgaacacaaatttcaagtcgcaagatggccggagcaacacttttcgagcgtgcccaggcattgtccagcgtgaatcgcgaggagcaggatagttcgctgctgaacaaactggtccgcgaccaggagggcgccgagaacgatgaggagcgcatccgaatcaaggagcagggcattctgcagcagggcgagctctacaagcaggagggcaaggccaaggagctggccgatctcatcaaggtgacgcgtccgttcctcagctcgatcagcaaggccaaggcggccaagctggtgcgttcgctggtggacatgttcctggacatggacgcgggcacaggcattgaggtgggttcttttttcactcattgactactagaatttactagaaaattctttgttcgatctctaggttcaattgtgtaaagactgcattgagtgggccaaacaggagaagcgcacatttcttcgccaatcgctggaagctcgtctgattgccttatattttgatactgctttgtacacggaggccttggctctgggtgcccaattgctgcgcgagctgaaaaagctggatgacaagaatctgctggtggaagtgcagctgctggagagcaaaacctatcacgcactgagcaacctgcccaaggctagggccgccctcacctcagcccgcaccacggccaatgctatctactgtccgccaaaggtgcaaggcgcactggatcttcagtccggcatcctacatgcggctgatgagcgtgactttaagaccgcattctcctatttctacgaggcctttgaaggattcgacagcgtggacagcgtcaaggccttgacctcgcttaaatacatgttgctgtgcaaaatcatgttgggacagtccgatgatgtcaaccagctcgtcagtggaaagctggtaagttattaagtgcagtccgaaataagtttgcgtcagcagttgtaatgttctacatatacatattatgtaaatgaattattatctaacaaccaaattgttgtgtagatttaatcaatttatcttacaaatataattgtcattaccaggctattacctattcgggccgcgatatagatgctatgaaatcagtggctgaggcttcacacaaacgttccctggccgacttccaggctgccctcaaggaatacaaaaaggagctcgccgaggatgtgattgtgcaggcgcatttgggcacgttatacgacaccatgttggagcaaaacttgtgccgcatcattgaaccctactctcgtgtgcaggtgagatagattataacgtcttggcttgtttgccctcactaaaatctgtttttttcctattggcaggtcgcccatgttgccgagagcattcagctgcccatgccgcaggtggaaaagaagctgtcccaaatgatcctggacaaaaagttcagcggcattctggatcagggtgagggagtactgattgttttcgaagagacgcccgtggacaagacctatgaacgcgtgctggaaaccatacaaagtatgggtaaggtggtggacacactgtaccagaaggctaagaagctgtcgtaagcggtgtgcaggagacattattcaactcaaacatgatatcagcatacttagcagacttttcatagtttccttttgtattttccaacaactcccaagcattgttcaagccaaacatgttttatgtttctgcaaaagcaaaatgaattggtgaagatagcaacaggagcagcaacaaccacaaaaaaatgtaaaacaaaatccattaaactaacataagcaaaattattaatcattgagtgggatcgaattgtttacgcaagtgcggtataataagcaaaatattcaaataactacaaaataaaatgataaaagaaaaccgtaaactgatacgaaaagcgtatatttaatccaggttttgaaatggatgttcatattctatttgctcagtgaaatatatatttttttgattttaagaagggtaataatttagcagatagcttcatagcttttttgattattttttattttgttttaaataaattagtttctacatctataccagggtaatatttaaccgaagtggtgggaaagtcccaggccagcaccaaagtttggcttctggttggcaaacggaccactcgtccacttgctcgccgatcccgtgaggtccaaggtagtagcacgattgggcgatgaccagagattagcacgtccgtccaggccgagttgctggccgattcctgggaagttgctgtgcgtcaaggatccaccatgtccgttgatgtgggagtaatccagaccagctccattgcgctggaactcgaagccattggccagtttattttgtgaagcaaagaccttggcatccagattgtgtctgccattgttgaataaattggcatgggcctcctgctggaagacatccttcactccgggcgtgtgtgttttggtcaaagaggcaccatgaccagcacttcaaaaatgaatagaatagagttaatatagcctctagtaatctcttagcttagagaactcacttgttgtaggccaaagttccgccagttgtgactggaccgctttgagtgtttccggcggcgaaaacctgacctaccacattatggttgggattgccaatgcccttgctgagattcaaccgagcatcagcccctccagcgggattggaggctaaggaacctccaagcacctggcgacggacccgaatgggtcctgttgtgggaactgcctctgcgatggcgaaaagtgccaagataaggatgcttgtcttctgcatgttgctggactggattgctggagctaactgatgtccaaggtgatctgatgatccgcttttatacgtaat

SEQ ID NO: 27563 - DNA, 1791 bp, DROSOPHILA
ctggcgcttaataacaacgaccgaaaggtgaaaaagtcagcattaaacacgtaaatacgcaatcaatacacaccggaaacgatcgaacacaaagaaaaaattgtcgcattgctagtagctgagttgagacaagcttagttgattgattgattagtaaatttttgagttgagcgcccccacatctcatctcgtctcgtccgaacacaaatttcaagtcgcaagatggccggagcaacacttttcgagcgtgcccaggcattgtccagcgtgaatcgcgaggagcaggatagttcgctgctgaacaaactggtccgcgaccaggagggcgccgagaacgatgaggagcgcatccgaatcaaggagcagggcattctgcagcagggcgagctctacaagcaggagggcaaggccaaggagctggccgatctcatcaaggtgacgcgtccgttcctcagctcgatcagcaaggccaaggcggccaagctggtgcgttcgctggtggacatgttcctggacatggacgcgggcacaggcattgaggttcaattgtgtaaagactgcattgagtgggccaaacaggagaagcgcacatttcttcgccaatcgctggaagctcgtctgattgccttatattttgatactgctttgtacacggaggccttggctctgggtgcccaattgctgcgcgagctgaaaaagctggatgacaagaatctgctggtggaagtgcagctgctggagagcaaaacctatcacgcactgagcaacctgcccaaggctagggccgccctcacctcagcccgcaccacggccaatgctatctactgtccgccaaaggtgcaaggcgcactggatcttcagtccggcatcctacatgcggctgatgagcgtgactttaagaccgcattctcctatttctacgaggcctttgaaggattcgacagcgtggacagcgtcaaggccttgacctcgcttaaatacatgttgctgtgcaaaatcatgttgggacagtccgatgatgtcaaccagctcgtcagtggaaagctggctattacctattcgggccgcgatatagatgctatgaaatcagtggctgaggcttcacacaaacgttccctggccgacttccaggctgccctcaaggaatacaaaaaggagctcgccgaggatgtgattgtgcaggcgcatttgggcacgttatacgacaccatgttggagcaaaacttgtgccgcatcattgaaccctactctcgtgtgcaggtcgcccatgttgccgagagcattcagctgcccatgccgcaggtggaaaagaagctgtcccaaatgatcctggacaaaaagttcagcggcattctggatcagggtgagggagtactgattgttttcgaagagacgcccgtggacaagacctatgaacgcgtgctggaaaccatacaaagtatgggtaaggtggtggacacactgtaccagaaggctaagaagctgtcgtaagcggtgtgcaggagacattattcaactcaaacatgatatcagcatacttagcagacttttcatagtttccttttgtattttccaacaactcccaagcattgttcaagccaaacatgttttatgtttctgcaaaagcaaaatgaattggtgaagatagcaacaggagcagcaacaaccacaaaaaaatgtaaaacaaaatccattaaactaacataagcaaaattattaatcattgagtgggatcgaattgtttacgcaagtgcggtataataagcaaaatattcaaataactacaaaata

SEQ ID NO: 27564 - protein, 422 aa, DROSOPHILA; identical to SEQ ID NO: 21492

SEQ ID NO: 27565 - DNA, 4222 bp, DROSOPHILA
tatggatgaaagccacgccatttaaacttttgaggttgtgttcgttttggtcacaatcacttttcaataccttttccacaagttttctataaagcgtttctgatcacaatgaaagtaaattaataattttactgaattaaccgtttaagaaaagattttctccgaagtccacgaacatacgactaaacgtcacagcacaatatgaccataacgactttagtgggctgcagcctatcactatcgattggccgaatatgatgtgaatgaattttagccttttcacactttcacttttatataatttatatggtatttattaaaatgaagatatgtaataatacgcttaaaaacgaaagaccatttttaaaaatgaagttgactaaaatagaaacaaatatatgtgttatataattaaacgtagttccaatcagccttttaaaatatatgttataagagtggatcatctgtatttcttctatattccaataccaatataccacattttttgtagaggatatcttatttattttattgaaaaaatgtttaaaatattatttcaagagccacattttaaatagtatcgatacccaactcgcagtgagtaagcactagaatgtaactacgggtaagatatcgattgtccacgttttcactagcaaatataaattgcattttatggaatacttatcgatattcttacagtactggaaaactttttcatatcgatttatttttctgcgtatacagaacgtactttcgtttcattgttgtccaaaaaagataataatattatatacttgcggttatttacaactgcaagtaatgtgtcactaatttttagtgaaaataacacaaaatacgacttgtacggcaaataagtatacgaggcaatcacgataaataaaaaaccgtgagtatggaatttcaagtggacgcttctcaatacttacatgcacatatatcgatgtgtggatatgtacatacaccttgttataaacagtttaaatcttttctgacgtaataaaatctcaagaatgtacatgtaaaaccaacaaaatgttttcaaactgcattcaaattaatgcttaaccataaccttgtgtgtatgtaaatataaacttggcaggttgatttttttttaccattctgctggcactaaacatacgtacaagtgtatgtatgtgatgcactcggcgtcatttatctgtacatgtgtaaaatgtaacgttacctgtggtacacagcaataaataaatagaaataagttcataaatagttcgggtaactgcccagcttcgtgctacgcatctgagatactttttcacccccaaaaagatatgccgcttcatgagattgcgacaggtggagattattgcatttccaataggataccaaaatgtcttttcacttttgctcaaatgtctgggggattattttgtggtggggtttgtgggtttaatggctttgttggtatctcttctatagatatgatgaattttgtagcaaaagatttaattggtgtatttgttttcagtttgttaagtatacattaactcaagtttttactacatttttaagggtttcaaacttatgtttttatataaaaaagaaatatttattaaataataaaacactaaaaaatcgaattggtagaaaaaatattgggttatttccttttttcttgcatgattttaatatttgatgtttaatattattacagaaacttggatttgtagcttgctttgtgttgcggcaccatggaggaccccaatcgcatgttggcccacaccggcggcatgatggctccgcaaggatacggcttgtctggccaggatgatggccagaatgccggcagcgagaacgaggtgcgcaagcagaaggacatcggcgagatattgcaacagataatgagtatctcggagcaatcacttgacgaggcccaggccagaaaacatacactaaactgtcaccgaatgaagccggcacttttctctgtactttgcgaaatcaaggagaagaccggtaagcttaaaaccctatatttatctctcattcaagaccatcaaataagttgaaatggtattatggattttgtgatttgcttgtgatacaattgatttactaaatcaaacacaattcttaacgtaatagtcttaaaacgttcagtatgaaattatttttatcattcgtcttcttcgttaaaactattacagtcctctcgattcgcaacacccaggaggaggagcccccagatccgcaactgatgcgcttggacaacatgctgattgccgagggcgtggccggacccgagaagggcggtggcggagcagcggctgcctctgcggctgcggccagccagggcggttccctgtccatcgatggtgctgacaatgccattgagcattccgactaccgtgccaagctggcacagatccgtcaaatatatcaccaggaattggagaagtacgagcaggcatgcaacgagttcaccacgcatgtcatgaatcttctacgcgaacagagtcgcacgaggttggtgtatatagataaatgcaaaatgatggccatcatttgggtaatataatcgtatttcagacccattacaccaaaggaaatcgagcgaatggtgcagatcatccacaaaaagtttagttccatacaaatgcagctgaagcagtcgacctgcgaggctgtaatgatacttcgttcgcgtttcctggacgcacgccgcaaacgccgcaatttcagcaagcaggcatccgagattctcaacgagtacttctacagtcacttgagcaacccatatccatccgaagaggccaaagaggagttggcacgaaagtgtggcatcacggtaagtagtgtagggcacattaatcaacaatgcaaatccgattgcagcatagtaaataaaacaaaacacactcatgcaggtctcgcaagtatcgaattggtttggcaacaagcgtattcgctataagaagaacattggtaaggcacaggaggaggccaatttgtatgcggccaagaaggcggctggtgcttcaccgtattccatggccggtccacccagcgggacaaccacacccatgatgtcacccgctccgccacaggattccatgggctatccaatgggctccggcggatacgaccagcagcaaccgtacgacaacagcatgggcggctacgacccaaatctccatcaggatctaagcccctgaggatcagggctgtgaaccactcccagtccggagaatccctcatacagttgcggtcaaaataactgcgctgaaaaatctaacatgcagttttttcataattatgcggcttatatttgcttcttcgccaagaacaacaattcttaagggatttttaaattcagctttctgtcctttggtttcgagtcagataagtttaaaattcccatcaatttagatatagttccgatagatatacataaatacgtgagtagaatataaatacgtaatagttagtttgtgcttgctacattttggttggcagaaaaaactttgcctgcttaaatcaaaaaagaaagtaaataagctgatatggttttttaattgacacagtctcctgctttttaacaatatatgcatgcaggatgtattaagaagtcgacaattgaataatggcctaattaagaatattttttgcccgaacataaaacgaaaagtttgctcgctttttttttttaattcacaatcaattgaaatggaaagcatgttgtttgtggcatgtcaactgtaaaatacataaatacgtaataattcgcttaagcgattataatttgatcaacgttctttaaaaagggttaataaccaatgcagtgactttttctgcatagccccatttagcttatatattaaccatcgaaaacatatgcaaagaaactcgattaaactggtagtatacgaatattttcacaacgagtggaggaggcacaagtttcagagctattattttgaccgcagctgtgtataaatatattttaatacatttacctacatttgcgggtatatacaaatattgcatgtaaatcatactatgacgattcttttttggctacagtacgtatacgacagcaaaatagtgtttactgaatttaaaactgtacgaaatttttaaaaacttgaacaatacgaaaatacgaaactaaaccatgtatacgatgtatatcaaataaataaataatacatgttgt

SEQ ID NO: 27566 - DNA, 1273 bp, DROSOPHILA
tttaaatcttttctgacgtaataaaatctcaagaatgtacatgtaaaaccaacaaaatgttttcaaactgcattcaaattaatgcttaaccataaccttgtgtgaaacttggatttgtagcttgctttgtgttgcggcaccatggaggaccccaatcgcatgttggcccacaccggcggcatgatggctccgcaaggatacggcttgtctggccaggatgatggccagaatgccggcagcgagaacgaggtgcgcaagcagaaggacatcggcgagatattgcaacagataatgagtatctcggagcaatcacttgacgaggcccaggccagaaaacatacactaaactgtcaccgaatgaagccggcacttttctctgtactttgcgaaatcaaggagaagaccgtcctctcgattcgcaacacccaggaggaggagcccccagatccgcaactgatgcgcttggacaacatgctgattgccgagggcgtggccggacccgagaagggcggtggcggagcagcggctgcctctgcggctgcggccagccagggcggttccctgtccatcgatggtgctgacaatgccattgagcattccgactaccgtgccaagctggcacagatccgtcaaatatatcaccaggaattggagaagtacgagcaggcatgcaacgagttcaccacgcatgtcatgaatcttctacgcgaacagagtcgcacgagacccattacaccaaaggaaatcgagcgaatggtgcagatcatccacaaaaagtttagttccatacaaatgcagctgaagcagtcgacctgcgaggctgtaatgatacttcgttcgcgtttcctggacgcacgccgcaaacgccgcaatttcagcaagcaggcatccgagattctcaacgagtacttctacagtcacttgagcaacccatatccatccgaagaggccaaagaggagttggcacgaaagtgtggcatcacggtctcgcaagtatcgaattggtttggcaacaagcgtattcgctataagaagaacattggtaaggcacaggaggaggccaatttgtatgcggccaagaaggcggctggtgcttcaccgtattccatggccggtccacccagcgggacaaccacacccatgatgtcacccgctccgccacaggattccatgggctatccaatgggctccggcggatacgaccagcagcaaccgtacgacaacagcatgggcggctacgacccaaatctccatcaggatctaagcccctgag

SEQ ID NO: 27567 - protein, 376 aa, DROSOPHILA; identical to SEQ ID NO: 19053

SEQ ID NO: 27568 - DNA, 5406 bp, DROSOPHILA
tgggtgggtgggtgttttggttggaaggcaaaggaaaacagctttctggcacacttcaaagcacattacaccgctttggaggcgtcgggtgtggcccagaactaaagaccgaaagagccgagggagagtcgcccgagtggcacgtacctgggtaatgctgcatctttaaaaagccgcccaattccttggatctcacaaaactccggtcggggagaaactacaactaatccctgctaacagttccagtctcatccacatccacatccacatctacatcctcatccgcatccccttcagcgcttgctgtctattttcgtgccacttttggccaaagctgctggagtggattttggcaccattggcactggtaacctgcatatttaatgacaatccccaccagccaacgggacgtgttcgagtgccaagagccggcgagtgggcgttgtcgactggccccacttttcctggcactctgacagggttggaaacaaaggccggagaccccgacggatatcagttgggtctgccaaatgtgcggaatactcggaccagtttgaaagtaattactatcttatcgaatgccatgtcgcgggtggcctataaaagtagagaaattgccggcaatcgggcaaagagttaagtgccagcaacatgtccggaatcccaccagcaaccttcaccgtaatcgcaggtagtgcagcccacaatcagcgtcgcaagaatcgaaatcgggaacatagccaacagaagaattcgaccagtgagcatatggaattcgcagtctaaattgcgatcaaacataaaccttaacaatttccagagactgaaccgaatacggcggggtcgaagacaaatagttgccgcattgtttagatatagtaactatcttatctgtacaaggatttaacgcatgaaaatacatttcccatgacataaacaccgagtataaatgggccgaacaaagcatttggggtttcagttaatggcccaaacgaagacgagacggcataattatcgacaaaatgaaaacgacaatcgtggaggagaggagtgtgaatgaaacgatagaaacaatagccacgagcagtggctccgtccaggagacaatcgagatcgtgaatatcgatggatctgtagcaccaaagcatcgtcaccatcatcaccatcacagacatcatcatcaccatgaaaggcaggaaaatgttgaagttgtggcaacagaggaagtgattcttgtggagaacgcaccgaaatcgaggaagcatcaccaccacaagcagaggacttctccaccaccgcccctgccgcaaacctcaccaccattcctcacccccactgaagaagtgggtttcaatgtggtgtgggaaccccaggccttttggaaccagccctcacccaatccctccactgatctagatctctcacaggataacgaggttgtcgatgcagtggagactatggacactacttcagcttccgatgaattcaccactgttgtttttcaatcagagacaaaggagtctattagggaaacacagaagcacactagagtggtggaggaggaaataataattgatcaattggacccaccaccctatgcaccaccgccacttcaagtgcagacaggattctttccagtggctcagcagcccccactttcacccatcgcagaagtggtgcaaacagatgtggtggcggaatcggtggaacctccactaccgcctacaggttatattcccagaataaatctaaagccaacggaaactattgtcgagaatgtcgaggtcatcgtgcccgcacaaattcaacaagagccggagtttattccgcagccgggatttgtggccagaattgtggagaacatagaagttgccgcagcatctaagtcatcactggtttcacctcaaaagagttattatcctcggacaggcatggtggagacgattgtggaagatattgaagtggtaaaagatgatgctcctgttcagagtggttatattcccggaaatgttgaagtggaatcgattgtggaaaatatagatgccgattctccctttcttcttccacccaatggattcgctactgatgagtccattgtggaaaacattgaagtctcgacagatgtagatgattctccatttctgcttccagttaatggctttgactctgaaccagtctgtgtggaatcgattgttgaaaatatagaagttacaccttctcaacctgtcctgcaaatatcagatcaaagtgttgttcctgcaggctttgtcgagtctgcggtggaagacatacaagtcatagaaacggaagatcccccattcctactgccgactgaaaatgactttactgctcaggcaggcaatgtggaatccctgatagaaaatatagaagtaactacggaggtggatctcacattaagacaatcagaacaaatagaaaatctacctcgatctggtttcgtggaatccattgtagaaaacattgaagtcactcaagaagtagatcccccacagcctgcagttccaagtgatgtggtcactcagagtggtctagtagaatcgatagtggaaaacatcgaagtcacagaaatagtggatatacaagctccggctccaccacaaactggatttgtggaatcggtagtggaacgtttagatgtcacggaagaagttgaaccttcagtgcgaccaccacttccacttagctatcctcctcgttcagggttcgtagaatctatcgtggagaatatagaagtagaacaagttactccttcttatcaacctccccagcaaattgttcctcaatcaggttttgtagaaacatttgtagaggatattgaaatcaaagaatctgcgctaccgccaattcaaaatggatatgcaccccaagcaggagtagttgaaacaattgtcgaagaagtagaaatcgtacccgatcctccacgtcaatccatagtgacaaccgattatatgccccgtgcaagtttggttcaagaactggttgtggaatcacttgaggtcacaccaacatcatcgcctccacccgaacagtttcccttcatttccagagagagcctaatcgtagctgatgattacgtggaggtggaagaagtcaccccttacaatacggcaccacatagtccaatagtggaagtggaaagattgagtgaagccgagtcttatgtggagattaatgaagttgcaccagttaatactccaccccagaggtccgttgaagtgggtttccttcccagacccagcttagccgaaacggcggtggttgtggaatcagtggaggtaactccaactccaacaccgccaccaagcccagcactgaaactcaaaataccaccgtcgaatcagataccatcggaggtgattgtggaccaaccagttccatcttcaactttcaagccaccagcgaagccacttaacaatttcattctaactgatctggtcatcgacgatcctccattcgtagaagtggtggaaagggaagtggttgttgagtccgcaaacaatggccaagtcactgaggttatcgaagtcacggaagagatcatacaacccgtcacacccatcggaactgttttggtgggggaggtatccgagcaaaacagcgacaaatttggcaagcgatattccctaagtgcgacactggctgatggacagcagcaggtgcagggaaaaccggaaacgaatcagtcaccaccgatccaaaaacgagataaacccaccgaaccaccgaagcgtagatgttgccagtgtaaatgcatcatttcctaaagcagaggtcaggggctttccccaaggcaagtgaatcagtacaaaaccatatcatatcatagaaatcttatcaataactgggtctttttattatcagcctgggaatgtaagctccacctatcgcatatctaatcaggtaaaacagaagaccctccaaaaaaaaaaaatcacagtaattgatagttaattaccggcggacactcgaggaaatagcgtagataagtggcaaactcaagaaccccaatcgacccgaaagtgctggtcagtcagtcagtcagtagttagccatcggtcgagatgccacccccaggacgcggatacggaggaccacctccacggggtcccggaatcgcctacggaccaccgccacctcgagtgaatgtcggcatcaatatcggcggaccaccgcgtccgccgcccataggcgtgggcatcggctttgctccgccacccgtggtggttgcaccaccgccaccaactgtgatcgtcggagcaccaccaccaccgcccatggtcgtgatgccgccgccacggcccaccgttgtggtgggtggccaggctccggtggccagtgtgtatgcccagccgcaaggagaggttttctgctgcactattctctgacgaaaaataggaaatgaaaaactgtgcttctgtatagaattattcactacgtgtacatatatgccttaaataagtaaaataaaatagttaactcatagtaaagtccacagtccatgttcaattcaagttcaaaatggcttaaaagacattttaatgcaatcaaaaatcattgtccagtgtgttgttttaatttttgaagtgtgaaccaatgaaagtattaataaaatgaatgcaaaccataattgtatgttatataattaaatacacatataataaactgctaccctcacgattttcccattgcatttgaccgatgcaaatattcaataatcacattgaaagcatgacaaatttcaaacaattgtcagtttaagtatacaatttgagcaaaccaattataatattaatatcaatttaccgtcgctttccgattgggaaaactaattcacttcgggccagagagcaatttcctcgtcacatgtgtccaaaggctgagtcacagtcagtttatcgagcacaggaaatgcaaattgcgcctcaaacaacatttacttaatacattttgatgtgctcatctaacggtaattgccgtgaacatgatcgaagcaaattgtcgctaataacttccatgttccatgttccaggcaggcagggcgtttgcaaaaggaaaagggaatttgagtatggaaaatgctgtatgtaatttcaatttgagaattttcctcattattttcgttgggcccatggcgcttggcgtccttctctgggtatttcaatatttttgccaatttatttgcgctcctccctccaatcgtcccgttgctcatcagagttgagtttctgtgcctgttcgtctgccttttgattttttattattatttgcgcgattttgcacgcggcgtgtgtatgcaaataaacgaaaaactgcaggaaacaaaacacggaagttgcccaggaaggaaggcaggaaggaaggaagccaggcagcgccacagccaaa

SEQ ID NO: 27569 - DNA, 3061 bp, DROSOPHILA
agacggcataattatcgacaaaatgaaaacgacaatcgtggaggagaggagtgtgaatgaaacgatagaaacaatagccacgagcagtggctccgtccaggagacaatcgagatcgtgaatatcgatggatctgtagcaccaaagcatcgtcaccatcatcaccatcacagacatcatcatcaccatgaaaggcaggaaaatgttgaagttgtggcaacagaggaagtgattcttgtggagaacgcaccgaaatcgaggaagcatcaccaccacaagcagaggacttctccaccaccgcccctgccgcaaacctcaccaccattcctcacccccactgaagaagtgggtttcaatgtggtgtgggaaccccaggccttttggaaccagccctcacccaatccctccactgatctagatctctcacaggataacgaggttgtcgatgcagtggagactatggacactacttcagcttccgatgaattcaccactgttgtttttcaatcagagacaaaggagtctattagggaaacacagaagcacactagagtggtggaggaggaaataataattgatcaattggacccaccaccctatgcaccaccgccacttcaagtgcagacaggattctttccagtggctcagcagcccccactttcacccatcgcagaagtggtgcaaacagatgtggtggcggaatcggtggaacctccactaccgcctacaggttatattcccagaataaatctaaagccaacggaaactattgtcgagaatgtcgaggtcatcgtgcccgcacaaattcaacaagagccggagtttattccgcagccgggatttgtggccagaattgtggagaacatagaagttgccgcagcatctaagtcatcactggtttcacctcaaaagagttattatcctcggacaggcatggtggagacgattgtggaagatattgaagtggtaaaagatgatgctcctgttcagagtggttatattcccggaaatgttgaagtggaatcgattgtggaaaatatagatgccgattctccctttcttcttccacccaatggattcgctactgatgagtccattgtggaaaacattgaagtctcgacagatgtagatgattctccatttctgcttccagttaatggctttgactctgaaccagtctgtgtggaatcgattgttgaaaatatagaagttacaccttctcaacctgtcctgcaaatatcagatcaaagtgttgttcctgcaggctttgtcgagtctgcggtggaagacatacaagtcatagaaacggaagatcccccattcctactgccgactgaaaatgactttactgctcaggcaggcaatgtggaatccctgatagaaaatatagaagtaactacggaggtggatctcacattaagacaatcagaacaaatagaaaatctacctcgatctggtttcgtggaatccattgtagaaaacattgaagtcactcaagaagtagatcccccacagcctgcagttccaagtgatgtggtcactcagagtggtctagtagaatcgatagtggaaaacatcgaagtcacagaaatagtggatatacaagctccggctccaccacaaactggatttgtggaatcggtagtggaacgtttagatgtcacggaagaagttgaaccttcagtgcgaccaccacttccacttagctatcctcctcgttcagggttcgtagaatctatcgtggagaatatagaagtagaacaagttactccttcttatcaacctccccagcaaattgttcctcaatcaggttttgtagaaacatttgtagaggatattgaaatcaaagaatctgcgctaccgccaattcaaaatggatatgcaccccaagcaggagtagttgaaacaattgtcgaagaagtagaaatcgtacccgatcctccacgtcaatccatagtgacaaccgattatatgccccgtgcaagtttggttcaagaactggttgtggaatcacttgaggtcacaccaacatcatcgcctccacccgaacagtttcccttcatttccagagagagcctaatcgtagctgatgattacgtggaggtggaagaagtcaccccttacaatacggcaccacatagtccaatagtggaagtggaaagattgagtgaagccgagtcttatgtggagattaatgaagttgcaccagttaatactccaccccagaggtccgttgaagtgggtttccttcccagacccagcttagccgaaacggcggtggttgtggaatcagtggaggtaactccaactccaacaccgccaccaagcccagcactgaaactcaaaataccaccgtcgaatcagataccatcggaggtgattgtggaccaaccagttccatcttcaactttcaagccaccagcgaagccacttaacaatttcattctaactgatctggtcatcgacgatcctccattcgtagaagtggtggaaagggaagtggttgttgagtccgcaaacaatggccaagtcactgaggttatcgaagtcacggaagagatcatacaacccgtcacacccatcggaactgttttggtgggggaggtatccgagcaaaacagcgacaaatttggcaagcgatattccctaagtgcgacactggctgatggacagcagcaggtgcagggaaaaccggaaacgaatcagtcaccaccgatccaaaaacgagataaacccaccgaaccaccgaagcgacgcggatacggaggaccacctccacggggtcccggaatcgcctacggaccaccgccacctcgagtgaatgtcggcatcaatatcggcggaccaccgcgtccgccgcccataggcgtgggcatcggctttgctccgccacccgtggtggttgcaccaccgccaccaactgtgatcgtcggagcaccaccaccaccgcccatggtcgtgatgccgccgccacggcccaccgttgtggtgggtggccaggctccggtggccagtgtgtatgcccagccgcaaggagaggttttctgctgcactattctctga

SEQ ID NO: 27570 - protein, 1012 aa, DROSOPHILA
MKTTIVEERSVNETIETIATSSGSVQETIEIVNIDGSVAPKHRHHHHHHRHHHHHERQENVEVVATEEVILVENAPKSRKHHHHKQRTSPPPPLPQTSPPFLTPTEEVGFNVVWEPQAFWNQPSPNPSTDLDLSQDNEVVDAVETMDTTSASDEFTTVVFQSETKESIRETQKHTRVVEEEIIIDQLDPPPYAPPPLQVQTGFFPVAQQPPLSPIAEVVQTDVVAESVEPPLPPTGYIPRINLKPTETIVENVEVIVPAQIQQEPEFIPQPGFVARIVENIEVAAASKSSLVSPQKSYYPRTGMVETIVEDIEVVKDDAPVQSGYIPGNVEVESIVENIDADSPFLLPPNGFATDESIVENIEVSTDVDDSPFLLPVNGFDSEPVCVESIVENIEVTPSQPVLQISDQSVVPAGFVESAVEDIQVIETEDPPFLLPTENDFTAQAGNVESLIENIEVTTEVDLTLRQSEQIENLPRSGFVESIVENIEVTQEVDPPQPAVPSDVVTQSGLVESIVENIEVTEIVDIQAPAPPQTGFVESVVERLDVTEEVEPSVRPPLPLSYPPRSGFVESIVENIEVEQVTPSYQPPQQIVPQSGFVETFVEDIEIKESALPPIQNGYAPQAGVVETIVEEVEIVPDPPRQSIVTTDYMPRASLVQELVVESLEVTPTSSPPPEQFPFISRESLIVADDYVEVEEVTPYNTAPHSPIVEVERLSEAESYVEINEVAPVNTPPQRSVEVGFLPRPSLAETAVVVESVEVTPTPTPPPSPALKLKIPPSNQIPSEVIVDQPVPSSTFKPPAKPLNNFILTDLVIDDPPFVEVVEREVVVESANNGQVTEVIEVTEEIIQPVTPIGTVLVGEVSEQNSDKFGKRYSLSATLADGQQQVQGKPETNQSPPIQKRDKPTEPPKRRGYGGPPPRGPGIAYGPPPPRVNVGINIGGPPRPPPIGVGIGFAPPPVVVAPPPPTVIVGAPPPPPMVVMPPPRPTVVVGGQAPVASVYAQPQGEVFCCTIL

SEQ ID NO: 27571 - DNA, 3939 bp, DROSOPHILA
ataggtgactggtgcaaaacccacaggcgccctcccgctcgcacatagcacgctcgtttaagggcgcgcttactatgcgcgtgagtgcaagcaggaggcaagcaggtggcgttcgtgttgcatccgccagcttatacacggcacccagcatacccctccgacacttcactactcagaagcaatcaaagtttttgcacttttttttacacttttattataacaacttatttgttattgctatccgcaaacctagacagccactctgctcgtcgctagcgcttccgcacgcgacacgcccactcagggcgccactttcgcactgcccattcttgggggagttgggattttgttatatattttacatttgggttttttgccgccgcagacacacacgccaagcacttgttactgaccgaagaccgctcacagtcttcgcatttcgtgaagcgtccgtatcaaactcacgtttcccaaaatcgcatttgcgttcgcaggaattacaattcttttgattatttattttatttttgagcaaaaattatttttctcagatcgccatgatgaacggttgcaaatttaaactatcgagtgcatttagtcggtggtcggtatcgatacacagcttgggtatatacagagttgcattcggcccaacgctgtattttgttttaacaacatttaattaatttccacagaattttcatattaatttgtatttgaaaaaaaaagttatttccattaagttaagatatgttaattaagaattttcttattattacctctaaatattatagattttcttaacttaatagaagttaataattatgtaacaaacaatgtcgaaatgatgaaattacaatctttttatttttttagagaggaattttttattcgttaaaaaaaacccgataagctgaaaacaaacatcgcgattgaagataaatatcggttaaaaatatgttattgtgattacagaggaaaactatcgactgagcgcacccaggagcccatctccagcaccaacaagaaaaaatatgtatatttataactatatgtaaaaaggaaaaagtcgcgtcgcacaaaggtaacgtgaatactatttaatcggacctctgatgcagcgataagcaggctttttttcaacggagcctcgctaatttgaccgccctctgccagattgtctttgtctctctcgaaaagtcggtggaacggtgttgtactggaatatttgaagagtggctcatcaaacgcaacaaacatgtcaaacactccaagtctgaacagtagtagtagcaatatcagtagcaaggcgccccttgcccagaagcaggacacgtacagtagcgacagcagcgaggaagttctcgaaacagccgaggagcggaggaggcgcatcctgaaggagcgcagccggctgaaccgtccgcagcacaatatgtcaggcggaggtgctgtgcccaagcacgacataaaatccccttgcggagcatctcccagctgccaggcaactggttccggaatgggccgcctgccgctccctcccgaaaggatcaccatgctggtggacggtgtgcgcttcacggtggagcaatcactgcttacagcacatcccaccacaatgcttggcacgatgttcggctccggcttccagttcgctcataccaacgagcgcggcgagtacgacgttgccgacggcatttcgcacttagtgttcagagccattctggagtactacaaaagcggtgttatccgctgcccgcccactgtttcggtaccggaactaaaagaagcctgtgattatctgctcattcccttcgacgcaaccacggtgcgctgccagaacctaagtgagtataacgcgaactattcctgccagggcgaaccttagttgtggccacctctgcttgttttccgtctctttccttgtaacatgccctctgttatgtttgacataaaggaggccttctccacgagcttagcaacgaaggagcgcgacaacaatttgaactctttcttgaggacctaattctgcccctcatggtggcctcggcgcagcgcggggatcgagagtgtcacgttgtggtgctccttgaagacgatatggtcgagtgggatgaagagtttccgcctcagatgggcgaggagtattgtcagagtgagtgtatttaaaaaatgtgtttgcattagtatcacggaagtggaagcaacactaacatttctaacgcagccgtgcacagcactgccatgcaccgattcttcaagtacatcgagaaccgcgatgtggccaaacaggtgatgaaggatcgcggtctgaagaagatacgctgtggcatagagggataccccacccacaaagagaagatccgaaggcgtcccggtggacgggctgaagtcatctacagctatgtgcagcgacctttcatccacatgtcctgggagaaggaggaagcaaagagtcgccatgttgatttccaatgtgtaaaatccaagtctgtaacgaatctagcggaagcaaatgcagatccgccactggaattggacgcaagtgcgtaaggctcgaaacggagagtaacagctcccttaaagcccaaattcgttttcaggtggaaatccgattccccctatagcagtggctaatccgcatcccaataacgctgagctcgctgccggtatggccgtcgcacccgcagctataggcgtggctggtccagcagtcgtggtagccgtcgacgaggcggccgggggcgttgtaatgctcaacgagttggaccaggcagcgatcgctgttgccgtcggaatagttgatgaaaatatgtagatcaactgaccggctggtagtcggaacacactgccagagcatcacagcgcacagaaaaacactttacgtttttaattaacatttttatatgtatatgtaataaatggaaatttcgaatacgaaaaaccaagcaattgatttacgaatagaagaacatgaacgttaccagacattagctgtgatcacgctccgtcaaaggcctcccgttcgccctgtggaagcgtcgaagtctcccagttcagtgaacgatcgatagccattttccacttttggtagcgcaggttgcgatcggtggcactgatcgatggctttatggcttctcgggggccagatttagagagtggagcctccatttggtatcggttttcaacggctttgtaggctgccattgcagctccctaaagcatttttgaagcattattgaagctgcatttacatcacaagttaaagtactaaccagcgctgttgtctctgcgatcttcgcccggagtacttgaattcctactaggtcggattgaagctgcaggaacagattattcacagtcatgcccccgtctaccataagcttggccagtggaatcttgcagtccttgtgcatcgaatcgagaatatcacggacctggaaacaaactgcttccagggtggctcttactatgtgctcacttgttgtttcttcactcagtccacaaatgacaccgcgagcgtcctgattccagtagggggcgtagagtccattgaaagctggtacgaagtatacgtcaagagagttgtccacagtgctagccatggtttcgatctgccccgagttttgaataaggttcatgttgtcgcgcagccagttgaatgctgcaccggcaatggacacgcttccctcaagggcgtaaaatgggactgccttccgtcctagttggtagccaacagtcgttagtaatccgtgcgttgagtgtacaattgaaggtcctgtgttataaagcagaaaacatccagtgccataagtggctttggcctgacctttggccaggcattgttgacccactagagcggcttgctggtcgcccagaaccgatgttatgcctatgccttgcagaacgccctgcgcaatgctgccatagaactctgag

SEQ ID NO: 27572 - DNA, 1607 bp, DROSOPHILA
caggagcccatctccagcaccaacaagaaaaaatatgtatatttataactatatgtaaaaaggaaaaagtcgcgtcgcacaaagattgtctttgtctctctcgaaaagtcggtggaacggtgttgtactggaatatttgaagagtggctcatcaaacgcaacaaacatgtcaaacactccaagtctgaacagtagtagtagcaatatcagtagcaaggcgccccttgcccagaagcaggacacgtacagtagcgacagcagcgaggaagttctcgaaacagccgaggagcggaggaggcgcatcctgaaggagcgcagccggctgaaccgtccgcagcacaatatgtcaggcggaggtgctgtgcccaagcacgacataaaatccccttgcggagcatctcccagctgccaggcaactggttccggaatgggccgcctgccgctccctcccgaaaggatcaccatgctggtggacggtgtgcgcttcacggtggagcaatcactgcttacagcacatcccaccacaatgcttggcacgatgttcggctccggcttccagttcgctcataccaacgagcgcggcgagtacgacgttgccgacggcatttcgcacttagtgttcagagccattctggagtactacaaaagcggtgttatccgctgcccgcccactgtttcggtaccggaactaaaagaagcctgtgattatctgctcattcccttcgacgcaaccacggtgcgctgccagaacctaagaggccttctccacgagcttagcaacgaaggagcgcgacaacaatttgaactctttcttgaggacctaattctgcccctcatggtggcctcggcgcagcgcggggatcgagagtgtcacgttgtggtgctccttgaagacgatatggtcgagtgggatgaagagtttccgcctcagatgggcgaggagtattgtcagaccgtgcacagcactgccatgcaccgattcttcaagtacatcgagaaccgcgatgtggccaaacaggtgatgaaggatcgcggtctgaagaagatacgctgtggcatagagggataccccacccacaaagagaagatccgaaggcgtcccggtggacgggctgaagtcatctacagctatgtgcagcgacctttcatccacatgtcctgggagaaggaggaagcaaagagtcgccatgttgatttccaatgtgtaaaatccaagtctgtaacgaatctagcggaagcaaatgcagatccgccactggaattggacgcaagtggaaatccgattccccctatagcagtggctaatccgcatcccaataacgctgagctcgctgccggtatggccgtcgcacccgcagctataggcgtggctggtccagcagtcgtggtagccgtcgacgaggcggccgggggcgttgtaatgctcaacgagttggaccaggcagcgatcgctgttgccgtcggaatagttgatgaaaatatgtagatcaactgaccggctggtagtcggaacacactgccagagcatcacagcgcacagaaaaacactttacgtttttaattaacatttttatatgtatatgtaataaatggaaatttcgaatacg

SEQ ID NO: 27573 - protein, 439 aa, DROSOPHILA; identical to SEQ ID NO: 204

SEQ ID NO: 27574 - DNA, 5692 bp, DROSOPHILA
tggccacctctgcttgttttccgtctctttccttgtaacatgccctctgttatgtttgacataaaggaggccttctccacgagcttagcaacgaaggagcgcgacaacaatttgaactctttcttgaggacctaattctgcccctcatggtggcctcggcgcagcgcggggatcgagagtgtcacgttgtggtgctccttgaagacgatatggtcgagtgggatgaagagtttccgcctcagatgggcgaggagtattgtcagagtgagtgtatttaaaaaatgtgtttgcattagtatcacggaagtggaagcaacactaacatttctaacgcagccgtgcacagcactgccatgcaccgattcttcaagtacatcgagaaccgcgatgtggccaaacaggtgatgaaggatcgcggtctgaagaagatacgctgtggcatagagggataccccacccacaaagagaagatccgaaggcgtcccggtggacgggctgaagtcatctacagctatgtgcagcgacctttcatccacatgtcctgggagaaggaggaagcaaagagtcgccatgttgatttccaatgtgtaaaatccaagtctgtaacgaatctagcggaagcaaatgcagatccgccactggaattggacgcaagtgcgtaaggctcgaaacggagagtaacagctcccttaaagcccaaattcgttttcaggtggaaatccgattccccctatagcagtggctaatccgcatcccaataacgctgagctcgctgccggtatggccgtcgcacccgcagctataggcgtggctggtccagcagtcgtggtagccgtcgacgaggcggccgggggcgttgtaatgctcaacgagttggaccaggcagcgatcgctgttgccgtcggaatagttgatgaaaatatgtagatcaactgaccggctggtagtcggaacacactgccagagcatcacagcgcacagaaaaacactttacgtttttaattaacatttttatatgtatatgtaataaatggaaatttcgaatacgaaaaaccaagcaattgatttacgaatagaagaacatgaacgttaccagacattagctgtgatcacgctccgtcaaaggcctcccgttcgccctgtggaagcgtcgaagtctcccagttcagtgaacgatcgatagccattttccacttttggtagcgcaggttgcgatcggtggcactgatcgatggctttatggcttctcgggggccagatttagagagtggagcctccatttggtatcggttttcaacggctttgtaggctgccattgcagctccctaaagcatttttgaagcattattgaagctgcatttacatcacaagttaaagtactaaccagcgctgttgtctctgcgatcttcgcccggagtacttgaattcctactaggtcggattgaagctgcaggaacagattattcacagtcatgcccccgtctaccataagcttggccagtggaatcttgcagtccttgtgcatcgaatcgagaatatcacggacctggaaacaaactgcttccagggtggctcttactatgtgctcacttgttgtttcttcactcagtccacaaatgacaccgcgagcgtcctgattccagtagggggcgtagagtccattgaaagctggtacgaagtatacgtcaagagagttgtccacagtgctagccatggtttcgatctgccccgagttttgaataaggttcatgttgtcgcgcagccagttgaatgctgcaccggcaatggacacgcttccctcaagggcgtaaaatgggactgccttccgtcctagttggtagccaacagtcgttagtaatccgtgcgttgagtgtacaattgaaggtcctgtgttataaagcagaaaacatccagtgccataagtggctttggcctgacctttggccaggcattgttgacccactagagcggcttgctggtcgcccagaaccgatgttatgcctatgccttgcagaacgccctgcgcaatgctgccatagaactctgagctcgagcagatctccggcaaaatggtcttgggcagcccaaagaactttagcaagttggcatcccactgaagggtctcgatgttcatgagcatagtgcgcgaagcgttggtcacatccgtcttgtggacaccacagtccttcccgcccgtaagattatacattagccaggtgtcgatggtgccaaacatggccgtgcccttctccatagcctggctgacaaccggcacgttgtctcgaagccagcgtagtttcacgcccgaaaagtacggagacagaggaagtccgcacaatgggcgcaggtagttgatgttcctggcattgttcggaatagtctccaaaagctcctccaccgtgctggtggtacgattgtctagccagatgatagcgttcaccagcggttggccggagtttctatcccatacgactgtggactcgcgttggtttgttattccaatcgtgattatttcctgaaacgaggcgaaagcttaggattctatttcaaatattcgaattaagttaaaacggtcaactcttgtatattctttccttggttgtgtgtgtacacacttgtttgccattctctgggaaacgccgtaagctaggggaatggtaaagagagcagcgcagtaaacaactaggtaaaaataattgataacatcttacgacgtaacgattcgaaaattttccacagccggcgacccgtttcaatgtcaactctagttaataccacgagacgcagcattgtgatcgccattcatcagcagctacgcaggatgtccgtccaaaagaggaaggatcaaagtgcgaccattgctgtgggtcagatgcgctctaccagcgacaaggcggctaatcttagccaagtgatagagctagtggatagggccaagtcacagaacgcctgcatgctctttctgcctgagtgctgtgactttgtgggcgagagccggacccaaactattgagctctccgagggcttggacggcgagttaatggcgcagtaccgggaattggcgaagtgcaacaaaatttggatttccctgggtggcgtgcacgagcggaacgatcaaaaaatcttcaacgctcatgttttgctcaacgagaaaggggaactagcagcagtatacagaaagctgcacatgtttgatgttacgactaaagaggttcgcctacgcgaatcagatacagttacgccgggatactgccttgagcgcccagtgagcactccagttggccagatagggcttcagatttgctacgacctgcgttttgctgagccggcggtgctgctcaggaagctgggtgccaatttgttaacatacccatccgcattcacatacgcaaccggtaaggcgcactgggaaatcctcctgcgggccagagccatagagactcaatgctttgtggtcgctgcggctcagataggttggcacaaccagaagcgacagagttggggccacagcatgatcgttagcccctggggaaacgtactggctgactgcagcgagcaggagcttgatataggcacggccgaggtggacctttccgtgcttcaatctctgtatcagaccatgccctgcttcgaacatcgtcgaaacgacatctacgccttaacagcctacaaccttcgtagcaaagaaccaacccaggatcgaccatttgccactaatatcgtggacaagcgcacaattttttatgagtctgagcactgctttgcattcaccaacctgcgctgtgttgtaaagggtcacgtccttgtgtccactaagcgagtgactccgcgcctttgtggcctcgactgtgccgaaatggcggatatgttcaccactgtgtgtctggtgcaaagattgcttgagaagatttaccagacaacttccgccaccgtcactgtgcaagatggtgcacaggcgggacaaactgttccccatgtacactttcatataatgccccgccgtctgggagacttcgggcacaatgaccagatctacgtgaaactagatgagcgcgccgaggagaagcctccgcgtaccatcgaggaaaggatcgaggaggcgcaaatttatcgcaaatttctgacggacataagctagctttttaccccaccccttttcctgccatgtgatttatgaagaacatataataaagagatagattttcaatcggccatttcggaatagatcagatgagggaatcgattcatctgaaattgacgtacctcaaccttcccgcccacggccacaagtttcttgcaggcaccggtgatgcactcgttgaccgtattcactatggccatgggatcctgctcgcaccatccctccttctggaaaatagactccacttcaatctgatgaaagcacacaatttcgtcagtgcccgcacgaaatataataaatcgcgcggaagtggttccctcgtcaatagccccaacgaatggaccagatagcgtgggtggaggcggtgtcgtttcggttgtgggagaatccattttttttacgtggtgtccagagttcacctttacagtcaataaatgccagcacgctttctcgcgagattgtttcacactaaaattagttattggaatcttgtcgacatattcgacggaaattatgcgataagagataaggtgagcgagccttctctttgcaaatcgttacgatagcggtgtgtgcaagctaaaaacccgtcggatagtaaatatttactgcgaatgggcgcgacataacgtttatgcatcataaagaacgtgatttttgctatcgggaacaaaccttaaaattataaatcatttatttcttcattaagtgcattataatttaatatttacatattaaaattttgttataggtaatttttcacaaaatacacctatatataaaacgtattgcgcataaacgaacattcacaacgaaataatgtgtctggtaagtggggtaacacttttgcacgcaggctaaagagtatcagctgatctgaacgccaaactggataataacaaaaatatccagtttgttaccgccaagtaaactagtatattccgacatgatgatttcagacagtcagaagaaaggactgcgggagttacttctaaatgacaagaacttaactgttctgctacagttggccaaaggggccaccaaaaatatgtgcaaaaccgaagacccggagggtaagatttaattttggaatttgcacaaccaataagtattttgtatttaacttgcagaggcccttcgtctgatcactacacacattccagacatttacgtactgctttccaagcgcgctataaaaaaggaactcctctttacgtatttgagcaatcgacgcgctgacgcagccacagactttagcaaggcagacctcatagccaaggttatacagtattggaagcaggagcataaatcaagcatagagctttccggagaccagacttccagctcacttcatattcagagcgaagaggattatcccattcacacgattgcccgcaagttcggcgagtggttcttcgaacgcttcaacgcagacgcccttagtctggtggatttatgggcagatgcggctctacatctcacgatcatagccagtgatggaatcaatgagtgggagtgtacgacggctgccgaggtgttatcggcactaac

SEQ ID NO: 27575 - DNA, 1885 bp, DROSOPHILA
gcaaagagaaggctcgctcaccttatctcttatcgcataatttccgtcgaatatgtcgacaagattccaataactaattttagtgtgaaacaatctcgcgagaaagcgtgctggcatttattgactgtaaaggtgaactctggacaccacgtaaaaaaaatggattctcccacaaccgaaacgacaccgcctccacccacgctatctggtccattcgttggggctattgacgagggaaccacttccgcgcgatttattatatttcgtgcgggcactgacgaaattgtgtgctttcatcagattgaagtggagtctattttccagaaggagggatggtgcgagcaggatcccatggccatagtgaatacggtcaacgagtgcatcaccggtgcctgcaagaaacttgtggccgtgggcgggaaggttgaggaaataatcacgattggaataacaaaccaacgcgagtccacagtcgtatgggatagaaactccggccaaccgctggtgaacgctatcatctggctagacaatcgtaccaccagcacggtggaggagcttttggagactattccgaacaatgccaggaacatcaactacctgcgcccattgtgcggacttcctctgtctccgtacttttcgggcgtgaaactacgctggcttcgagacaacgtgccggttgtcagccaggctatggagaagggcacggccatgtttggcaccatcgacacctggctaatgtataatcttacgggcgggaaggactgtggtgtccacaagacggatgtgaccaacgcttcgcgcactatgctcatgaacatcgagacccttcagtgggatgccaacttgctaaagttctttgggctgcccaagaccattttgccggagatctgctcgagctcagagttctatggcagcattgcgcagggcgttctgcaaggcataggcataacatcggttctgggcgaccagcaagccgctctagtgggtcaacaatgcctggccaaaggtcaggccaaagccacttatggcactggatgttttctgctttataacacaggaccttcaattgtacactcaacgcacggattactaacgactgttggctaccaactaggacggaaggcagtcccattttacgcccttgagggaagcgtgtccattgccggtgcagcattcaactggctgcgcgacaacatgaaccttattcaaaactcggggcagatcgaaaccatggctagcactgtggacaactctcttgacgtatacttcgtaccagctttcaatggactctacgccccctactggaatcaggacgctcgcggtgtcatttgtggactgagtgaagaaacaacaagtgagcacatagtaagagccaccctggaagcagtttgtttccaggtccgtgatattctcgattcgatgcacaaggactgcaagattccactggccaagcttatggtagacgggggcatgactgtgaataatctgttcctgcagcttcaatccgacctagtaggaattcaagtactccgggcgaagatcgcagagacaacagcgctgggagctgcaatggcagcctacaaagccgttgaaaaccgataccaaatggaggctccactctctaaatctggcccccgagaagccataaagccatcgatcagtgccaccgatcgcaacctgcgctaccaaaagtggaaaatggctatcgatcgttcactgaactgggagacttcgacgcttccacagggcgaacgggaggcctttgacggagcgtgatcacagctaatgtctggtaacgttcatgttcttctattcgtaaatcaattgcttggtttttcgtattcgaaatttccatttattacatatacatataaaaatgttaatt

SEQ ID NO: 27576 - protein, 538 aa, DROSOPHILA
MDSPTTETTPPPPTLSGPFVGAIDEGTTSARFIIFRAGTDEIVCFHQIEVESIFQKEGWCEQDPMAIVNTVNECITGACKKLVAVGGKVEEIITIGITNQRESTVVWDRNSGQPLVNAIIWLDNRTTSTVEELLETIPNNARNINYLRPLCGLPLSPYFSGVKLRWLRDNVPVVSQAMEKGTAMFGTIDTWLMYNLTGGKDCGVHKTDVTNASRTMLMNIETLQWDANLLKFFGLPKTILPEICSSSEFYGSIAQGVLQGIGITSVLGDQQAALVGQQCLAKGQAKATYGTGCFLLYNTGPSIVHSTHGLLTTVGYQLGRKAVPFYALEGSVSIAGAAFNWLRDNMNLIQNSGQIETMASTVDNSLDVYFVPAFNGLYAPYWNQDARGVICGLSEETTSEHIVRATLEAVCFQVRDILDSMHKDCKIPLAKLMVDGGMTVNNLFLQLQSDLVGIQVLRAKIAETTALGAAMAAYKAVENRYQMEAPLSKSGPREAIKPSISATDRNLRYQKWKMAIDRSLNWETSTLPQGEREAFDGA

SEQ ID NO: 27577 - DNA, 5903 bp, DROSOPHILA
ttagacaaatgttaattgaacggctgcaaacggatccgatgggctcgccgattgggcaatcgcttggttagcacttggctatacccgagatcttatttaacatgtccatcataaaagttttcttttctgtttactgatccgaaaccgcagacacacatgcagttgtaattcgtaagcccggaaaatgtgttgcaatgtgtggcatgtgcctgagttgtggtttcttgaaagtggatcatagacctgacaaacaaattgcagcgaaagtaagctacagattgaaaaactatgattgttttgaagaaagaacagaatcggagaaagcttgacggtttgattactctttgaatttcttactgaaatgtttataaataatgtgcttaaaattatttaaaaccttttctagctaagctcaactccttcatgttttcttcacctcagctgtcgtttcccaggttagtaaagctgtcatgcgaaatttattagcctgtttccgctgactattgtcttaccagcttttatggccttttcaattaagcgatttgcgcgcaatttagcccagcaaatgggtcgttagtcccagcagcgttttataataaattatttatgtattttacataagcctcaaaccacgaaccccatccgaaactcatcaggtccctcattaatgtcaatcaagggagtacaagacgttatgtgtatattatcacgaacttttgctttttgatttctattattaggcactttcaatttcatattaatatcaaaaaaaccaaagcccactagtttctgggctagaaagaccaataaagttagctgcagcagtggcatcaattagcacaaataccttaaatgacaaaacaaacagaagcgcgacaaaaaaaatacaacaaaaagacaaaactctgagagtttgccgagatcggcagctggtggagccaaaagcgtttggcgtataagtagactaagaagcccggcgatcgcgtttagtgcgtcgcggttggtctacgaggcaacagctcttgagactccagagcttcattcgcagctctcggactcggattcggattcggtttcggttttggttgtggtttcggttttcaaaagtcagagttaccgcagataaacttcgcgttgcgtgacaaaagacctggcgaatctccccggcttttcaagtgcttgtgagcggagcgagtgagtgggaaattggccaaagccacaatagaaatccgcacaacaataggcatcaaaagctgtttttaattgtgcacaaacggattgaaagtgttcgggaaaccaagaccgccaataaattaaaactaaaactgaaactcaatcggcaacaagttgattgaaaacccaaccaactggcagtgcaggccgagaaaaacgctttggcaaaccgatagaaaaaaatataaatcaaacgctcaagtgagtttttctcgagaggtgttttcccaatgcattttgggcgtgtcaagtaaactagttgcactctgaaaggcattcagtcaacttgactgtcgaagaaatcaacgtttagcgtgaaaggccaatttgattataatcggaaaactgatgggggcagaaaaaaaaatcgagtatttaatggtaggcttttcaatgcaatgctggtgtcaaataaatcgtaaaaaaagcagttaaagtcctcaaatttgttttgttttactgcaaacccctgaaatgagtagttaaaatagtaaatacaatttgaaatggctgataaacaaaggaaacggcaattattctcatgaacgacaaattaaagtgacgaaagtgagttttcccagctgcatttttccagcaaattaggcatgctggctaaactagttgtatctcgaatcttggccaacttgggcggcgtgaaagccaatttgaatatgctttttggccacacctcgaagggcgagtgagtcgaaaaccaatatccaagtgatttgccaagatgtcgaatgccagcgagagtgacataatcgttcgggatctttcgaccaccttttgctcatttagcagctgaatgctaataggattcctttcgatttcgtcttcattcgagcgtgaatgaaacgcggcccagagaacagctgtcctccccgccccaaccaactgctgttttggaacaatggccataaaagtcaacgacaagtggctgcttgacatttcttctgcattactcgcaggcgctaggattatcactcaagttcattataaccgcctgggtgataaaaccatgctatatatacgttatatatatatttatataaatatatatctcagatagttgttgttgctaccgctcgagagcctcaaggtcgtcgcttgtgcgacaagggcaaggataagccgctctgcttcgccgccattgtgccgcacaagtgtacacaagaaataaacgcaaacagagggaaaaaatggaaaaaatgaaaagaataatggctggcagctcggctaagtttctgaattcgggtgcgcagatttctgtttcatcaaattttcggcatttaaattatattgcctttggggagcaggcgcacaaaatgcctgaaagcagcagcagcagactcacaaaagtgccactgccaccattgttcgatggcatacgcggcgtatgagcaatcttgcctctttgccactttttccgcctgcgggggagcaactgcttttcaaactaaatgcgtgtgtgccgtcaagttctgtggacttattgggtagaaaatcaaagtttatacacagccagaaaagtgatggaattaagtccaaaaacaagtcatcttagaacttaggctgtttcaaacttggaaagtacattttcatagttagtaggacctgcacagttgtaaatggtttggttattttaaaaagtatttgaacattattgaatggcctttactttatgttaatttaactcattcaagttaaatcttatatcatatcctttgttgcttgccgcttttatttccaagaactgtttactactaaacttactaaaagcattgtaaagttgaacttctatggttctccttcaaagcctttgcttgtagtagactaagttttatgcacaataaacaagacttggtcagggttgatttggccctcattggcgctacttcaatagctcttcaatttgtgttttctttgtttgaactcacattgcacgagggcttgtagctgtgctcaatttaacgctagctaactccgacttgattattggcagcgaccataaaatggaaggcaccgagtctaccgacaaatgggaatcccctcctaccatgcattactcttaagtgctcccccgagatccaaaatccgatgacaagggacaatcgacgattgtttgcccgggtttgttttgcaactaactcgaactaagtgctgtcagtgctgaaagttaaaatgaatatggattttgcgagtatgccacaatatttgcactctaacgaaacgcagttcagttcagcttttcagagtatagaattcaaaagagggtgggattagtcgttttgaataataaacgcgaatggcctttatttattattgattgattttcccggcaaaccacttggaaatgcatcaaaagtttcgccgccacgaggagcgaaagaaacgccaagagaatcagcataaatacacaatttagtttgccgccggcaggcagattgctcaactttttacataataccattcccaacaggaccgagtggatccgaggaccaaaccgaagatgtcgggcttacgcaaaacatccattgcgctgatgaggcgctccacatccagcaccaccatactgccgcattccgggggcgttggtggtgccgtgtcgccgcccagcagcggagtgggcgtggccacggaaattgaaaaatcaattgcaatgcaacggctgcggacgggcgagtcgtcgaatccgaagaaattaaatgtcaggttcgtgattttcccacaccaaagacttggcttacatggaaataaaatgttgaataactttgccaagtttaactaaatatttttgaattaactttacaaatagaagacttgttctttgcatttctaaatctacttagattcagtttgaatctaagtaataaaacgcactactaacctaatgtaataatatggtgcttatatgtttttttcactgtatacaatttgcactaattgacagccaacagcccgttacatcagtagcaacaactaggactacagcaagctcactaccagcagaaaccacttcttcaccggcagctgcagtgcgtccttattcggaagtaccgggtccataccccttgccactgattggcaactcctggcgcttcgctccactaataggtgagtggccattattggcatccgttgtaactccgaccaggataactaatgaaccattgccatcgaccgacaggaacatacaaaatcagcgacttggacaaggtcatgaatgagctgcatgtcaactatgggaagatggccaaagtgggcggtctcattggtcatcccgatctgctgttcgtcttcgatggcgatgagattcgtaacatattcaagaaggaggaggcgatgccgcatcggtgagtgattaatcaacttttgccatcatccttcggtggtgcagtgcgaaattgcgtatacgacgtgtgtggcatgtcagtttggtatgattgattatctccagcttgttcgtaagtcgtgatctgaactcactttgggttatataattcgatagttagatgtgattgaaatgttaggctttgagactattattgttattgaataaccctaacatgattcgcaattcgttaaatatgctgtttatttaagattatgcctacccatgtcctgcatggctgcacctggtctgtgtagcgagaaataccccacataaatgccagggcccacgcacatggtatagcatatagcatatttatccacacgcaaagtcagtcatgcatgggtggtttggaacccctttgcctcgccttttaccctccacaatgcaaatgcaattcctgtttacttatgcgcataccgaatgaatgcagcctgtaattaaattattaactaacgaaggcacaaaatggcgattgcgcctgggaatgcgaattaagcgggatgtgtgaaaacatggcgacagattgaaatcagtggtaaaattcgaacatcagtgcaaaattgcttttaatctgactgacacatttgtgtgggaagtgaaaatgaaatcagcaatttatatgagattgaatgagtaaataaataactaccattgaaagtcataagcttatacttataattaaatatcttgaatggtgtttagtttgaggtgttttgacgctttaaatacaatatttttgggattgtaaataatccatcccgataaaacaaagccgtcaaattgaaattagttgcgactttcacttctcgtttggctttgcgatccgtaggcctagcaaccgagattcaaccgaaataaaaccaaacaatccgaactattcacaaactatccgacaagcgtttttgcatcatagaaataaataaaactgaccgaaatgatggagcaagcaaagaagtagacaaactgaaaaacaaacaaaacgaaagtcacacagatcgctaacgtgtccataacttttataagctttcttttcttcgcctttcattcctcctatcactcggatttatctgcgagcactatgcgctcgcatagtggccatgaaccaaatttaacaagttacgcttatatttcgcatacctcgagtatctaaccatatcatatcacatcgaaatgtgatttgcggacaaaagtgcggatcgatagtgaatcgcagacaaacccgcattgtttgcatttggcgaacgcgtttagcaagtcatcattaaaacgactg

SEQ ID NO: 27578 - DNA, 1061 bp, DROSOPHILA
ttggtctacgaggcaacagctcttgagactccagagcttcattcgcagctctcggactcggattcggattcggtttcggttttggttgtggtttcggttttcaaaagtcagagttaccgcagataaacttcgcgttgcgtgacaaaagacctggcgaatctccccggcttttcaagtgcttgtgagcggagcgagtgagtgggaaattggccaaagccacaatagaaatccgcacaacaataggcatcaaaagctgtttttaattgtgcacaaacggattgaaagtgttcgggaaaccaagaccgccaataaattaaaactaaaactgaaactcaatcggcaacaagttgattgaaaacccaaccaactggcagtgcaggccgagaaaaacgctttggcaaaccgatagaaaaaaatataaatcaaacgctcaagaccgagtggatccgaggaccaaaccgaagatgtcgggcttacgcaaaacatccattgcgctgatgaggcgctccacatccagcaccaccatactgccgcattccgggggcgttggtggtgccgtgtcgccgcccagcagcggagtgggcgtggccacggaaattgaaaaatcaattgcaatgcaacggctgcggacgggcgagtcgtcgaatccgaagaaattaaatgtcagccaacagcccgttacatcagtagcaacaactaggactacagcaagctcactaccagcagaaaccacttcttcaccggcagctgcagtgcgtccttattcggaagtaccgggtccataccccttgccactgattggcaactcctggcgcttcgctccactaataggaacatacaaaatcagcgacttggacaaggtcatgaatgagctgcatgtcaactatgggaagatggccaaagtgggcggtctcattggtcatcccgatctgctgttcgtcttcgatggcgatgagattcgtaacatattcaagaaggaggaggcgatgccgcatcgattatgcctacccatgtcctgcatggctgcacctggtctgtgtagcgagaaataccccacataa

SEQ ID NO: 27579 - protein, 198 aa, DROSOPHILA
MSGLRKTSIALMRRSTSSTTILPHSGGVGGAVSPPSSGVGVATEIEKSIAMQRLRTGESSNPKKLNVSQQPVTSVATTRTTASSLPAETTSSPAAAVRPYSEVPGPYPLPLIGNSWRFAPLIGTYKISDLDKVMNELHVNYGKMAKVGGLIGHPDLLFVFDGDEIRNIFKKEEAMPHRLCLPMSCMAAPGLCSEKYPT

SEQ ID NO: 27580 - DNA, 5263 bp, DROSOPHILA
atccgaaactcatcaggtccctcattaatgtcaatcaagggagtacaagacgttatgtgtatattatcacgaacttttgctttttgatttctattattaggcactttcaatttcatattaatatcaaaaaaaccaaagcccactagtttctgggctagaaagaccaataaagttagctgcagcagtggcatcaattagcacaaataccttaaatgacaaaacaaacagaagcgcgacaaaaaaaatacaacaaaaagacaaaactctgagagtttgccgagatcggcagctggtggagccaaaagcgtttggcgtataagtagactaagaagcccggcgatcgcgtttagtgcgtcgcggttggtctacgaggcaacagctcttgagactccagagcttcattcgcagctctcggactcggattcggattcggtttcggttttggttgtggtttcggttttcaaaagtcagagttaccgcagataaacttcgcgttgcgtgacaaaagacctggcgaatctccccggcttttcaagtgcttgtgagcggagcgagtgagtgggaaattggccaaagccacaatagaaatccgcacaacaataggcatcaaaagctgtttttaattgtgcacaaacggattgaaagtgttcgggaaaccaagaccgccaataaattaaaactaaaactgaaactcaatcggcaacaagttgattgaaaacccaaccaactggcagtgcaggccgagaaaaacgctttggcaaaccgatagaaaaaaatataaatcaaacgctcaagtgagtttttctcgagaggtgttttcccaatgcattttgggcgtgtcaagtaaactagttgcactctgaaaggcattcagtcaacttgactgtcgaagaaatcaacgtttagcgtgaaaggccaatttgattataatcggaaaactgatgggggcagaaaaaaaaatcgagtatttaatggtaggcttttcaatgcaatgctggtgtcaaataaatcgtaaaaaaagcagttaaagtcctcaaatttgttttgttttactgcaaacccctgaaatgagtagttaaaatagtaaatacaatttgaaatggctgataaacaaaggaaacggcaattattctcatgaacgacaaattaaagtgacgaaagtgagttttcccagctgcatttttccagcaaattaggcatgctggctaaactagttgtatctcgaatcttggccaacttgggcggcgtgaaagccaatttgaatatgctttttggccacacctcgaagggcgagtgagtcgaaaaccaatatccaagtgatttgccaagatgtcgaatgccagcgagagtgacataatcgttcgggatctttcgaccaccttttgctcatttagcagctgaatgctaataggattcctttcgatttcgtcttcattcgagcgtgaatgaaacgcggcccagagaacagctgtcctccccgccccaaccaactgctgttttggaacaatggccataaaagtcaacgacaagtggctgcttgacatttcttctgcattactcgcaggcgctaggattatcactcaagttcattataaccgcctgggtgataaaaccatgctatatatacgttatatatatatttatataaatatatatctcagatagttgttgttgctaccgctcgagagcctcaaggtcgtcgcttgtgcgacaagggcaaggataagccgctctgcttcgccgccattgtgccgcacaagtgtacacaagaaataaacgcaaacagagggaaaaaatggaaaaaatgaaaagaataatggctggcagctcggctaagtttctgaattcgggtgcgcagatttctgtttcatcaaattttcggcatttaaattatattgcctttggggagcaggcgcacaaaatgcctgaaagcagcagcagcagactcacaaaagtgccactgccaccattgttcgatggcatacgcggcgtatgagcaatcttgcctctttgccactttttccgcctgcgggggagcaactgcttttcaaactaaatgcgtgtgtgccgtcaagttctgtggacttattgggtagaaaatcaaagtttatacacagccagaaaagtgatggaattaagtccaaaaacaagtcatcttagaacttaggctgtttcaaacttggaaagtacattttcatagttagtaggacctgcacagttgtaaatggtttggttattttaaaaagtatttgaacattattgaatggcctttactttatgttaatttaactcattcaagttaaatcttatatcatatcctttgttgcttgccgcttttatttccaagaactgtttactactaaacttactaaaagcattgtaaagttgaacttctatggttctccttcaaagcctttgcttgtagtagactaagttttatgcacaataaacaagacttggtcagggttgatttggccctcattggcgctacttcaatagctcttcaatttgtgttttctttgtttgaactcacattgcacgagggcttgtagctgtgctcaatttaacgctagctaactccgacttgattattggcagcgaccataaaatggaaggcaccgagtctaccgacaaatgggaatcccctcctaccatgcattactcttaagtgctcccccgagatccaaaatccgatgacaagggacaatcgacgattgtttgcccgggtttgttttgcaactaactcgaactaagtgctgtcagtgctgaaagttaaaatgaatatggattttgcgagtatgccacaatatttgcactctaacgaaacgcagttcagttcagcttttcagagtatagaattcaaaagagggtgggattagtcgttttgaataataaacgcgaatggcctttatttattattgattgattttcccggcaaaccacttggaaatgcatcaaaagtttcgccgccacgaggagcgaaagaaacgccaagagaatcagcataaatacacaatttagtttgccgccggcaggcagattgctcaactttttacataataccattcccaacaggaccgagtggatccgaggaccaaaccgaagatgtcgggcttacgcaaaacatccattgcgctgatgaggcgctccacatccagcaccaccatactgccgcattccgggggcgttggtggtgccgtgtcgccgcccagcagcggagtgggcgtggccacggaaattgaaaaatcaattgcaatgcaacggctgcggacgggcgagtcgtcgaatccgaagaaattaaatgtcaggttcgtgattttcccacaccaaagacttggcttacatggaaataaaatgttgaataactttgccaagtttaactaaatatttttgaattaactttacaaatagaagacttgttctttgcatttctaaatctacttagattcagtttgaatctaagtaataaaacgcactactaacctaatgtaataatatggtgcttatatgtttttttcactgtatacaatttgcactaattgacagccaacagcccgttacatcagtagcaacaactaggactacagcaagctcactaccagcagaaaccacttcttcaccggcagctgcagtgcgtccttattcggaagtaccgggtccataccccttgccactgattggcaactcctggcgcttcgctccactaataggtgagtggccattattggcatccgttgtaactccgaccaggataactaatgaaccattgccatcgaccgacaggaacatacaaaatcagcgacttggacaaggtcatgaatgagctgcatgtcaactatgggaagatggccaaagtgggcggtctcattggtcatcccgatctgctgttcgtcttcgatggcgatgagattcgtaacatattcaagaaggaggaggcgatgccgcatcggtgagtgattaatcaacttttgccatcatccttcggtggtgcagtgcgaaattgcgtatacgacgtgtgtggcatgtcagtttggtatgattgattatctccagcttgttcgtaagtcgtgatctgaactcactttgggttatataattcgatagttagatgtgattgaaatgttaggctttgagactattattgttattgaataaccctaacatgattcgcaattcgttaaatatgctgtttatttaagattatgcctacccatgtcctgcatggctgcacctggtctgtgtagcgagaaataccccacataaatgccagggcccacgcacatggtatagcatatagcatatttatccacacgcaaagtcagtcatgcatgggtggtttggaacccctttgcctcgccttttaccctccacaatgcaaatgcaattcctgtttacttatgcgcataccgaatgaatgcagcctgtaattaaattattaactaacgaaggcacaaaatggcgattgcgcctgggaatgcgaattaagcgggatgtgtgaaaacatggcgacagattgaaatcagtggtaaaattcgaacatcagtgcaaaattgcttttaatctgactgacacatttgtgtgggaagtgaaaatgaaatcagcaatttatatgagattgaatgagtaaataaataactaccattgaaagtcataagcttatacttataattaaatatcttgaatggtgtttagtttgaggtgttttgacgctttaaatacaatatttttgggattgtaaataatccatcccgataaaacaaagccgtcaaattgaaattagttgcgactttcacttctcgtttggctttgcgatccgtaggcctagcaaccgagattcaaccgaaataaaaccaaacaatccgaactattcacaaactatccgacaagcgtttttgcatcatagaaataaataaaactgaccgaaatgatggagcaagcaaagaagtagacaaactgaaaaacaaacaaaacgaaagtcacacagatcgctaacgtgtccataacttttataagctttcttttcttcgcctttcattcctcctatcactcggatttatctgcgagcactatgcgctcgcatagtggccatgaaccaaatttaacaagttacgcttatatttcgcatacctcgagtatctaaccatatcatatcacatcgaaatgtgatttgcggacaaaagtgcggatcgatagtgaatcgcagacaaacccgcattgtttgcatttggcgaacgcgtttagcaagtcatcattaaaacgactg

SEQ ID NO: 27581 - DNA, 787 bp, DROSOPHILA
tcaaataaatcgtaaaaaaagcagttaaagtcctcaaatttgttttgttttactgcaaacccctgaaatgagtagttaaaatagtaaatacaatttgaaatggctgataaacaaaggaaacggcaattattctcatgaacgacaaattaaagtgacgaaagaccgagtggatccgaggaccaaaccgaagatgtcgggcttacgcaaaacatccattgcgctgatgaggcgctccacatccagcaccaccatactgccgcattccgggggcgttggtggtgccgtgtcgccgcccagcagcggagtgggcgtggccacggaaattgaaaaatcaattgcaatgcaacggctgcggacgggcgagtcgtcgaatccgaagaaattaaatgtcagccaacagcccgttacatcagtagcaacaactaggactacagcaagctcactaccagcagaaaccacttcttcaccggcagctgcagtgcgtccttattcggaagtaccgggtccataccccttgccactgattggcaactcctggcgcttcgctccactaataggaacatacaaaatcagcgacttggacaaggtcatgaatgagctgcatgtcaactatgggaagatggccaaagtgggcggtctcattggtcatcccgatctgctgttcgtcttcgatggcgatgagattcgtaacatattcaagaaggaggaggcgatgccgcatcgattatgcctacccatgtcctgcatggctgcacctggtctgtgtagcgagaaataccccacataa

SEQ ID NO: 27582 - protein, 198 aa, DROSOPHILA; identical to SEQ ID NO: 27579

SEQ ID NO: 27583 - DNA, 3827 bp, DROSOPHILA
atttatttttatttacttgctttccactacaacgaaatacattccatagatgattttattaagctttaatgaaacaaactaatgacgacaaactacaaacattcacaagaacagatctaactaaatccatgcagaaatgtgcggccagtaaaactgtgcaacaaaaaaaagaaaaacaattatttttagagctttgattaaaactttattacaaacatagaacctgaatgggaagacgaaaaatctcgaatgcttacgtataaaataatttctttaagaaactaaaattcttaaacaaaaaaaacattggttatataattgcggtgttgggctaatttagcgactctttatacaatgaagaataaacgaaacaatttctaaaattttaaaatcgaaacattatggcaagagtggaaaattccaaattttctaaaaaacaatattgttgaacaataggagaacataaacctttatgaatagagtataatttttaataaataaaacacttaataagacaacaaatactcattaaacaaacagatttagcataccattatatatataatatatatatttaatttttctatgaattgtttgtaaaacttttttgtaaattgatgaaaaaccccaaattcaatgtgaaaaatatacaaattccatgtaataaaacgcaaaagaaacgaaagttgtttgcaatagtgagttgataaatattttattgatgtctacgactataagttttattttctacacatacagatattatcattttatttactgcttgtaagtattgattttaattttttgttataatattacactatttttatttcatttttggaaacattttatttcgaaacacacaaattattgaaatatcaaaactggttaggcaatcatcgattataggtacacataaaaaaaatctaatttatagtttgaaacttgcatttaatatatgataactaatgaaagcaacccaattacctgacattttcagatgaagctggccagaacgaaggtggtgagtccaggattcgagtccgtaattggctaatgctggctgacaaatccatcattggaaaatcctcagacgagccctcaggtattttacacaactacactgactacagttttcttgttttatgcataatttgattgattttgtcatttacatattatggttttaaccttttttttgaactttccaataactttgttttctttttacagtcttacatattgttttgttgctgagcacacacagacacatcataagtttcttactcattatccaatcatttattgacaagatttactaactaaaaccattcccaatttctatttcatgactaaccaaacaaacaaaaaaaaaaaaataccgacaaacaactaaccttcagacaaactaactcagtccaaaaaatcactcataagcgatgctaaaaccactaacaaaacgtcgacgccgatccgaccaaaagtttcgacgacgaccacatccacgtccacggcggcggctgcagcagcagcagccacaattgcagccaagcaggcggcagctgctattgccagcagcaacatcaacaacaataacagcagtttgacgcaaacggtcactcaaactgtgactcgtatcgggagcattggacgcacaaccattgcctgcatcacgccggcgaacaatggtaacaagagctcgtcgagcaactgcaatgtggatgccgcatcggccgctgcactggcggctgccggcgtggagctggacagcatcgatgacaccatgaccgaggtgattgtaaagatcgagaatccagagagtatgccgctcaacgacgatgaagacgatgccgtttgtaatgaggctattgaggatgagaataccttcgactatgacctgaagctgggcagtccgttgtcgtggacctacgatgcggtgaagattgagaatgaggagttcgaggatagctatctgatggataacgacgatgatgatgatgatctgctgaccacagctgcggcgactcaaaagcatgccaagcaatcgaatgagaagcaaatggccggctctatggtggctggagctggtagtggaggtgccgtcaagaagatcgtgcttagtgcccagcagcaacagcaattgctcgaacagcagcagcatctgcagcacttgcagctacagcccaccagtcagtcgctgcagattaagttgcccgccataccagccaccattacgacgatttcggcacccaagcagatgatgtcaggtgcgggaaccagtggctccctaaccccgaacaacaattgcacgctgatgagcaacaagctgggactgcccgtgaagggacagaatctcgatctgcactggtcgcactcggacgacaatcgttatcgcgtcctggtccagaataagcgcacacgcaaggagtcgctggagcactccgccgatatgatctacaatgcggatattgagaagccgtgggtgtgccgcaactgcaatcgcacttacaagtggaagaacagtcttaagtgtcatttgaagaacgagtgcggcttgccaccacgctacttctgcagcaagatgtgcggctatgccaccaatgtccacagcaatctgaagcgtcacctgaacaccaagtgtcgtgatcgcgagaaggatgccgacgacgagaagaaacccggatcggccagtggcaacatgccggtggttgtgggcgttggcaatgggaccgccgttccggtcagcagcagtaataacaacaacaacggcggcggcagcagcaccagtagcacctacaccttggtgttccagaacgatagcgcttaggagagacttggacttgtacaaaacgcaggcagcggctaagatggaaacggctttggaaacgaacattctgctagtgcaaatcttggtaaatccatcgagttgagttttatgggccattcggaactgtggacccttcacaaattcgttattttcgttgaacgaagccggtgatgccgtggaaactagacgtagtttgcaatacattgaacaaaaagacatgcaaaacaaattatattgtattgctttagcaaattctcacaacaaatttaaacctaatctttataaatatgtgtaaatttttttcccagaaaaaaagaaagaaaaaaaaaaaaacgaaaccaaaccaaacagaaaatatataaaactagtcatcagctaaatttgttttaggtgtgctacaaacactacaagaaacaaaaataataaaaaaaagatgggaaaattttgtaataatattataatttaaataaaaaaaacctttaaactatatgcatggcatgaagataaagcaaatgcccctccacagatacttaaagataacaaaaataatgataaactttttgatttcgtattatgtttgcattcgcaataatttttataatttgttagaaacatttttctggtcactaagttatgcttatataataataattattaactaaaaatgattatctagtcaaaacgaaacgataatgagatataatattttcaattttagacaaaaattaaaccttattgataaagacaatgtttataaacattaattcgaaatatcatcagcgcatgtatgctttgaaaattgttagatttagtgaaaaaaaaaaaaacacgaaccacgacgaacggcactgaaacgcagaagttgtaccatcaaattaccttaccttaccaaattgtaatgtaaacgaaaaaaaaatgacaaatacctctatgaagttgcaagagagaataccattatattgattgagtacgattaccactatgtatttccaataaactg

SEQ ID NO: 27584 - DNA, 1434 bp, DROSOPHILA
atgaagctggccagaacgaaggtgtccaaaaaatcactcataagcgatgctaaaaccactaacaaaacgtcgacgccgatccgaccaaaagtttcgacgacgaccacatccacgtccacggcggcggctgcagcagcagcagccacaattgcagccaagcaggcggcagctgctattgccagcagcaacatcaacaacaataacagcagtttgacgcaaacggtcactcaaactgtgactcgtatcgggagcattggacgcacaaccattgcctgcatcacgccggcgaacaatggtaacaagagctcgtcgagcaactgcaatgtggatgccgcatcggccgctgcactggcggctgccggcgtggagctggacagcatcgatgacaccatgaccgaggtgattgtaaagatcgagaatccagagagtatgccgctcaacgacgatgaagacgatgccgtttgtaatgaggctattgaggatgagaataccttcgactatgacctgaagctgggcagtccgttgtcgtggacctacgatgcggtgaagattgagaatgaggagttcgaggatagctatctgatggataacgacgatgatgatgatgatctgctgaccacagctgcggcgactcaaaagcatgccaagcaatcgaatgagaagcaaatggccggctctatggtggctggagctggtagtggaggtgccgtcaagaagatcgtgcttagtgcccagcagcaacagcaattgctcgaacagcagcagcatctgcagcacttgcagctacagcccaccagtcagtcgctgcagattaagttgcccgccataccagccaccattacgacgatttcggcacccaagcagatgatgtcaggtgcgggaaccagtggctccctaaccccgaacaacaattgcacgctgatgagcaacaagctgggactgcccgtgaagggacagaatctcgatctgcactggtcgcactcggacgacaatcgttatcgcgtcctggtccagaataagcgcacacgcaaggagtcgctggagcactccgccgatatgatctacaatgcggatattgagaagccgtgggtgtgccgcaactgcaatcgcacttacaagtggaagaacagtcttaagtgtcatttgaagaacgagtgcggcttgccaccacgctacttctgcagcaagatgtgcggctatgccaccaatgtccacagcaatctgaagcgtcacctgaacaccaagtgtcgtgatcgcgagaaggatgccgacgacgagaagaaacccggatcggccagtggcaacatgccggtggttgtgggcgttggcaatgggaccgccgttccggtcagcagcagtaataacaacaacaacggcggcggcagcagcaccagtagcacctacaccttggtgttccagaacgatagcgcttag

SEQ ID NO: 27585 - protein, 477 aa, DROSOPHILA
MKLARTKVSKKSLISDAKTTNKTSTPIRPKVSTTTTSTSTAAAAAAAATIAAKQAAAAIASSNINNNNSSLTQTVTQTVTRIGSIGRTTIACITPANNGNKSSSSNCNVDAASAAALAAAGVELDSIDDTMTEVIVKIENPESMPLNDDEDDAVCNEAIEDENTFDYDLKLGSPLSWTYDAVKIENEEFEDSYLMDNDDDDDDLLTTAAATQKHAKQSNEKQMAGSMVAGAGSGGAVKKIVLSAQQQQQLLEQQQHLQHLQLQPTSQSLQIKLPAIPATITTISAPKQMMSGAGTSGSLTPNNNCTLMSNKLGLPVKGQNLDLHWSHSDDNRYRVLVQNKRTRKESLEHSADMIYNADIEKPWVCRNCNRTYKWKNSLKCHLKNECGLPPRYFCSKMCGYATNVHSNLKRHLNTKCRDREKDADDEKKPGSASGNMPVVVGVGNGTAVPVSSSNNNNNGGGSSTSSTYTLVFQNDSA

SEQ ID NO: 27586 - DNA, 4157 bp, DROSOPHILA
tttcccagaaaaaaagaaagaaaaaaaaaaaaacgaaaccaaaccaaacagaaaatatataaaactagtcatcagctaaatttgttttaggtgtgctacaaacactacaagaaacaaaaataataaaaaaaagatgggaaaattttgtaataatattataatttaaataaaaaaaacctttaaactatatgcatggcatgaagataaagcaaatgcccctccacagatacttaaagataacaaaaataatgataaactttttgatttcgtattatgtttgcattcgcaataatttttataatttgttagaaacatttttctggtcactaagttatgcttatataataataattattaactaaaaatgattatctagtcaaaacgaaacgataatgagatataatattttcaattttagacaaaaattaaaccttattgataaagacaatgtttataaacattaattcgaaatatcatcagcgcatgtatgctttgaaaattgttagatttagtgaaaaaaaaaaaaacacgaaccacgacgaacggcactgaaacgcagaagttgtaccatcaaattaccttaccttaccaaattgtaatgtaaacgaaaaaaaaatgacaaatacctctatgaagttgcaagagagaataccattatattgattgagtacgattaccactatgtatttccaataaactgacgaatcgtaattattgccggctaaatgtatttaaaaccaaaacacacccgaaagaaaattcgaaatacaattaaaagcaaatgtcaaaaacaaaataccgaaacgccctgttgtacttattttaatatagaacccttcttcattccccatcatccaggttaaactcgatcgccacatccccatattctccaccacttcccttcccattcgaaaaatcagtttttaggcaatgcattcacttactcagaatatatactaatcagatctatatttcaggtggatggattgatgtgatgtttatgatgatgatgaagatggagatgatgatgttggtcttgactgatgacaaccagccaaagaacgcgattcatggtgttgcctcttccctctcttattgttgtttgcatgcttaactactacaaccaatataaatactatttatacaatatagatatgcataattatgtattcctctacttagactttatatacatatatgtatttgttagacaaagtaattataatttacataacaatgtatgagatctattagatttgtagtttgatcttttttttttagtattaattactccattcgtttgtattgtcgaaggtttaatgttaagtttcttttatctatctagctatctatatatctatctgtctatctatctatctatctgccttcttcctagcgattgtgaagtgtgtaaaacaaattacaatgcatacatagcattacatttatttacaaattaaaatatgaaaatgaaaaaagaaaaacttagtttgtatagatatttttttccaaatacttctatcgagatcttttaattttacctgacttttgtattatgatttcctttacatttaaatattgcatgcgtatttataaagcgataaagcgagacgaaaaaactttggactctggaaaccgggattagatttccaagtcctgcgagttatacgtcctgccctccactagtactattaagtgtttttgtcactaaccacccaacatacatttcttaaataattatcaattatcggagaaattctttgattttgaagccatttatctatcacttgtaatttgaataagaagttgatgtttattttttgcttagctccgttaaaatgttttactcaacattttcgatgtactcattgtgttttaattttatatttaataaatatttaattttgcagcgtacttatacaagctctctcacacacacacacacacagatacactgacatctacacatcacacacaaacacactccaatccagttcactccactccatatagcaccatgtctcactaaagcaacacacatttaactcaaaacccagtaaacaaatgactctaaaaaaaaaactacggtaaaactccatatatattatttattttcagttagttataggtctgattatgatttctattcaacagaaaatttataaaaatcttttcaaattgctcgaaaattcaaccaactaaaattatatttcttttattttttatattttaaccattattcccagacttcggccgtttgtcgcccaaccgtcgcaactacaacttgctggggggcatcaaatccagtccatacaacagtcccattggaacgccggtgatcaaattcgaaccgggcagcggccaggaggatcacaatgaacacaaaagtggccgagttacgcccaccgcccactgcccgggtaacctgctggtgcccaagacccagccgcgccatggtaatggcgataacgacgacagcaacgacgaggatagcatggagccctgcgatctgcgcattgacctggccaaagcatttctggctgccgcccaaagcggtgctgccaccactctgccccttggccaccatcatcaccatggccatcatcctcatggccgaaccctgccgaacctaatttatccggctgtgccggtcaaggtgccccgtcccgatacaccgacgcgtcgctacagtagcagcagtggtcctgtccaggacgcggcgagcagtgtggctgtgcaatttgtggccgctgcagctgccgctggcttggcggccaacaacacaagtgcctcaactaacacaggtggaggagcttccacctcggcggcagctgcagcagcggcagcggcggcagcagcagcagcggcagcagctgctggtggatcagtggcagggaattggagcagtggcggaggcagcggtggtgcaggaggaggaatcggtggaggtggaagcggtggcggtggcggaggaggtggaggtggagcctacgcctgcgatagatgcggaaacacctacgcccggccgcacagtctcaatcgacatgtgcgtttcgagtgcggcgtggagccgaaattcgagtgccccatttgtcacaagaagtcgaagcacaaacacaatctcgtgctgcatatgcgcacccaccaacatcgatgatacaacaaatgctgcaacggcctccgatgacgccaggctctcaagctagtgactgccgggccggatccgggatcggtatcggtatatcggggatctagagaataggattgtaccataggtttcgggtccttagtgccgggtttgcttcagtctgagtccaaagtcctaatcacacagagttcagtccagtccagagcgcggttttgtgtaattttccaaatgatcttgaaacatatagtcgtctttacacatatatatatatatatattcagctataaataatatatatatatatacaactacacactaactcgtaactatgtatataaagaggaacattaacaaattctaattcttagataattttaaagttttttttttttgttcacatttaatccatcttgatagttttttgtccgtaacagttttttgaagttctaattactttgggttcgaatcggcaggaattgaagcaggcgatgtatttcgaggggcgcgcgagagtccaggcgccgctgtatgttgcatgatgtgtataaatccttaggaaaactcaatgatctcaatgaactttttcttgattttggtgaaaatacggaaaatgaggggaaattatgcattttattgtagcagcaacaagggcaacagcaaacgcaaccgctaaaaaaaaaaaagaaaacattcacattaattatagtataatttcaagtgcaggacactctcgcgcgtctttcacgatgataaggatatgaaaaatatccttagggagacacggaaaacacagtcagagacagagtcaacatgtagagcttaagtttagaaccccagagaaggcgtttcccaaactgaatcgactagatcatgtgcaatacgaaacgggcaccaaaaaaaaaagaaaaaaaaacaacaaataataagaagtgaaaaaaaaaaaaaaaacagaagaaaaaactgatatatggaaggcagtcgtcgttctttaccttttcacattttttgt

SEQ ID NO: 27587 - DNA, 984 bp, DROSOPHILA
atgatgatgatgaagatggagatgatgatgttggtcttgactgatgacaaccagccaaagaacgcgattcatgacttcggccgtttgtcgcccaaccgtcgcaactacaacttgctggggggcatcaaatccagtccatacaacagtcccattggaacgccggtgatcaaattcgaaccgggcagcggccaggaggatcacaatgaacacaaaagtggccgagttacgcccaccgcccactgcccgggtaacctgctggtgcccaagacccagccgcgccatggtaatggcgataacgacgacagcaacgacgaggatagcatggagccctgcgatctgcgcattgacctggccaaagcatttctggctgccgcccaaagcggtgctgccaccactctgccccttggccaccatcatcaccatggccatcatcctcatggccgaaccctgccgaacctaatttatccggctgtgccggtcaaggtgccccgtcccgatacaccgacgcgtcgctacagtagcagcagtggtcctgtccaggacgcggcgagcagtgtggctgtgcaatttgtggccgctgcagctgccgctggcttggcggccaacaacacaagtgcctcaactaacacaggtggaggagcttccacctcggcggcagctgcagcagcggcagcggcggcagcagcagcagcggcagcagctgctggtggatcagtggcagggaattggagcagtggcggaggcagcggtggtgcaggaggaggaatcggtggaggtggaagcggtggcggtggcggaggaggtggaggtggagcctacgcctgcgatagatgcggaaacacctacgcccggccgcacagtctcaatcgacatgtgcgtttcgagtgcggcgtggagccgaaattcgagtgccccatttgtcacaagaagtcgaagcacaaacacaatctcgtgctgcatatgcgcacccaccaacatcgatga

SEQ ID NO: 27588 - protein, 327 aa, DROSOPHILA
MMMMKMEMMMLVLTDDNQPKNAIHDFGRLSPNRRNYNLLGGIKSSPYNSPIGTPVIKFEPGSGQEDHNEHKSGRVTPTAHCPGNLLVPKTQPRHGNGDNDDSNDEDSMEPCDLRIDLAKAFLAAAQSGAATTLPLGHHHHHGHHPHGRTLPNLIYPAVPVKVPRPDTPTRRYSSSSGPVQDAASSVAVQFVAAAAAAGLAANNTSASTNTGGGASTSAAAAAAAAAAAAAAAAAAGGSVAGNWSSGGGSGGAGGGIGGGGSGGGGGGGGGGAYACDRCGNTYARPHSLNRHVRFECGVEPKFECPICHKKSKHKHNLVLHMRTHQHR

SEQ ID NO: 27589 - DNA, 3019 bp, DROSOPHILA
agcacacgcatacacaataaatcaagtaaaccgtagctttaagttaacaaaaaaaaggaagttagaaatgattgttgattgctgtttacgcacgcttaacgaatagtaaatgttgaatggaatggaagcaaaacgccgaaaaaatgtgtaaaaatgcaactaaaaaaacaaattgcaaaccgattgaagttggaacatcatttgttatatagctaagattgcgccaacataaaaatttacaaaaatttatacaatacgacaatgaatcacattgctttttgcactgcaatttagattaacaaattgaaaatagtaatcaatatatatttatggaaacgaaaacgacattcaaaatgccagttagactatgaaaagtgtgcttaaaccaatttaaatggaacgaagaaatgttagaacgaattcagagtaaatttaattatgtaattgtgtataaagccgagaaaacgccttaacaaaatttgtaaaactattttaaatgtttaacgagtaaaacgatttatttgtataagtaaacaggcaaaaacaaaacaagaaataaaaactaaatttaaaaatatattaaaaaatagaaaatattcaaaacaacctttaaatgctgtttgaaaattctcatcttttcagcgcaacaacgaaagaatccagtaaatcacttgtataattagtaactcgaactaatagtaccttttctctttttctaggttcgttggaacaactgaagggcggaaaattcagaaggaacccgaggaaaacttgaatggccccgatctgctaatcaatgttattatactgaaagtgaactgagcttagttatactgacaaaaccaaatatatgatatgaacatatgtaatttaatttgctgtattgttgtagttttgaaaatcacaccaacaacaacaaaacaccaacacgacatttgatttgtgatctttgtaatcttattgtttttgtacatatatttcgaagcttttgtttagagaaatgcttgagagtggcttttgtatatgtggtgcattcgtgtaactctgctggggattgtgtcatccatccattaccgcatcttcatcaaataaacatcatcaaccgcctcccaaaagctgctaaaacttcatcaacaagaaccaaacgaaactcaacaacaactagactcataattcaacaacattcatcgttcagcgtctcttgggtagaagccaacaaaaaacactaagttttaaatattatttgattaatttaactaatttaagttgatgtgtgctcagctatcggcccactattaattttttggtttgttctcattttattttgtttcgacacctccatgctgtgtttatacccgtgtgtgttgaccagcagacatctatccgatccttggcagtcttctgggcgtggacacctcaacgagtgccaatccgggctcatcggccaatgccagcgatgagttctacggctatcatctcaacaacaataacaccaccaccagtagcagcaccaccatctcccatgcaaagaacacctcgaacagtggtgcgttttctagtggcggaggaggaggcggaggattatcccgggactccttcatgcagtgcaaacactgcaaccgctactacaagtcccatcagaaactgcaggagcatgtgcgcaagtactgcctcaagcagaagaagtacaagtgcgtgtcgtgcgaatatcgatcccgacgcaaggatcatgtcctgcggcacgcaaaacgcaagcattgcatgctctacgagcagtccagggatgacgaggagagcctctatgtgatacgcaacgaggacgatatgagcaacgacgaggaggccgtcgatggtgacgatggcgatccggaggatggagatcccggcggcatggacgatgtcgctgccgctctttgtgagatcaatttcgatttcgccggcagggatctgaccatcactgcggtgccggcgttgcaggagagcgaggaggatgacgaggactacgacgacgatggctaggaagcggagtttcgataacccgagagcagccgctcgagaggcgtaatgtgaaatgtttaccaaatgaataatgacaatagttgcttgtccaagtagtagctacctccaaaacctccaaaaccataaccaacccaaatgaacccaattgttgtggaaaagctggtccacattcctgcacaaattacttaatgaacttttaactttttataccgttttctctgagcgcattccgttttttttaaacttttcgtttcatttgaactgtctttaagttagccgcaaaacggtcaaagaccattttatttatacatacatacgatacgtactatatacagatactatatggaaaacttaaatgtttagttctactgtggttggtgttctcaaaactcaaatattcttgccagcaattagggctttcgcatgcaaagcagtcaaagacttaaagcgccattagtttgccacgtttaatcaaaacaaacacacacacgcacatatatatattcctcagttatacatttaaaaattcgatatatctaccacataaacgactgtaataatagttcttggtgtcctatgaagcatagcaaacgtaaagcaagaatttgtaaatgttctaaataatacattgtaaatgcaagcaattaagaataaagcatacgaatcatatatgcgtgaaagcaaaacccaaacaagcccaagtttataatccctcaatcaaatccacactctccaccaaaatcaaaatcatatccaagtaaccaattggacggccttgcagcttacacacacttgttaatgcttacaagtaattatagaaccgaacctagagttactcatccggcggatgactaaccagtgtctttttctctttccctcgcttcttgcagatggctactggactattctggagacggtgccctattcgattgcgagtgctgcacccaaccagactctcaccacggccaccacattgagcaatggtgggtcaagtctgttg

SEQ ID NO: 27590 - DNA, 657 bp, DROSOPHILA
atgcttgagacagacatctatccgatccttggcagtcttctgggcgtggacacctcaacgagtgccaatccgggctcatcggccaatgccagcgatgagttctacggctatcatctcaacaacaataacaccaccaccagtagcagcaccaccatctcccatgcaaagaacacctcgaacagtggtgcgttttctagtggcggaggaggaggcggaggattatcccgggactccttcatgcagtgcaaacactgcaaccgctactacaagtcccatcagaaactgcaggagcatgtgcgcaagtactgcctcaagcagaagaagtacaagtgcgtgtcgtgcgaatatcgatcccgacgcaaggatcatgtcctgcggcacgcaaaacgcaagcattgcatgctctacgagcagtccagggatgacgaggagagcctctatgtgatacgcaacgaggacgatatgagcaacgacgaggaggccgtcgatggtgacgatggcgatccggaggatggagatcccggcggcatggacgatgtcgctgccgctctttgtgagatcaatttcgatttcgccggcagggatctgaccatcactgcggtgccggcgttgcaggagagcgaggaggatgacgaggactacgacgacgatggctag

SEQ ID NO: 27591 - protein, 218 aa, DROSOPHILA
MLETDIYPILGSLLGVDTSTSANPGSSANASDEFYGYHLNNNNTTTSSSTTISHAKNTSNSGAFSSGGGGGGGLSRDSFMQCKHCNRYYKSHQKLQEHVRKYCLKQKKYKCVSCEYRSRRKDHVLRHAKRKHCMLYEQSRDDEESLYVIRNEDDMSNDEEAVDGDDGDPEDGDPGGMDDVAAALCEINFDFAGRDLTITAVPALQESEEDDEDYDDDG

SEQ ID NO: 27592 - DNA, 5504 bp, DROSOPHILA
cttcatgcagtgcaaacactgcaaccgctactacaagtcccatcagaaactgcaggagcatgtgcgcaagtactgcctcaagcagaagaagtacaagtgcgtgtcgtgcgaatatcgatcccgacgcaaggatcatgtcctgcggcacgcaaaacgcaagcattgcatgctctacgagcagtccagggatgacgaggagagcctctatgtgatacgcaacgaggacgatatgagcaacgacgaggaggccgtcgatggtgacgatggcgatccggaggatggagatcccggcggcatggacgatgtcgctgccgctctttgtgagatcaatttcgatttcgccggcagggatctgaccatcactgcggtgccggcgttgcaggagagcgaggaggatgacgaggactacgacgacgatggctaggaagcggagtttcgataacccgagagcagccgctcgagaggcgtaatgtgaaatgtttaccaaatgaataatgacaatagttgcttgtccaagtagtagctacctccaaaacctccaaaaccataaccaacccaaatgaacccaattgttgtggaaaagctggtccacattcctgcacaaattacttaatgaacttttaactttttataccgttttctctgagcgcattccgttttttttaaacttttcgtttcatttgaactgtctttaagttagccgcaaaacggtcaaagaccattttatttatacatacatacgatacgtactatatacagatactatatggaaaacttaaatgtttagttctactgtggttggtgttctcaaaactcaaatattcttgccagcaattagggctttcgcatgcaaagcagtcaaagacttaaagcgccattagtttgccacgtttaatcaaaacaaacacacacacgcacatatatatattcctcagttatacatttaaaaattcgatatatctaccacataaacgactgtaataatagttcttggtgtcctatgaagcatagcaaacgtaaagcaagaatttgtaaatgttctaaataatacattgtaaatgcaagcaattaagaataaagcatacgaatcatatatgcgtgaaagcaaaacccaaacaagcccaagtttataatccctcaatcaaatccacactctccaccaaaatcaaaatcatatccaagtaaccaattggacggccttgcagcttacacacacttgttaatgcttacaagtaattatagaaccgaacctagagttactcatccggcggatgactaaccagtgtctttttctctttccctcgcttcttgcagatggctactggactattctggagacggtgccctattcgattgcgagtgctgcacccaaccagactctcaccacggccaccacattgagcaatggtgggtcaagtctgttgacgggagccactgtggtagttgagctgcctcccgacgatctgggtaatccggtgggcaatatacagtacaccataccggcactgaccaaaaatgccacaacaaacaccaacacgaccagtttgctgcacaagccacaagctaccaccatacagatcgtaaagcagcagcatcagcagcagcatcagcaacaacatcagcatccgcagcagcaacatcagccgcagcagcagcaacatcgacagcacttgaccatccagcaatcgcagacgcatgcacggcaggagtacatcaaaatagacacctctaggctggaggacaagatgctcctgcgcgacgtgatgcagtacggagcgaccagcattgccatggcaccgcagagtgccaccaccacggtggtctccacccatccggtggagtccggcttgctgctggccgatgccgatgaggctgagcgcgagctcgaactggaggccatgaaggttgaccagcacgatgaggagcatctgctcgacgacgagggctatgtgattgaaaaaattcacggtgatggggagacggttaatcagccgcaagaaaagctgtacataaacggaatgtccaatatcatacatacagccaccaccatgacgttgcaaccggatgactgcaaatacgcgtgcaatgtgtgcggcaagacctacaaaatcaagggatccctcaagcgccacaagaactacgaatgtggcgtggagccgaatctcaagtgtccccactgtccgcacaagtgcaagtacagatcggacttgcgcaagcatatgaatcagaaacatgccgattccggggaggcaatacttgcaacctagatcgattagtactaagatgttttagcattcgtagtctctgtttagcacttgttgttgtgagttaccatattgtgtgatgaattcttactctaaacctatgaatttacaccgttgccagataattttggagatttacaaaattgtttcgatgtaaatgcatttctttttcggaaatttcagttcctttaaatcagtttaagtactagcaaatatatccccactgttcctttgtatatagggctttagaaccggcttaaacacacttctattcacgtttttaattctccaaagatgtgtcttggcccaagtagtcagtaaactgtttgtactatagccaaagttatgatctcgaaatgtaatctataacacattaagtaagctagttggactgagtatcgaaacgcgccgtcaaggcaaagttgctcaaattgtagaatcaaatttcgcatcagctcaagccaagcgtaagtttaagtattttaaaactcgaacacactataccctagatgacgttttaaaaacattacccaaccaatgcgtatttaccctatatgtgaaagtacgaataaataaatgtttacaatcaaatcgaagactcggtcattgaatcaatagcgatgtaatgtaccacatttaaacccaacactaataggattctcttttttctctaggacaaacccgtggattgagatcatgaggctggaggcaattggatggctggcgctcaaccgaaaaaggtctatacttttaaattgactcgtatagcattaagtagtccaatcatttatcagcaaataaaaatgtcaaactaaaaccaatttgttgtattcatcaccacgatcaccaccaaaactagcctgtattcaaaacccctttaaactgtgtgactagtgtagctgtacggaaaggcctaagcaatcgcattcccatctctgtttttcctatctgtctccagattttgtgcgtcatggcccgaagaaccagctcctgtgccaatgtggccgctactacaacaccctgagccgactgatgctgcaccagcgcgaggagtgccaggatttcaagaggttccagtgcgacttctgtctcaagtggttcaagcgacgatcccatctgaatcgccacaagaaactccacgatgccgaactctttctggagccgctgtccaagcaaaagccaaagacgacgagcggacaaaatttgtcgcatgatgcaaatacggatgatgaggtggccacgacgaatccagcggccaccgaagatgaatccaactatccatttacgtctgaaatcaaaatcgagaacgaatttgatgaattcatttaagttttgttacaaaaattattataaatattactagaccagttctcgttgatgccaaaacataaaatatacggattttgtaaataaatagtggaaaacaagcgaatgtcttgtcctgtcgaaagtgaatctttttatattagttcttgaagttttaagttggctttttttagcttttagttttattgtaaatacatatatgtctgaatgggactgatttgtttgagtgtacatcgcgctgtaattaattttatgtttcatttcattcagcttttagataatttcgtttgttaagtcttatgatttgttattttattttgatttcctgggacttgttctctcgtttcagtgattaccgtggataggaagtacaatctgcgcacccaggaaagttccggttcttcggcagatctgccaagtacttccaagcagaaagtagctgcagtccagcacaaattggctgaattggccagtttggaccagaagagcgagaatgaggaacccacggacttggacaatgcggcgagtctcaagaaagccatggccacctcggatgccatgatagccctgcagcaactggcctccatttccacagctagatcgctgcagcatctcgtccagaacatgagcaatatagacaacagtgccctggttcctggacggaagcttccgcggaacgcagcgaagagatcacccaaatatgagtccaaccgatgtccactctgctcccgtgtctgtcgatcccaggcctttcttaacgaacatatgcgcaaggagcactctgtgctcatttagacacactttcattttaacttcgtttggattggaaaattggaaaatccaactcatgtcagtctattctataccattctataactatttggttagtgtatataagaagtgactttattgatggctatttaaatgcatacaatttaacttgaaaacactaagtcaaatgtgtccacttattggatattaaagttacttcattttattcaagtccaatttaattccaaataattgattttatcagaactgacagttatgtattcacaaatgatacatacttttattcccatatggatactaactttattgaaagagaaattcagccaaatttaaatgaccaaaaagcgtaaaatataattctaaaatatgtataaaataagccataaacttgcccaatttttaagaggtaaagtcaagtgcataagtatactcttctttttaaacagaagttgcgctggtaaaatattatgcagtgtcataaggtagacattaggtagcggttattatccatacagtaaacgaggtccaatttaaaagtttttatacttatttctaataaaaaagaaagtttgatattaaaacaaggtatacaatacacatggtttttattgtgtcattgtttagatagcttaatgttttatttatgcatctattttttatataatttcgtttaagttttctgaggacttttattgcttggccgtttttactagaaaaggttagtatgtgctgtactcaacaacgctttatttttaatttatttttatttttatttttctttttcagtttcatttctcttttatctcataattggcaaatgtgttttagacaaaaggaagcaaagccaggcaagtacctgattatatttcagagccattcagtcttcggaattctttgtaattttcttgtaaaaactgcactgggattcggacatccagacaagttgatatgaatcggcaaatacccgaaaggaataatcctttaaccaaacaggtttttggtaacaatagttgggtggttggtgcccttgaatctgcactgccgtgccaaaaggaaaatccctttcctcgagagtcggccaaccacacactaactgtactctcgggtcttttgtcctcgaaa

SEQ ID NO: 27593 - DNA, 1715 bp, DROSOPHILA
atgaagcatagcaaacatggctactggactattctggagacggtgccctattcgattgcgagtgctgcacccaaccagactctcaccacggccaccacattgagcaatggtgggtcaagtctgttgacgggagccactgtggtagttgagctgcctcccgacgatctgggtaatccggtgggcaatatacagtacaccataccggcactgaccaaaaatgccacaacaaacaccaacacgaccagtttgctgcacaagccacaagctaccaccatacagatcgtaaagcagcagcatcagcagcagcatcagcaacaacatcagcatccgcagcagcaacatcagccgcagcagcagcaacatcgacagcacttgaccatccagcaatcgcagacgcatgcacggcaggagtacatcaaaatagacacctctaggctggaggacaagatgctcctgcgcgacgtgatgcagtacggagcgaccagcattgccatggcaccgcagagtgccaccaccacggtggtctccacccatccggtggagtccggcttgctgctggccgatgccgatgaggctgagcgcgagctcgaactggaggccatgaaggttgaccagcacgatgaggagcatctgctcgacgacgagggctatgtgattgaaaaaattcacggtgatggggagacggttaatcagccgcaagaaaagctgtacataaacggaatgtccaatatcatacatacagccaccaccatgacgttgcaaccggatgactgcaaatacgcgtgcaatgtgtgcggcaagacctacaaaatcaagggatccctcaagcgccacaagaactacgaatgtggcgtggagccgaatctcaagtgtccccactgtccgcacaagtgcaaatgtgtcttggcccaagtagtcaattttgtgcgtcatggcccgaagaaccagctcctgtgccaatgtggccgctactacaacaccctgagccgactgatgctgcaccagcgcgaggagtgccaggatttcaagaggttccagtgcgacttctgtctcaagtggttcaagcgacgatcccatctgaatcgccacaagaaactccacgatgccgaactctttctggagccgctgtccaagcaaaagccaaagacgacgagcggacaaaatttgaagtacaatctgcgcacccaggaaagttccggttcttcggcagatctgccaagtacttccaagcagaaagtagctgcagtccagcacaaattggctgaattggccagtttggaccagaagagcgagaatgaggaacccacggacttggacaatgcggcgagtctcaagaaagccatggccacctcggatgccatgatagccctgcagcaactggcctccatttccacagctagatcgctgcagcatctcgtccagaacatgagcaatatagacaacagtgccctggttcctggacggaagcttccgcggaacgcagcgaagagatcacccaaatatgagtccaaccgatgtccactctgctcccgtgtctgtcgatcccaggcctttcttaacgaacatatgcgcaaggagcactctgtgctcatttagacacactttcattttaacttcgtttggattggaaaattggaaaatccaactcatgtcagtctattctataccattctataactatttggttagtgtatataagaagtgactttattgat

SEQ ID NO: 27594 - protein, 531 aa, DROSOPHILA
MKHSKHGYWTILETVPYSIASAAPNQTLTTATTLSNGGSSLLTGATVVVELPPDDLGNPVGNIQYTIPALTKNATTNTNTTSLLHKPQATTIQIVKQQHQQQHQQQHQHPQQQHQPQQQQHRQHLTIQQSQTHARQEYIKIDTSRLEDKMLLRDVMQYGATSIAMAPQSATTTVVSTHPVESGLLLADADEAERELELEAMKVDQHDEEHLLDDEGYVIEKIHGDGETVNQPQEKLYINGMSNIIHTATTMTLQPDDCKYACNVCGKTYKIKGSLKRHKNYECGVEPNLKCPHCPHKCKCVLAQVVNFVRHGPKNQLLCQCGRYYNTLSRLMLHQREECQDFKRFQCDFCLKWFKRRSHLNRHKKLHDAELFLEPLSKQKPKTTSGQNLKYNLRTQESSGSSADLPSTSKQKVAAVQHKLAELASLDQKSENEEPTDLDNAASLKKAMATSDAMIALQQLASISTARSLQHLVQNMSNIDNSALVPGRKLPRNAAKRSPKYESNRCPLCSRVCRSQAFLNEHMRKEHSVLI

SEQ ID NO: 27595 - DNA, 6692 bp, DROSOPHILA; identical to SEQ ID NO: 19654

SEQ ID NO: 27596 - DNA, 2312 bp, DROSOPHILA
cccactaaagtcgttatggtcatattgtgctgtgacgtttagtcgtatgttcgtggacttcggagaaaatcttttcttaaacggttaattcagtaaaattattaatttactttcattgtgatcagaaacgctttatagaaaacttgtggaaaagaatagttgagagaccaaaaatttcaatttttgcgatacataagcgcgttaaaagcgttactaatatttttcaatattagcacggaatcagagctatcaaaaaaaaaaaaagttatcgatttcccgtggcagtgcgatttgtttgattttgatttatccatatatattttccaagtcaatttgcgattgacttcacaaagaatacccgagagtacgatatctttgtctaatttgcgaactggcattgcgcaccccaaaggaggggaaacaaaatcttatatgacttttgaaagataccggtgaaacaccagcaaaaaaaaccacacttctcattgagaaaaaacggagtaaagggttcgagctgtgcatgaattcaaaagggcgaaccaaaaatcaccggacttcgagtaacagacatcggaagttacagccattcaggtacacatgagcctgctccttctccattttttaaagacttaaactgagcacaattaattcgccgttccggaaggacaccaattcctgcttattctggatacatttgttaagtaagcagcagcggcaactactcaaaataaaagaacatttaatgaacggaaacgaaagttggatcaatcacaaactagcagaaaacctgaagccaattacttcccatccaccaataaccaatagataccactggccacctctaacagtagcaacattacccgaacaacagtaatacccattatcagcattatctgtggagccgaaaacctatcaagatggccaccgtaaacgtaaaccgcagtgtgacggacatcttctatcgctacaagatgccacgtctgcaggcaaaggtcgagggcaaaggaaacggcattaagaccgtgctggtcaacatggcggaagtggctagggccatcggacgcccggccacctatccaaccaagtactttggttgcgagctgggcgcccagacgctgttcgatcacaagaatgagcgctttgttgtgaatggatcgcatgatgtgaacaagttgcaggatttgttggatggttttattcgcaagtttgtgttatgccccgagtgcgacaatccggagaccaatttaactgtgtcggccaaaaaccagaccatttcgcagtcttgcaaggcatgcggcttccatggtctgctcaaggttaaccataaagtgaacacattcattgtgaagaaccccccgtcattgaatccggccgcccaaggatcatcgctaaccgagggcaaacgctcgaggaaacagaagcagaagaacgataacgccgatggctccatgaccaataactctttggccaacaactctggcggtgaatcagatggcggcaacggcacaaatcaggctagccaaactgaggccgagattagcgcagctattccggagaaaacagccaaggatgacgacgatgagggatggagtgtcgatgtttcgaaggaggctattcgtgctcgtttgcaagatctgactgatggtgctaagggtatgactatttcggatgactatgataaaactgaaaaggagcgcattgatattttctacgagttggttaaggacaagcgggacaagaagcaattggatgatgtgcaaactcacaaggagctggtgattgaagccgaacgcttggatattattaacaaggctccattggttctcgccgagctgcttttcactgaaaacatcatcaaggacgtgcagaagaatcgccctttgcttcttcgcttcaccctcaataatccaaaagcacagcgctatctaattggtggagtggagcaaactgtagagctgcataagggtatattgatgagcaaggttgctggaatcttcaaattgttttatgatctggacatactcgatgaggccgtcatactggagtgggcacagaaggttagcaaacgacatgtctcgaaaaatattgctgccgaaatacacgagaaagctatgccattcgttctctggctgaagaatgccgaggaagagtcctccgaaagtgaggaggaggaggacgatgaatccgaggaggataactacgtttccagtgccggccaacgtggcggtcaacgggtcgtccaacgcggaattccacgcgctgttgcaggcgacgaggatgacgaggacgacgtgaacatcgacgatatctaa

SEQ ID NO: 27597 - protein, 464 aa, DROSOPHILA; identical to SEQ ID NO: 19656

SEQ ID NO: 27598 - DNA, 3052 bp, DROSOPHILA
ccctatgtggtgtgctatcccaagcgcgtctgcgaaccccgggaggtgtgtcagtcgatcctgtgccagccgaagccacagaccatcgacattccgccgccaagggagtactgctgctatccaaatggacccatcaactacaagcccagtgcagcgtgcccaccctgccccattggaccatgtgctcctggaggaccctgctgtccgctgccctgcttctccacaaaccagtatcccgttgccgagggtaggtgcggaccctgtggaccttgcggtccaggatgcggaccctgcggtccgcgatgtggtccctgcggacccggcccgtgcggaccctgtgggccgagatgcggtccgggtggaccgtgcgccgtgcccaattgcgggccctgcggcctcacaatgccgtcgggtccgtttgtcccggctccgtgtggaccctgtgctccatgcgggccatgtggaccgctcggcaatagtccttgcggtccttgcggaccctgcggaccctgttcgcccccgtgtccgtacgagtcacccgagtgcggcccctgctacccgtgcgccccaactccctggaatacccactgcggcccagttggtccttgcggtcctcaagtgccttgtggacccagcggcccctgttaacatcatcgttgtgctgcctggattgttgtcagaaaccggtgcccagtggaccaacttgtctatcaccaatacagattgccatagtgtattctcgccgttctgctcaaacaccaccaaaaaagtctacagttctctatactttgtcaacgcatggacgactcattggctgtaaataaaaatcggatttatgcatatataaggttttttcaatttcttttgacaggttatgcaatggtttctatccagataaaattttctaccaaatttttgtcaaatagtaggccttgcctctgcttgtcaatctacctatgttcgttactcaggcttagctcgcattttgaatccggtttcgcttcgatacacttctaaatttctctgatcaaattttataagaaacaaaaaacaaaaattaactttttactctttcggtttattctagtcgaaacttaaaatgtgctctccgtgcggtccttgtagtccatgcgatccctgctgcggtcccttcgagtgctcacccaagtgctacaatgccgcccaattggaggccttgccacaatgtgctccacgtattccaccacccttccccaaatgcatcaccgtgcagcaaccaccacgcatgatctgcaagaaacgcgttgtgttcacggagaagattgtgccggagccaatggtggttaaccgatgcaggcagatcaccattccaaaggtcgttgatgccacgcgggtgatcaaggtgcccaagctgatttgggtgtcgcagatggtgcgagaacccagagtaatctactacccctcgatgatccccgacccctatgtggtgtgctatcccaagcgcgtctgcgaaccacgtgaggtgtgtcagtcgatcctctgccagccgaagccccaaaccatcgacattccgccgccgagggagtactgctgctatccaaatggacccatcaactacaagcccagtgcagcgtgcccaccctgccccattggaccatgtgctcctggaggaccctgctgtccgctgccctgcttctccacaaaccaatacccagtggctgagggcagatgcggaccatgtggaccctgtggacccggatgcggaccttgcggaccctgcggaccttggggaccaggatgcggtccttgcggaccctgtggaccctgcggacccttcggaccaggctgtggtccatgcggaccgtgtggaccctgcggacctggcccttgtggcttcggtccttgcggaccatgctgatctgtaaaacagctggaaagatctacttgacgtctgccaaaaacattttgtgacaactccgcgttatggaagtccacatccgcgctcaattatatgacagtccaaattaactttgcaagttttgtaaattaaagaagtgcattgatacaatatttaaaccacattttttcttcgggcatttgtttcggaaatttcgttgtttcattgcatttaatatgctatgtatttttcagataacgaaagttgagattcgggatttttgtttcgaaaggcctgttggggaatttttattttattttattattattttaaaaactcatacttgttagttcaccagtgtagccctgagtcacctgtcagcttgtggacttactggtaatagttgtagtagtcatatccaaattattcttgatcttaaatcatgtcgaaatatgtggctagagtgggcccagcggttttctccaagttgggaaagtgggcctacaacatgtctggattcaaccaatacggcctgtatcgcgatgactgtctgtacgagaatgaggatgtggcagaagcagtgcgtcgtctgccccgcaaactgtacgatgaacgcaactatcgcattcttcgagcactgcacctttccatgaccaagacgatcctgcccaaggagcagtggaccaagtacgaggaggacatcaagtacttggagccctatcttaacgaagtgcaaaaggagcgcgaagagcgtgaggaatggagcaaaactcattgatccggatacttcggttacaaagaatgtcataaccaaaacataaaggttatttaaataaatcgttaatataaataggcatagaaaaaaaaacaactttaattatctggttttaatatcataacatctaatatcactttatcgccagctttttttaagcgcgtctctcaatatcgtcagccgtttaaaaatcccctgcgatccacagcaatgtcaacgcaaataattttcgcattaagtgcattcgcataaatacaatatatgaaattcattaacagcgaatacaatacaaattagtgctgctgggtggggcgtgagccgcccattgaacatgtgtatgccgccccacgatttaaaatgacagtggaggagtgggcgtggcagcgtcagcggcaaacaaa

SEQ ID NO: 27599 - DNA, 1052 bp, DROSOPHILA
cttcgatacacttctaaatttctctgatcaaattttataagaaacaaaaaacaaaaattaactttttactctttcggtttattctagtcgaaacttaaaatgtgctctccgtgcggtccttgtagtccatgcgatccctgctgcggtcccttcgagtgctcacccaagtgctacaatgccgcccaattggaggccttgccacaatgtgctccacgtattccaccacccttccccaaatgcatcaccgtgcagcaaccaccacgcatgatctgcaagaaacgcgttgtgttcacggagaagattgtgccggagccaatggtggttaaccgatgcaggcagatcaccattccaaaggtcgttgatgccacgcgggtgatcaaggtgcccaagctgatttgggtgtcgcagatggtgcgagaacccagagtaatctactacccctcgatgatccccgacccctatgtggtgtgctatcccaagcgcgtctgcgaaccacgtgaggtgtgtcagtcgatcctctgccagccgaagccccaaaccatcgacattccgccgccgagggagtactgctgctatccaaatggacccatcaactacaagcccagtgcagcgtgcccaccctgccccattggaccatgtgctcctggaggaccctgctgtccgctgccctgcttctccacaaaccaatacccagtggctgagggcagatgcggaccatgtggaccctgtggacccggatgcggaccttgcggaccctgcggaccttggggaccaggatgcggtccttgcggaccctgtggaccctgcggacccttcggaccaggctgtggtccatgcggaccgtgtggaccctgcggacctggcccttgtggcttcggtccttgcggaccatgctgatctgtaaaacagctggaaagatctacttgacgtctgccaaaaacattttgtgacaactccgcgttatggaagtccacatccgcgctcaattatatgacagtccaaattaactttgcaagttttgtaaattaaagaagtgcattgatacaatattt

SEQ ID NO: 27600 - protein, 265 aa, DROSOPHILA
MCSPCGPCSPCDPCCGPFECSPKCYNAAQLEALPQCAPRIPPPFPKCITVQQPPRMICKKRVVFTEKIVPEPMVVNRCRQITIPKVVDATRVIKVPKLIWVSQMVREPRVIYYPSMIPDPYVVCYPKRVCEPREVCQSILCQPKPQTIDIPPPREYCCYPNGPINYKPSAACPPCPIGPCAPGGPCCPLPCFSTNQYPVAEGRCGPCGPCGPGCGPCGPCGPWGPGCGPCGPCGPCGPFGPGCGPCGPCGPCGPGPCGFGPCGPC

SEQ ID NO: 27601 - DNA, 28491 bp, DROSOPHILA
tggaccacgcccacaaatgattagggcacattatttttgtcgtttttaatttgttgtttttcgggggatgaggggagaaggaaattgccaggtctccgtttcattgtctgcagcacatcaaacgtaagaggaacaagctgatccccctggccaggaggaattataaaaaattacatttttatatgcattggaaaaaaaggcaggagcaaatgatctaattgttttaaatggtcttgaagctcattgctagtacttatttaacattatcagtaacagcaacataaaaagtcaatcaaacaattgttgtataattctaccatactaataaaataaatatttactgtgaaattacacattgcatattgatttaattaaatgaaaaagcaaccccctttagccaccatacaagtatttacactctcgaaacgactttgattgttcagttttttatttcattcgcgttgtttttaattatgttgagatttataaaaataaaaaaggtaattgcatttatgtttaccttttctatttttttttttttttttttgtgtattggtgaaagctgttgatggtattcgagaatttgttatgtgcttgtgggtaggagtttgataggatcgcttaaataatgttaatactttgcattaaacataagttacaataagtatatgtcctaggtgtatatattaatataaaatctaataatctgaatgtgtttagcgaatgtgtgagagtgcgtgagatgaagtgattgtttagtaaactagtttaagataatattacaagtgtttgttttgagtgccgcttctgcattcaaagttcagttatcctgctgttgatctccttgcgaatgtttcaagtagttttgtccttcagatttttcattttcttcgaaaataatatcacttagaaagctgggtcttcaggttgaaggatcattgtatgtgatacatgtctttattgaatatattaagttgccgccctcgcgcgtatcttgtatctacgcatttttcttattaccggcgctgattttgtctttggtgcggctgtttatcagtttaatgaccacattcctttgggccatctccgatttgctgtactcatctaggaactgcaaggatatggaaaataattgttgtaaacataaaccatcatttcaatgtgccaaatcatatcaagttcgattgtcatcagatattaatagccccttaccgtcaaatcgaagtccttgctgaggaactctctggctggcggattgttgaaggaaaccgtgaccaggaagggataaatcacagggttaaactgggtgggcagcttggccatcctcttgaagatcacggcatactgctcagatatcagcaggtcctgatgtctgcgattgttaacgcagaaaaaggccatcgaggcgacaaggtcaatcagcattgggcagctctcgctgttcgttgtccattggtcattcactaaactgcagttcaggatgacggtcatcacgtccaacagcttcagcgacaaaggaccctccacagttagggtctcctgaaaataccgaaacacatttaattggcaacacaagccaacaacaatggtacaaaaaataaccgaagccgaaatcactgagcaaatgttttaattaagtcaaagcaaatatcaaagagtgccacttgtttagggcaggaaatgaagggccggcacgtcctgcggcccgattgtttatttaatcctgcctatatatttgcgtgctatttgcataagggactcgtcgagcgagccagagagcgcttctaatttgtttgtcctggcaggccaaaacccgaaactcgaaattcaacaactgaaactggctacttgttcgagtatgagtaagagtacgagcactgagcaaatatttagccaaacaattgacatgcctggctggctagaacaacgccccctcacttttccgaccctggcaggatatgagcgagcggcaaggattttccagccggaaacgaaaaaatacagcacgaaaaaaacaacagagagagagagagagagagagctcgagaacgattgaaattgcgtgggcttcggattggcttgggcttgggttaaacttgaaaatttcattttacaaagtcaatatttacgcaaaaacaagcgcggcctctggagccgtctctcgaaaattgagtttgctgattaaaaccgaatcaaattatttgccagaaacggagcaaccgaccctcgctcaaaacttgatgatgatgctgatgatgttggtgatgacgagcaaccgaaacgaaacccttatctatttttgtggtaatttaaaacaaatagctctaatcccagtgcaattcgtggtcggagcttttggcagcggcaaagtttgtctagcaaattagtttgtcaagtgcgtagccttgcctctgccagcctgcatctgttaaatattgacacgtgcaacagaacagacgcacaaactcgagagctcagatacccggatgaaggtacacaggaaattaaaacctagctgccacactctgcaaaacaaaaaacactgctatttcacagtttgttagctggttaaaaagtcaaaggtaaatccttttcattttaaacaaatgtatcacacatcatttttatgtgtacagatataattcgatataggactgtatttacaagtactttaagttccattatttgcaaccaataatcttctagtgctgagcctcagttagattcacgattgtaccactcccatattctgtttcattggcgcggttttggatgccaaccgaacttggcccattccaacgccattcggctcctttcgttacggttggcataaatattttaggccacgccaagacgacagccgacatttggcccaagtaaaatgtcaaaatatttgcgtatgccacccatcctctaattcatgtcctgatgctccccaggcaggcaacccaaccacccaccacccaatcctgccgttttggccactttctgctctgaattttcacaggtacacgggtatagagcgaaatgtcatcgcggttcaatggcgtctgtgcctcatgttgtgtttgtcatttggcgctgtgttgtctgttcggcaaatgtcactctgccctgaactcctgtgcattttccccaaaccagcgaactcctccggaaaatcccacctcactaaatacacaattctcgtggtggctgtcacgacatttggcaatatgcaaatcactctgtcgaaactcactcgcagattgcaagccgccgcaattgcaaagttttaaacgtctacactaacttttcctcccccacccctgattttcctcacgccaatgtcgatgctactattgttgttgttgttgccgattttctcaattttcaccaggcgatttcacgttcgacaaagtttaggagtgcaaagcaaagaaaagccaaacgcatacacacgccaccagcagcagtttccacggcaaaaaaataaaacagaagagagaaattctaatgaaattttctctgcgcttcgctgcttgagcaggaaaaatcgagtcacattggtgaaagtatggataaaagttaaggttccaaataaattggaataactataacaattacaataaatattaattttttttagaacagttcgtcgaactgtttaatacatagttcgtaaaataaattattttaaacttttcaaaactcttcattatataataaataaaaagatcattgctaaaagtttaaataccttgtaaattcattataaaatatttaacttaaatgttttataagattatcaggtttttttgaggccctaaccactgtgccttcgtattgggttaagagctggctggctgactttttgatttgtttaaacggcgacgcacgacgttcgacgtttgtcgtttgcgctgaaactcccaagaaaccccccacccgttgaagggcaaactcacctggaaggtgttcacatccaaggaggccagggacacgtagagatgaaaagtcgatgccgccagggcggtcgtgcgtggtggaatgcattcacctgcaaaaacagaacagaacagaaataaaaaaaaaaaataagaaaaagattcagaaaataggtagaaaaggcggatgagcagcgatagcggatattcactcataaaacattagaggcttacggaaaaatcaaaactaatttccgcctttgcgaggagatcacgttgcatgggttgttcgtaaagtgcattgaaatctaattagcacctccccctccaccgccattcaattttcagctactgtttggttcagttaaaactcacccattggcatcacgcagccatagagcatcgaaacggttccaaagagctcagtggacttggccgcgctcagcagacgtgtcggatcggcaggacctgtcaacggaggatagagaaacgaataagcaacgatcctactccggtttatttgcactctggcaggtgcgacttcagaagccggttagtgtgactcacccggctggcaaacatcaatgaagcgggacaggaagcccaaagtggtcagcagactcagcatcacactcttgttgctctcgatggactcccgcaccttctgaatgcgacgggaaaggatttcgatcaagcccgtaatcacagcatagctggaaaagaaaaaggataagtattcaattgatatcatcaaaataactacataaatatatttaattaacttaatccccattgaattctctgttcattgctatttagccgtagtcattcgaccgatttctcgttgtttgccacgtgttttctatgtccatatgttgtccatagttctgttgatctatacccacttcctacccctttcaactggctaccttttgggccaggacactccacacttgttaatcgcccggagcgttcaaaggcacggggtagaacacgactggaacccgaccatgtgtcatatgatttgaaagcgatttaaattcatactcccttctcgcacaacaacaagtatccccgcaccggccggagaggagggactcctcttcatcccgggtaatcaaagcgcaaatgacatttcatttgctctgccagcaaggtgtttccattcacatatcgagggtggaggacttgtgtcctgttgtcctgtttaacctccgagtgaacattaacatgtccttactctggctgctgttgctgattctgatgctgatgctgatgcctgttgtcattgtcagcgcaaatctgttttgattttaatccagcttatgcgagcccgaaatgcatgcccatggtcctccaggactgctcctggtccctcccgcttccggttacctcccctagtcccttccttctgcacattgttgttcagcgaactgtgctgctcattgactacactgacaaaaacttctgctatgaaactacatagatttttagaagtatttaaataatttgaaataaattgctaaacctattcacagaatgaagagactattcccattagttgacaaaggctttttgtaaaggattcgcatgactaaactcttatttgagggcgaaattatttcaagtgtatataaatccgctgcccttactgttttattctgccgattatgcgtcttaagtgccgaaatcaatgcacacaaatgcccaaattacaagcgcccgtgaaaaggacattttccagtacagagaggaaagggaaccatttcgtgtttcttctacaaaaaaaaggacattttccagtgagcggcaaggggttgcactttttccttgccaattgcaactattttgtttaataaacaagacacacagagcttgagttaagtagcgtgtgcatttgacacttgttaaaatatttgcgcctgtcccacacacacacacaaacacacacacactcaaactcgaggaaggtccttgatgattaaaaaggggggttggtgcgcctgcaactgtcgcgcgtatttagcgaacgtgttttcacaactaacaaggatgttaatttttttttcgccggggattcttatttttatttcgagctttgcaccaaatgccttttcacacccgaaaaagtcctgtctggatgtcctgccagtggttttgccccctcgacaaccatttgcgccccatgttgtcgcattttatttttattttgtcgccatcgttggctgctgcttttggctgctgtttattttacggcactgacgattatgtcctgcccggggtccttagtccttggtgctcggtcctcggtttgtcctgtcctgggagaggaaacctcggccacatccgatacgccgctggccggggagttggccattttgtgtttggattgatgcgaccaacgaactaaatactttccacaggcgaaactcgggccaggacacatgacaaacgatgacagctcactggcggcggaaaaggggcggccacccactcacaaactcacccgcagaacgggggtaaaagcatccttcgagctccgtgctagctttgtgcttgttggtttaagaaaattattaaggatatttttgtggtgctgatgagtttgccgagtactttttgtccagccgaggccaaagggacagcgggtaggaggctggtggggtgggttagattgaccaaccaggagagcaaacatcgtgtggattgtccctgcgtccgggtgtcctcatgtccgttagtccgctcgtcctgtgtccttgtgtccgcctgtctgcgctaagtgtcctgtgtgcgatgcgaggcacaaatagcaaaacaggaagctcaagtatgtttacagttgacaacgccagaaatcagcatgggatcagcagtgatgtgcttttagctttatttttcagctcgcaaaaagagttttgttttaacttcatttacctaaattaattttaaaacttgaaaagcgtttaaagtttaatattgagaaaacctttgcttttatgccaaggtcctcgatctactttcagttaatgctgaaatcagaactcatttcaagcaagtatcttaaactggcagcacagatacagattcagatacagaggagcgggacactttgggtctcatcctggcggtggcacgtagtccttgctgctttgtttgcctctccagtgggtgtgtgtgtgtgtgtgtgtgtgtgtgcgtttggctgcttatgtgcgtgtgtgttagcgtttgagtaatggacgcttttatttgcgaacaggacttctggctgtgtcaaaaggggtcaaaatggatttttcggctatactatagtatggcatcaaaattgctgctggcccgtgtttgcttttcaacgctgccacggctgccacggcagcttcggtggtcaattctggattttcagattttgcggcaggacattgtcatggcatatcaatcattcatttgtagaatgttatggatctgtatatgtttatggcttgccacttaaatagcagaaatctgtatgccattcatttgtattgtaaacatcaaacgatgaatgagctccttttgttgatgactcgctttcgtttattatgataaatcacacagaaaataatgaacggacaaagagaacgaggttttgtttgatatttttagtgtttgtaatcagcactcgcctaattgaaatcaaaacatcaagcaaactgaaattatttgcacaacaatttctctttctttcactctccgttagcgaaaagcaaaaattgccatctccaaaaacaataaaaccaaatggtttgagaaggacttgcacttgaatctacaaaagctgctaaatggatgcaatgtcacaatttcccgggatctcacacactcttcgcaaatgccgctcgtatttgcttacgaacatttagcagtattttatgggcgaacgtatctgaatcttttgctaatcggttttgcattttgagcacatttaatgctagacgcgtgctgctcattagcatatgaaagaattatattgccattgtcggtgggctttgaaacgaaatttgcacagcacgtggctttcaaaaaacaattggacaatcgattttaaaactgtttatgagattggtggctaaattctgggcgcgaaacgctttaactctattggactccatgtttcgacagattaaaaagttgacaaacaaattaggcaaattaaatttaaatcaatgggttcgacttgcctcataatacctcaatgaaaatctgagtgttaatttaatttgactaacgcattcatttctgtggcaaactgaaggattttatagtcaatgattcaatgatggtaggttaaatgattcaaatgctgtctagttattccaaaatgcgttggacatttttaaccccaacacattctgtgttttcacaaccaaatctgcttagcagctttcgcagtaattcaatttcaacacgaaccattgaaattcatcagattcaaattcattcaatcaagtaaagtcaacaacgaaggctggaaaaacgccagctggctgccattctgcatccgagctgagaatacaacacgtggaaacccatacgcatccgaacccgattcaaattcagatccaggtcaaaggcatgtgcataaaactcaacgccttgcggtggcctaaaacaacattggaaattcgattgtagttggcaggcaaaacaagcgacacacacggatcggttctaaaggtgttaatgaaaactaaaccggaaaaaaaaggaaatcagggaacggtagcctgtagctaccccttaattttcagcaatgcgcgcacgagccggagttgattaaaatgcaatttcaaattgttgtttctccgccgcttgtcagcacttgattaagagcaactgtttcctttcggagggttaaaactgtcgcgcctgcgccttgccattcccgaacttccaaactccccccttctgaagggccgacaatacatacatacatatatacgtatccccgggcatcccgattcgggtgtcatgtcaaaacaatgcaactcgagtcgcattttaggggtagaaatcggcagtcaaacagccggccaaagtcgagagctctgattgcccacaagtggctaggaggaccaaaagtgctgaagcaaccctcggacgagaaagcaagccacacaagttagaggacctatcttgaaaatgtatcttttattctaagctgcgaattatattaaataggagttacaagggatttcgatacatacgagtatatcattctcaataaggatttaatttaaactatacaactataaaaagaaggatctaaatatgtttttactgttttaaaagccgttttaaatcataatgtaatagaactgcttacaaaactttatgcacaaccccaaccaaaatttttcggcgggtactatggctatcattgatgatgctgaaattacacaacacctggtaccggggcttcggttgccaactttgttggccatgtttatgcattagagcgcgtgttaaataatttcatgctgcaagttggtcgactcctttatggccataaagggaatcgggggccgaggggtaacggggtttgttgtactactgcgagagggtgaacttttaatgggcgacgcggaaaatgtgggcatgtggtgttaagtaaccttatcagtgggcgagagcagggacatcgttatcattaagagacaccaacagtgtgacatcgtcatcatcatcatcattttatcatcataattatggcgcttactagggcagcacgtgcagcagctgtcactaaaactgtggcaagggggttatatttattacataaatcccggccaggactaagacaattcgtcatgtcacagggatttgcaatggagagatctcaattgtggctaatggagcttagactcggaacggtagtcctctcgtgaatttcaattgctgcttacctttcggtgcacttagagaaaaaaagcacccaatctgtgctattattttacttggatatataacgttgttttacaaaaagggaagtaatactaaatcgaatacgataccgattggtattggtagttatactgcaaatgcgaaagagacattttcacattattccttgtgcatgtttacattactaatacgaaacgcctccaacaacaataatcacatcaacagaagctgggacgtgactctctaatgcccagcaagggttccttcgccggcaggggtctcctttcggcctgcatgtccttttgccacttcggacatcctgcggtgctaataacccacttacttagacttatcccattgttgaaagagggcacaacagcgagtggaagaggaccgatcgctccgctgcccatcaattattgcccggaaaatgcaattcggaattcagaagcgaattgaaattgaattgaccgcattcgggcgcacagcatttttgatttttttacgaaactatccttcctgtggcaggcatagcgaaatggtcattggaaaaaggacacccctatgtgcgaatggaatttatgctctgggtggacggttatggtttaattgcatttgtaaatgttttggctgaggcggagatgcaggttatgattgggtgcaatttgaaagttctcgccacggggggtttatgagaaatctagatcgattggaaatcaaatttaaaaaagtccgcgtttatacctcattaaatattcaaatcaacaaatgttttgtgcaccacttcaactaaatcacatattttgtgtttagcaaactgacttagtttatttttgtatataaagtacaaggtatacactttagatacccgtactaaaagttgcacaacttgtgtcgaatatttcaattacagatcatcaattagtcgaacacaaaggaagctcctatcataaaacttataaaaaggtagacctcacattttagagagctatttgataattttacttcaattgtgtaatccaatcgaatccaattggttatgctcaaggactcgacaggacatcagctacggtcacgccctgcccaagggcaccttttttttaattttttggtggtcacacagctgtcaacggaaaccgtcgaaacacctctgttttgcgaaaatggttactaatttcagatttttcgaataaacattaaataaaaaacgggacagagaaaagtgtaaaataagaacaacagagatacaaatcaaatgactggcggagtggcgaaaaaggcagctgtgtgttttttcagggccgcaccttcgactgataagagttccagttgagatcgtaattaatttctggactctcccctgtttttattttcatttctgaatgcaaatgaatttgtacgtatcgccgtacggagcagcgacaacttttaattcatttaccttgcaccagtcgccggatgacgatgatgattcagtcggagaatgaggatgcccgagcccagaaattgatgcaaattgattttcaacggcgtggcagaaagagagcggcataagcttgccgaaagagatggctgtagaggcgccgcgaaccgcaaggtagcgtcgaaatcggggtatggcgcctagcaaaaaccgcagcgaaaggattgtcctcgcttgagatacatctgtacataatgtatgcatatctctgcgccttggacttttcagctcatcataaataatgtgaaataatgagtggattaaagagatagtaaagttagttcttggcttaatatctcgttccataaaatcggctaaaaaatgtgccttaatttaatcaacgctcttatgggctaagtgaacttagcagtaaagtttcgaaatataatcaatagcttgagcatgatacgaaactgaagaaaggtgtaaacgtataactcttaaatcccctaaaattggtttataatcaccatatcagctattgacttatagccccctgccacgcccacccagcagaaggtaaccctttttttttgcgacagttgctatggaaccccttatttaaaatactttcaggcgtgcatatttttgcgagactgcggaatctgttaaactttttacaatgctgcgcctcattaaatcgcccaaaaatcggaagccacggtagcaggcccattaccacgcccattaatgcaaattaaacgcaatgcagacatatgccaaaatgaagacctcagctcctggcccatccagttggtttcgctccgctccgcttgggttcggatgtgtcacagcgcattatcattcataaatcaaaacatggaaattgtttaaggcggggtgaggggttgcattttggccgggaacaacaatataatagtcctcccccctcccctcgctgtgcgcagtctaataaacatatataaaaagttatgaataaattaagacatttggttgtcagttcgggtttaaagggatgcagatagatgggccccggggttgttgctcacttttattctttatacatcagtgattaaactcgcattacgcggagaaccaagggttaagggtaaaaaaaaaaaaaaaaaaatgatgttaaagagtgcctggcaagtgccgagattgagctgtcaagtgtgccctcaagacttagccagaaaagtgtgcaaaaagtgcggaaaaatagggggaaatgaaacccaagaagcaggcagaaaatatctcagcgatatctcaagtaaatccgagttatagatatgggatggaaaatgaaatctgcatgcggtaggccaacgaaaggcgaagacaaacacggatgtggcaatcactccgtgggatatataatcccgatcctgtctagccgagttcttaaaatgaaaattcatcaacacgtcacccgtccatccaatccgtccatccatccatagagcaatgccataccagacccataccattccgttccatctcgcgtcgcatctcctgtgttttcttagtaacgaacgccacccaatgcgttttccatttaccccaaaaactcacacagaaaaacattggggcgacaggcaacggggtaaacgttttgtcttatattaaatatatatatgtatattttgacagggggctggggaaagagtttgggcgtcttcaattacgacacgcgcgttgaaaataaaatttcagcagtttttacccaaatgcacagagagaaaattaagtacccaaaagaagtgcaatgaggcaacaacaacttatagacttatctacattctactgaaatatcttcgctgaatgtaagcttggtttttttctcagtgtctgcctgctttccatatggggcttgtcaccgggccacataaggcggcgattgctcatgctcctgcctaccgcagatgctcatccagaaaacagaaaaaaaaacaaaaattgggaaacgcaggaaaatataaaattggatgggggaagaatcaacgtcagaaatggacaacacacgtggggcagcgcgatgacgggatttttctatgggaattgccactgggattgggtcgccaaatcccccgtcaacctttgcgaggctgttaaaaagccaaagtcgaaatagctgccagaaagtaaagccgctcgtaaaactcaaacgaggcgcgaagaagaaaaagctggggagcccaacagcagcagcagcacaaaaacatggcgccaaataaccgcaaccataacgatgttctccccccacaacagcagctcctccttaagatccgtcccagagccatagaaggaccccgaacaggaccgtgcggcgacgtttgccgccattttgtagaagaaaagtgcatataataaaataaaatagcaacacggccaacaaaagccagtcgaacaacacacacgaccaggaggtgggtcacaaaaaatgccacgggcattaaaagtaaccaagtcgcggaaaggcaaggcgaagatttaaataccctgctaatgcagctaatttaaagttgggaaataacttaacaataatatgtatgtacaattgtacctgaaaattatttaaatggtttttttgagattttaaaaaactgtttttaggaaaaaaccaacaactcacttaagattgttcatatacccttgaagactttcaggattggaaactttgagtccgggaccaaagtcagtgaaaatgggcgcctgtgatttggcttttccgttctgtgtgtgtgtgtgtgtggaaaagtagaaaatggaaaatggctagcgaatgaaaatgtcgcagagtgagcatcgtaaaaaattatgcccaacgtagggttccagcgctgctccaaataaatgtacaagtatgaatatatgcatggggagtcgaaaccaaattgcgttcttatggcactttagtggcaaaatcaaattagaatttatggaaagtcgccgcccaatcatgcggcgccccccatatataagtaagtataagtatgctccagaaaacattccgcaaccattgaatagccataacgataggagcgacttttcctttagtgctaaatgacctttacggcaggaccatttcaaagaatactttgcgaagatttttagttttgtcgtaaatttttatgcgaataaagcggcaagcggcgctttgaaaaaccgtatggggtacgcttctaagttatacatgtagggtagctcccggattagcggcttgtaatgtgcgccatctgttggccacttgagggcattactcatgccacatttggtccgattcaagtgcttagcgtgttaatttgcaccagtttttggtcccagtatcgggatctttaacaggggatgcggccggtactattcgtatctatctatctatgcatataactatagagcgagggttgctcggcacttcgattgtgttgcggcccgaggcctcgtgttaagccctcacaattgccatttgattgagtgatgcgtcagttggttgtccttgtccttgcgcctgttttgtgttcccgttctgtttatctccaccccctcataatcaccccctgctcctgtttgctttgcgagctaccaacgcgcattaactgcactggaaaaaacactttctgctgtgtaaatcaattccttcgatgaacagaactcttagaagtaacaaggtttatttgaaataagaatggaatgttaaatacatttcgccaccattagcttaaatccccatgttttgagtttataattatcatctttaatggattaaacgaacattgtttgattttttttttttcaagtgatggaataacgaaaccaggaaggatgtgattttatagagggtgcattatcatcccggagatatagtacttcgcatctgacgagcattaaattaactgtaaccggcactgcactttacacattttacatatgtcgcctaccagagacaacttcatcttggtgggtgggttgccgtcccacccgctaccccggaaattttccccagagaggaaaaacccaaaacagagcagtgggcacaacaacaaaaaaccaggccaaaatcaaagcgaatgcactcaaacgaagagtggctcagcctcggactgagcctgtaggtaattcaatagccaaagccgtaccgctcgccccccctcccgctgctcgtcctttgacatgcggcggagctggacaggcactcatcaaacttttgacatgcagctcgacaagggacaggagttcgagggcggacgggggaggagggcatatctgctgaggctgctgcgcctttttgcatgcaaaatgtcagcgcatatgtcagccttttgcatatgacctcttcgggttatgcgagtagagggtaaactcaaaagttacgtagccagtcttgccagcagtctatttgataccccttactcgtttaaatcggcgactgcacatctatccgactttatgaacattgtgggcgatacattaggatctgcctgtagaaccaacttcgtagcacttatatttcctgaattcgctgttcatacggacggacagacagtcatggataaatcaaaatagaattatctataatctataaagtatatacatatactttaaaactagtatcccaaagcaaggtttcccaaacagttaaaacgcacctcgacaatggttttttcctcagtcctttatggccaaatgcattttgatgcaaatatacagcgaagttttgggctacacttcttttgagctactactctgacccttgaccccctctcctttgtggcacaccccctcgaacacccgcccctgtcgtccgctgctccgatttcgggtatatttgtgtgggttttcgtgcaggggttttgctatgatgtctttgtaactgtaattgatgctgactttttgacagtttgaatgtcgaaacgaacagatgagcaacgggagctgaaaacgaaaactgaaactgaaatagaaattgaaactgagctctgttgagcagttgactgcagtcggagtagaaatactcgtggactgagatgacaactctgattagttgtgtgacagttttctgatttgaattcaattatgacatgcaaaatgttgtcaggtggtccttatcgttaaataaagttatgtaataagcagtgaacataactagacttttaaatcaattttattataatatacttcaattgattcaatcagtattaaagcaaatatcaacacgtttctttaatcgttaaatacagtaaagaaaaagaaaaatgcatttcctaaatgcattattcctaatgtctctttaattcgagcaatttaaaatgactgctcaatgtgaatttgatgcccccccccctcgccaacaaattttccaccctcccccgctgacattttcggggtagctgaaagatcaataggcacaccgttaagagtcaatattttgattttccttgatgcgggggtgggaggaattgtgaaaaggacgaggggcaaacaaaaggagcgtcgcagtgggcaaataggaaacttcaccaaagccaaacaaagcgaaacagacagaaactgagccgagttttccctatgctcagcctttgtcaaaaagaatcaacagagacgaggggggggatgggggttggctgaaatcggatactaaacgcagcacataaaaaagccagcaaacaaagggccagggagaagaaacatgagaaacaggacacgtcgaagcatatttccaaaggagtacgagaaaacgacgagagagagagaagagcagcaaggacaaaggacccagaatgaaattaatacatttgaccagataggagagtcaaagaccatggtctatcgaagtgggcggagtgggctgctgtctagtttaaggtcttaatagttgcactaatatgtcgattgtaaaataaaacccaggggcacgtgtgtgtgggtgtgcttagatgccagatactgtccttgtaattgagccgatgatttttattggcactgggagaatgaaatgtatgaaaatatatcgaagacaagaagaagaatcaacaaacattttctaaataactcaattagaaatgtaactataaagaacttaggccaagaacttgatttcttgtccgtgatttactgattgttgaaatgcgaatttgaatacattttttttatttgctcagtgaagtccgtaacaatgtcaactgaaaactgcatgccacaaaaagtggcacactcagactctgcatgcgcacatcctgcaggatatggatgcagcagctccaaggcctgccggccataactccaaattggccattcgatctggttacttaaagggtaattaaattaactgccgcacagcagtcgagtagttgagccagcaagcggaagtaactctgccagcatgtcctccttgttgacatcctgccagtggaaacggcagtcgctgtagcatcgccagacaagctggggaatatcgaaaagaccttttgttttccccccttacaagcacagaaatatgcatatatttcattatgactgctttttaggggtggcaaggtgaaaggggttccggttccggtttcggtttgggattgggattgggattgggcttgcgtttgggttctgctttctggtttcgattccgcgccaaggggtgtttgctttatcgcgtgccaaatcatcgttatgattgcgatgagccgccttttcagttgttgcgattgatgatcaaatcgtgattaaaatatatttacttcccgtttttttaccaagagggctaatgactgtgttgattaattataaatcaattacagtgtaaaaagatatctcgtagatctgcgcacagctttttgtttgatgcgaaggtgcccgagcgaggcaaatcaaatttgtcatggttctagaacggggatgacatactggatggtggcaggatttatgaagggcattatggttaaccaaatagaatttcaatcgacatggatgcgctgtgattaatctatggagaatatggagaaattatgatagtatgaaacgccagctaactcgcagagctcttaagaaaatctggtattgtgattttctaattattcaacaaagcaaagtcaaatttaattagaaaagtacaaacttttatatttgtgaatttgagagttcttcgtgtagaaagcaaaaatcttttaacaaaagtttcgtagtgctaaacaaagtttcactgccctcgaagaatgaaaacccttgtctagaataaaagttcttctttgtcaactttaattcgattacacgactccccgaaactttattcaaatgaacaacaaaatattcgaagcagccccgcacctgaacaattaaaagtaaacaaaaatttaattatgcatccggcaaaagcggcacgcagagtaacaagaaagaaagcttcaatcgaattaggaagccggaaaattccaaatacctcgtggccagaaaaaatatgaagcaacgggaacggaaacggaagagggccagaagaggaagaagtgcaagatggcggaccattcaagtgcggcgaattgagtttcccattcagccaagtttatttattttcaaggcaaaatggcgcaaggtgcaggctccataaaagggggtgggccagccgggggttgtttcaccgaaaattatagtcgaaagaaaatttgattttgcaaacgctgtaattgaattgagcgccgaaatgcgcgctacgaaaaatggccgaagaaataaaggcgagcaaccgaaagaatgaggataaaaagcggcagaagccaccacaaaaggctgcaaaggagacgacacactaacgtaaaataaaaaataaaacaacaatggcttactaataaaataaacgaaaagcttttgtaaccaaattgaaaatataaacaaacgaaaattgacaaagaacataaaaaacagcagtcaacaagaaggaataataaaaaaaataaagcaaacagctagaaaaggcagaacattggtcagagcccagagcacacacaaaagcataaacaaaagccatggcacacacaagaaaagccaacacaaaaaatggccaggaaaaccgaaacaaaaacaaacgcaaatgtaacacacaaaagccaattcacaattggaaaatgcatggcaacaaagttttttttttatgtaacaatgaagggataaaagcacacaaaactaactgatacaaacgcagaaaatacataaaaaatatgttgcagaccatgttttttacgatattggattttaaagttcaatataaagggaaaattatcatatttttttgagactactattttacataaacagtttgtgatttattaaaattgcaataaggcaaatcaaaatagtttcatttgataagtgaaatcctttttcgttgtgcaaaaagtttacaaaatggcgtttgtattttacagctatggaaacgtcaacaatagcaacaattcgattaaaacttttgcccatgaaaatgagcgcaaattaaaggaaaacaatcagatggaaaagaaagtggaaagggtttctaaagctcctagcaggacgcaaaattaaagtgaagtgctattatctgagtttaaacttaaaaatgcaaaaacgtagagagtgcactaatttcatgtgaataacagaattaaacgcataattattactaactataaatatgtgcataatatagaattgaattttatcacatctaaaattatggaaatgcccaaaacacaaccgaattaaatgaacaatcatattatagagtaaacagttgttaaagaatcgtagtccatttgtttttttgtgtgctaaaccccaaaataatgcgatggcgacccatatgctgtgagatagtgtgaccaactaaataaaagtttaaattaaaaataatattttttaaacgcagcagggcgggcagcgcagcagcagcgacgttggcgctggcagcgcagccgcatttgctgtcccactctcgcgcagtagaacacgccctctccggcgtgcgaaagggatggcagtagtgccgactaccatggccatctcgcttccactctcaccggttttcgaactcgcgtatttcccctcttttcattcgaagtttttgtagttggccgcaataaaccggcgtagctgcacttgttgttgtactcactttatcatgtccggcaggcgttccggaacttttgggtgggtgttctttttcacgtaactcgaggacagcgcctccgtgcaggccagcattagctccgtggacaactcgaccggatgttgtggtgatttttcttcgggtaactgcaagagatcgaaaaggacttaatacggacacgatttcggttatacgactgaatttcgaataaaaatcaatcaaaatatttacaatttccgaattttaagtaatcatgtatgttaaatcttgtggttaataaagcgcttattgcaacgaaaatgtttgtttaagcttagtgcattgggcaatttgttgattgaaacaccactaataaataattaaagagataacgacagataaatatacaagtatcctgcgaaaagtgggttactatctaagtcattaaagtagcacccgcatgattgttgcatgctttttggggccagcagtgaaattccttgtcgcgtgtttaaattaattatcaatttaaacagcaacagcaaacggacagagcaacagagaaagagacatccacatcaatcaaaaagttaattgatgtttctccctcgctcacttacagttaactttttactctgttgcgccttcttcgccgctcttctcactccattctcttatgccaccttcttacatgatccatcaacgaaaaaaggaaggtgaagtagacgtggagagggggagagagggacaatggggcggagggagcgacaatgaacacgagccaagttaacacaatgccaacgaccaaaacaacaactccgaagtgcgatgcgccgtcaaaatatttttatagatttaaataaaaagcaagaaattatgtcctatcaaaatggagaagaaaaccgatttgcaatactttttcgtcttgagaaaatatatatataattatacgtgttgaacgatatttctttaagctttaaaattacatcaaatataaaaaacataaattattgtttttactatcacaaaaatcaaatatttttgtttttacatatttttttttaatttctgtaaatttgatatatatgtatattctatatatatttatttttttctgatctgacctgatgttctcgcggaaaaaagggtacaattatataggcaccaataaatttaaaaaaaggcaacaaaaatttacatatattgggtggaagagtggctttttatgcgatttaacgattgatttaacagcagccgcaaatgtacatataagcattttacacgccgacaaattggacagaagagtgaagagctccagaaagttgagatcaatggggggcagggatcagggaaccgacctagtgcttaaaaattgatgggccaggcgacagacaagcgagcgcacgaggccagtaaataaaattcaaataaaaatgccaaacaaacaaaaggcagcgccaaataaaagcgtcaaagaaatgacaaataaacaacgccagcgaaacgagcaaaaacaaaagccagcaaaacataaactttaaacagggccaaaagggtattgcgggctaatcgaccaccaaatgcccttccaaaccaattgggagttacataaatttgcataacttgtataataaaaaaatgtggtatatattaatatatataataaatatttatggaaatatatagaactattcaaaaaactagtgttaaaatagtggcatatctaaacaattctgtaaggcaatcgaattgaataatacaaaataaatattaacaacttttctacacttagttcacataaatggccatctccacgactatatagttgctgcaagaccttcgcttaatcctccggactcccgccccactaggatttctttatagcgggtttaagttggacagagacataaacgcggccaagtgttaagtggctgccggcaggaataaaacgctagccaagtacgaatttataccacacacataggcgactttcgacgtggcctggggaattgtgagttgccaactttagttgggtctgccccaatcccacggacaacgcctcgaggcgagacgactgcctggcgacacttttattgtggagcattttgggtggccaaaagttcgagaaagtttcttttgtgcagcggttgcttttgaggattacctggaaactcttgttgatggcatcgaacagaacggttatggaattgcccagaagagcgtgacgagcaatctgaggacacacggaacaggcattccggtacagctgcgcggccaaatagacggacctagagcattataaagtagcgatattaacgatatactcaaaaggtaaaaaagtccaaagtcaactcacttccgggagatctctgagttttcatccatgcccttgctaatcacgtggttggccagtatgcccaagccatccatgcagagaaaagctagaaaatctaaggtctgagctttgggtatgacacgcaaaaggttgcctaggtttctatccagtccttgggcacctccacccttgaccaccagatttagcagcttgggaactgtactatctcttcttgcgtgtgcgggcaaggcctccaaactttccaaatactcggcagcgctgtaagaagagcatacaactcaataaatacagattccaatctgagattaatgcgaatttaatccaacccattaagattttaacgatttatcggaactacccaattcgaaatactataacaattgattaaattccatcaataaaagttaagaaatctcatttaactcaccactgattcatcctctgcttaagttttttcatcttcttcttgtagctcctcgtgtgagcgttgttgccccccacctcggaaagagaagaggataagtcacaatcctcattggtggtgcttgttgcgtttccattcaagatgtcctcggacacgtcctgatcgccacgtccctcgtccgcctgtctggtgggaatagtcagctccagagctctttgccggatgtgttcgatgttctcctcgtgacgtcgagcggattccatttgtttttggagaatctttcgctgcagctcctccgtcgtctgttgttgttggacttgtagggctagaagtctctcctctcgatccctggccttttctctcgccagagcctgtcgctgtttctccttctgctcctgcatcttaccaattctctgctccttctccaggcgcgtttcattcatcttctcgagcttgagcaaacgttctttttctagggcttgtcgtcgtctttcgacagcggcttccttggccaatttttcctccaccctcttttgcctttcctgctctaggtcttgcagtctaccctctgtttccttggaggattccaggagatcgagtcgcttgttttgagcttctatgttcttaatgaaatttatttccttgagtttcttctcctcgtcatgtgctttctcaatgatttgctttagatattgttctcgattttccgctgccctttggagtcgtccttgcattttctgacgtttatcttcgataatttgattcttggctgccttgacatcctccacccttgaaaatagctgctgtaacttagctgccttttcctgctgaagcagattccgcttctgctgggctctcgcctgttttgcttgatattttttcagagtttcctgtagggaacgacgcctggacggcgatgataacttctgatgaagctcttgagctcttccagggtgtctggcaacatatgcctgcaaggtggccaaagcctcagctctttcgttccaagacatgtcagaaagcagcgcttggtatcttaactccaagctggcgttctcatcatcgctcatggtcacaaaaacagccgaatcatcgccgctgcccatctccaagccatcaactccgtcgtcctgctcctccagctgaacttcacaatccgtttcatctgtttccgtatccacatcgatctcagtttgttccagctccctgatttgtcgctccagggattcctgaacctctcctaagatcctttcattacgctcttcctcgttgtcatccgtattttgctcttcgttctcatcacaagcactcagggtgctagcattggttttaagacttccacttgggagcttgcagtgggcaatgctctcgtagagttcgcctatggtcttggagaactcgcagttggtttgtatcttaatatcgatcttgctatggtcttcattgcaggctgaaaaatacaaattttttactagatcgtaattagtttaaaacgtgattaagtacatacattccactacggtttccgcggaagaggagctgctgttgtgttgctggttgccctgctccttttgttgtagttttctcagcgcattcttctcactcctcatgtactccttgtgcaaggatgtcattttaagccctgtaagatcagatttctgtcgtttgataatggaattgcgtccaacacaaatactgtggctgctgttacgagtgttacttgaggaagcaattgctgcgggagctgtggtgtcagacttttcctgcttctctggtttcttcacttgattagtgttgcttttctgaacgggaaatgaattaaccttagctttggcatttttgatttctggtcgcgttatgactattgatgtcttcgctttagccttagccacttcgattggagctttagttttagccgatattgttttgacgataactttgccgtcgtcttcgcctttctgcttttctttgtgctcctgctccttttgctgctcgttcaacaacgccaacgtcggcaaactggcatagcctgtgggctgattgaatctgtttgcccaatgcatgctggtccttcttcggttttttacagtcaaccatccatcgtcagcatcagtcggaggttgaatctgttttggttcggaatgttgattctccgccttcaaagtgtttcttgaatttgaaagttgttcattgctagctttcagagtggatgtggaactagttatatcctctctagaacttagtctggaactcattttagttcgtgtggccgtgcttaaaatggaacctggattagttttcttcggtaaagttctagcacttgaattggtgtttcttccatttatttccaacatggttcgggagcgtgccgacaatctagatgccacattgttgggtggaccatagcactcggttttgctggagggcctgggatgtcgctgtaatccacttcttccagttgtttttattgcaggaggagctgtagctgttttggtgctacgtaaaccattgactgtagtcgttaaattcggttttaccagacccggtttggttgatatggtcttctgagctgctactcctccaggtggtggaatcatcttcttcgaaggacgatttagcacactggaatacttaaggggactgttttgaacattgtttcctgataaaggatttaagggttgtggtttcttcaaaatttccgcaagtggtttaatgacagtgcttggcggcgtgggctccttatttgcctgctgattaagtaaggcgttttccatagactccagagaagccacagtcatctctagagcagttgcttctgaagctgcttccattaattcaggttctttgcttaaatccgctacgttatgaattggtagttcgagcgaagatggctcttgtttgtttaagctttccgttgcgtcttcattgtctattggaatggtcacttcttctaaagcctcattttcaattctattttgagcttctctttcctccgcctccatgcgcattttctccctgacatccgccagagttagatgtggatcctccaaatccgtttgggcatactgcgtgctgcgcaacacgaaattagatttgtcgccacttaaatctagaggaccctccatgttatcagattgagatgatccttgagtagctctcttgctggctgcaaaaagttctctgacattcagtcgcattgctccctttggcacttggtcataggcacgcagtaatttcctgggcgaaatctgtccattatcacagaacggtgaggtttctccggattgagtacccggaaacaaggctggactggatttgcccgagttgttggggctgcagagacttctagtccgaactctgggagtgggattgctcttgcgcacttcccaagccaggctttggggacgctgttgtagtggtcgagattcatagtcccacgacactttgaaccattcgcaaagcgccttaaaatctcgcacatagttttcaagcaccaaaatagtctcttggcaactggaaatgttttcatagcactccactgtctgataaatctcattaatagctctctgcaaatttccgaatagcaaggcccagtatctggcctgcagctccgacttcttgtcccttcctgtggaggcgctgcgcacgcgtggcccaccactactgcctccgccgcatcctacactggcagaggatttcagacgtggggaagtgggcgattgacagtttttgggcgtgccgttgggcgacttcggtggcaccatgggtggctttcgatagcctacaaaagatttaagttattaatgggaatttcaaataaaatatcatatttgctaaaagtcgaacactcggtaattgtaacgttttcataaggttatgacatgaggaatacctaaattaaccattttaaaacaaattaagcctactaatttatacaacatacgttatatatattataagcaattttttagacaatagttgccactatcatgtaatgactaagcattttacatgagtctcttcctaaaagtaattttataactaagagaaaaactcctcaagtaccggatattcaatagcaacagttgatggttcttacagtcaccgtttaaaagaacgcctccgcttccaacagctggtccatcgccacctgatcctcctccaacgtcgccgcccgtggatccgaaaccactggtagcaccacttgaggttgtctcatcgcaaaactggtagacgagcagatttttcgcctctctgccctcgcgactcaagacctcacgcatttccattgttggaaagaaaacagaaaaagaccgaaaagcttgttgtttttgctgttgctgcgcagcttatgccggcgtctctgccgcgtcgctgcccacgcagctgttgcagctgttcacgcaacttttggttttgtcctttgtagcaatcggaatcctgatgaactgtttaacgttatagacactccgcgaaaaacactcgctttcactttgattttaattgattatttcgttttttttgttgctcctatttcagacgtcgcttctttgttgtttttatcgcagaattttgcaacgccagtggacttggtagcattttccaaaggcgtaacgagtctaaagaaaccgcgatgtgttcaatcaatgcctgaaagattccccttcactattccagttgtctgctgcttgtcttgtgtcggttagagagaaattagaatttttgatttctgccaaactcagccgagcagagccagctgatttaagcgttgggctgcaattgtgcaatatctgtcattgggtaatcgatagaagctaaactatcgatacgagcgcgcacttaatcgacattataagtaaattcaattgtaagagcaactttttgagtattcaacaaaaaaaacagaaaaaataccaaacacaattatttcacattaacgcttacaaaaactttctataaaaatgcacaataattcttttgtttacaggagaaaagtaaaacagcgaaagagaaaaaaagaactcaaatttgaaatttttggattacaaaattgccttcaaaattggcccttaaccgcaaagctccatccgaaagctcaccgcgggcgagcgagacaacccgagctccggcagagcgggacagttagagggcgagaataatcgcggcgagtcgatgaaccggtctatcggcgctgtgcgcctgttacaattccggtctaaatctaaatgatgctgctcactgctctagttgttcgaatcagaagcgccggcggagcgaaaaagacgaaag

SEQ ID NO: 27602 - DNA, 5397 bp, DROSOPHILA
atggaaatgcgtgaggtcttgagtcgcgagggcagagaggcgaaaaatctgctcgtctaccagttttgcgatgagacaacctcaagtggtgctaccagtggtttcggatccacgggcggcgacgttggaggaggatcaggtggcgatggaccagctgttggaagcggaggcgttcttttaaacggtgactgctatcgaaagccacccatggtgccaccgaagtcgcccaacggcacgcccaaaaactgtcaatcgcccacttccccacgtctgaaatcctctgccagtgtaggatgcggcggaggcagtagtggtgggccacgcgtgcgcagcgcctccacaggaagggacaagaagtcggagctgcaggccagatactgggccttgctattcggaaatttgcagagagctattaatgagatttatcagacagtggagtgctatgaaaacatttccagttgccaagagactattttggtgcttgaaaactatgtgcgagattttaaggcgctttgcgaatggttcaaagtgtcgtgggactatgaatctcgaccactacaacagcgtccccaaagcctggcttgggaagtgcgcaagagcaatcccactcccagagttcggactagaagtctctgcagccccaacaactcgggcaaatccagtccagccttgtttccgggtactcaatccggagaaacctcaccgttctgtgataatggacagatttcgcccaggaaattactgcgtgcctatgaccaagtgccaaagggagcaatgcgactgaatgtcagagaactttttgcagccagcaagagagctactcaaggatcatctcaatctgataacatggagggtcctctagatttaagtggcgacaaatctaatttcgtgttgcgcagcacgcagtatgcccaaacggatttggaggatccacatctaactctggcggatgtcagggagaaaatgcgcatggaggcggaggaaagagaagctcaaaatagaattgaaaatgaggctttagaagaagtgaccattccaatagacaatgaagacgcaacggaaagcttaaacaaacaagagccatcttcgctcgaactaccaattcataacgtagcggatttaagcaaagaacctgaattaatggaagcagcttcagaagcaactgctctagagatgactgtggcttctctggagtctatggaaaacgccttacttaatcagcaggcaaataaggagcccacgccgccaagcactgtcattaaaccacttgcggaaattttgaagaaaccacaacccttaaatcctttatcaggaaacaatgttcaaaacagtccccttaagtattccagtgtgctaaatcgtccttcgaagaagatgattccaccacctggaggagtagcagctcagaagaccatatcaaccaaaccgggtctggtaaaaccgaatttaacgactacagtcaatggtttacgtagcaccaaaacagctacagctcctcctgcaataaaaacaactggaagaagtggattacagcgacatcccaggccctccagcaaaaccgagtgctatggtccacccaacaatgtggcatctagattgtcggcacgctcccgaaccataaacactttgaaggcggagaatcaacattccgaaccaaaacagattcaacctccgactgatgctgacgatggatggttgactgtaaaaaaccgaagaaggaccagcatgcattgggcaaacagattcaatcagcccacaggctatgccagtttgccgacgttggcgttgttgaacgagcagcaaaaggagcaggagcacaaagaaaagcagaaaggcgaagacgacggcaaagttatcgtcaaaacaatatcggctaaaactaaagctccaatcgaagtggctaaggctaaagcgaagacatcaatagtcataacgcgaccagaaatcaaaaatgccaaagctaaggttaattcatttcccgttcagaaaagcaacactaatcaagtgaagaaaccagagaagcaggaaaagtctgacaccacagctcccgcagcaattgcttcctcaaggcttaaaatgacatccttgcacaaggagtacatgaggagtgagaagaatgcgctgagaaaactacaacaaaaggagcagggcaaccagcaacacaacagcagctcctcttccgcggaaaccgtagtggaatcctgcaatgaagaccatagcaagatcgatattaagatacaaaccaactgcgagttctccaagaccataggcgaactctacgagagcattgcccactgcaagctcccaagtggaagtcttaaaaccaatgctagcaccctgagtgcttgtgatgagaacgaagagcaaaatacggatgacaacgaggaagagcgtaatgaaaggatcttaggagaggttcaggaatccctggagcgacaaatcagggagctggaacaaactgagatcgatgtggatacggaaacagatgaaacggattgtgaagttcagctggaggagcaggacgacggagttgatggcttggagatgggcagcggcgatgattcggctgtttttgtgaccatgagcgatgatgagaacgccagcttggagttaagataccaagcgctgctttctgacatgtcttggaacgaaagagctgaggctttggccaccttgcaggcatatgttgccagacaccctggaagagctcaagagcttcatcagaagttatcatcgccgtccaggcgtcgttccctacaggaaactctgaaaaaatatcaagcaaaacaggcgagagcccagcagaagcggaatctgcttcagcaggaaaaggcagctaagttacagcagctattttcaagggtggaggatgtcaaggcagccaagaatcaaattatcgaagataaacgtcagaaaatgcaaggacgactccaaagggcagcggaaaatcgagaacaatatctaaagcaaatcattgagaaagcacatgacgaggagaagaaactcaaggaaataaatttcattaagaacatagaagctcaaaacaagcgactcgatctcctggaatcctccaaggaaacagagggtagactgcaagacctagagcaggaaaggcaaaagagggtggaggaaaaattggccaaggaagccgctgtcgaaagacgacgacaagccctagaaaaagaacgtttgctcaagctcgagaagatgaatgaaacgcgcctggagaaggagcagagaattggtaagatgcaggagcagaaggagaaacagcgacaggctctggcgagagaaaaggccagggatcgagaggagagacttctagccctacaagtccaacaacaacagacgacggaggagctgcagcgaaagattctccaaaaacaaatggaatccgctcgacgtcacgaggagaacatcgaacacatccggcaaagagctctggagctgactattcccaccagacaggcggacgagggacgtggcgatcaggacgtgtccgaggacatcttgaatggaaacgcaacaagcaccaccaatgaggattgtgacttatcctcttctctttccgaggtggggggcaacaacgctcacacgaggagctacaagaagaagatgaaaaaacttaagcagaggatgaatcagtgcgctgccgagtatttggaaagtttggaggccttgcccgcacacgcaagaagagatagtacagttcccaagctgctaaatctggtggtcaagggtggaggtgcccaaggactggatagaaacctaggcaaccttttgcgtgtcatacccaaagctcagaccttagattttctagcttttctctgcatggatggcttgggcatactggccaaccacgtgattagcaagggcatggatgaaaactcagagatctcccggaagtccgtctatttggccgcgcagctgtaccggaatgcctgttccgtgtgtcctcagattgctcgtcacgctcttctgggcaattccataaccgttctgttcgatgccatcaacaagagtttccaggtaatcctcaaaagcaaccgctgcacaaaagaaactttctcgaacttttggccacccaaaatgctccacaataaaagtgtcgccaggcagtcgtctcgcctcgaggcgttgtccttacccgaagaaaaatcaccacaacatccggtcgagttgtccacggagctaatgctggcctgcacggaggcgctgtcctcgagttacgtgaaaaagaacacccacccaaaagttccggaacgcctgccggacatgataaacgactgccgtttccactggcaggatgtcaacaaggaggacatgctggcagacgaattcaggaaatataagtgctacgaaaaaaatcccgtcatcgcgctgccccacccatctctttcggcaagcttatgccgctctctttctgccacgccgttgaaaatcaatttgcatcaatttctgggctcgggcatcctcattctccgactgaatcatcatcgtcatccggcgactggtgcaagttttagtgacagctgctgcacgtgctgccctaaattgaccaccgaagctgccgtggcagccgtggcagcgcatcagcatcagcatcagaatcagcaacagcagccagactatgctgtgattacgggcttgatcgaaatcctttcccgtcgcattcagaaggtgcgggagtccatcgagagcaacaagagtgtgatgctgagtctgctgaccactttgggcttcctgtcccgcttcattgatgtttgccagccgggtcctgccgatccgacacgtctgctgagcgcggccaagtccactgagctctttggaaccgtttcgatgctctatggctgcgtgatgccaatgggtgaatgcattccaccacgcacgaccgccctggcggcatcgacttttcatctctacgtgtccctggcctccttggatgtgaacaccttccaggagaccctaactgtggagggtcctttgtcgctgaagctgttggacgtgatgaccgtcatcctgaactgcagtttagtgaatgaccaatggacaacgaacagcgagagctgcccaatgctgattgaccttgtcgcctcgatggcctttttctgcgttaacaatcgcagacatcaggacctgctgatatctgagcagtatgccgtgatcttcaagaggatggccaagctgcccacccagtttaaccctgtgatttatcccttcctggtcacggtttccttcaacaatccgccagccagagagttcctcagcaaggacttcgatttgacgttcctagatgagtacagcaaatcggagatggcccaaaggaatgtggtcattaaactgataaacagccgcaccaaagacaaaatcagcgccggtaataagaaaaatgcgtag

SEQ ID NO: 27603 - protein, 1798 aa, DROSOPHILA
MEMREVLSREGREAKNLLVYQFCDETTSSGATSGFGSTGGDVGGGSGGDGPAVGSGGVLLNGDCYRKPPMVPPKSPNGTPKNCQSPTSPRLKSSASVGCGGGSSGGPRVRSASTGRDKKSELQARYWALLFGNLQRAINEIYQTVECYENISSCQETILVLENYVRDFKALCEWFKVSWDYESRPLQQRPQSLAWEVRKSNPTPRVRTRSLCSPNNSGKSSPALFPGTQSGETSPFCDNGQISPRKLLRAYDQVPKGAMRLNVRELFAASKRATQGSSQSDNMEGPLDLSGDKSNFVLRSTQYAQTDLEDPHLTLADVREKMRMEAEEREAQNRIENEALEEVTIPIDNEDATESLNKQEPSSLELPIHNVADLSKEPELMEAASEATALEMTVASLESMENALLNQQANKEPTPPSTVIKPLAEILKKPQPLNPLSGNNVQNSPLKYSSVLNRPSKKMIPPPGGVAAQKTISTKPGLVKPNLTTTVNGLRSTKTATAPPAIKTTGRSGLQRHPRPSSKTECYGPPNNVASRLSARSRTINTLKAENQHSEPKQIQPPTDADDGWLTVKNRRRTSMHWANRFNQPTGYASLPTLALLNEQQKEQEHKEKQKGEDDGKVIVKTISAKTKAPIEVAKAKAKTSIVITRPEIKNAKAKVNSFPVQKSNTNQVKKPEKQEKSDTTAPAAIASSRLKMTSLHKEYMRSEKNALRKLQQKEQGNQQHNSSSSSAETVVESCNEDHSKIDIKIQTNCEFSKTIGELYESIAHCKLPSGSLKTNASTLSACDENEEQNTDDNEEERNERILGEVQESLERQIRELEQTEIDVDTETDETDCEVQLEEQDDGVDGLEMGSGDDSAVFVTMSDDENASLELRYQALLSDMSWNERAEALATLQAYVARHPGRAQELHQKLSSPSRRRSLQETLKKYQAKQARAQQKRNLLQQEKAAKLQQLFSRVEDVKAAKNQIIEDKRQKMQGRLQRAAENREQYLKQIIEKAHDEEKKLKEINFIKNIEAQNKRLDLLESSKETEGRLQDLEQERQKRVEEKLAKEAAVERRRQALEKERLLKLEKMNETRLEKEQRIGKMQEQKEKQRQALAREKARDREERLLALQVQQQQTTEELQRKILQKQMESARRHEENIEHIRQRALELTIPTRQADEGRGDQDVSEDILNGNATSTTNEDCDLSSSLSEVGGNNAHTRSYKKKMKKLKQRMNQCAAEYLESLEALPAHARRDSTVPKLLNLVVKGGGAQGLDRNLGNLLRVIPKAQTLDFLAFLCMDGLGILANHVISKGMDENSEISRKSVYLAAQLYRNACSVCPQIARHALLGNSITVLFDAINKSFQVILKSNRCTKETFSNFWPPKMLHNKSVARQSSRLEALSLPEEKSPQHPVELSTELMLACTEALSSSYVKKNTHPKVPERLPDMINDCRFHWQDVNKEDMLADEFRKYKCYEKNPVIALPHPSLSASLCRSLSATPLKINLHQFLGSGILILRLNHHRHPATGASFSDSCCTCCPKLTTEAAVAAVAAHQHQHQNQQQQPDYAVITGLIEILSRRIQKVRESIESNKSVMLSLLTTLGFLSRFIDVCQPGPADPTRLLSAAKSTELFGTVSMLYGCVMPMGECIPPRTTALAASTFHLYVSLASLDVNTFQETLTVEGPLSLKLLDVMTVILNCSLVNDQWTTNSESCPMLIDLVASMAFFCVNNRRHQDLLISEQYAVIFKRMAKLPTQFNPVIYPFLVTVSFNNPPAREFLSKDFDLTFLDEYSKSEMAQRNVVIKLINSRTKDKISAGNKKNA

SEQ ID NO: 27604 - DNA, 19548 bp, DROSOPHILA
cggtattatgtatattattttacggccccgataatttttttggcaatgcgacttctgcgggcgcgtcgaattcgctcggaatattcaaaacaaatggcacaagtagtcgacggacgaacggagaagaaaaggcgacgaatgtgcgtggaagacgacggtgataaacgagagaacgcgacttcagctgcggcagagcatgcagtgtgactgtgcgaacgaaataccagcgcactaggatccccaaaaacccgatgcgtggaaaactttactagcgatagcagtgttccaaaccttttcaccaagccaatcttattttaaaactttatcaaaacatttgaacgaagctatatggaagttcaaaaaaaaaatggaagtattcagtttctttttggaacgcatcatacaaaattttttctcctgtacctattacctataccacttgcctacacttttatttcatttctacaagcactcaaatatgaagttctttctttaaggaacgtttgatcttttctacatattactacatttacatatgaatgaaagacaataaaatgttattgtattctgagaaacacacttctcttattttcgtttatttcaataagcaagattttaaacacaatcacagctgagaaacacattgtagcctatattaatttgtatttatatcttaattttctaactaaacaaaattatgaaatacctaaatatatatgttgaagtacaagactacaaagctttaagcatttcccttttttgaacttatattatattgaccgcaattgtaactgctgccttggatgcgataacgtggaatcgaatgtaatcgaaatcgaaatgaaatatcagctctgaagaccacccacgtcatatcgatgtccactgcccgatagacgccgcacacaaaccgagttgggatttcgttgtaattgctggtcatttttcacggctgtgcgactaattaaatttaacaagagagccttaataaataagtgctaaagaccagacgcagcgcgcagtaattcaaatcatctagaagatctcgtaaaacaaaatgtaaagtcctggcgtggggttgatcataacgcatacatatacccatgtgtacgtgtgtgtttccattgtaatctaaagcacgagtgaatttacgtgcgttaaatttaaacgaaaatttaaaaaaatatttcgagatattgcaacaaaggcagtattaaatcgatttctggtgcatgtgcttgtgtgcagaatgtttgcatgtgtttgttgcaaatgtaagaagaagtagccactcacgcgctactctcttcctttctctctctctccgccccctccccattagctctacaagcagctgaaagttgtagccgcactacattcaaaagtttccaaaagtctgcttgctggcagtagtaagaaataaagacttaaaaacaaaaacatcacttagtaatatcaggtatgtatagaaaaataaaagtgcgcgctcttgtgagcatgtcgagtgtttgtgtgtgtgtgtgtgtgtgagtgagtgggtgcacagaataagttcgtacctaacctcaatttcccccaactgattacgctaggcggcaccacaacttccagtggtattaatcattttaaaataatgcatttgctgcctttttcctattaaatattttccttgggggataggatattaagttttcaagctgaatcttggattaaaattttgcggttgtgtatatttatggaaattgctcttatcgccgttttgtatatgtacattaaaaacaaggttccgccatctgttggcacgtgtacttgtgtggctgaacatatttaattatctttgctttgataaaataaacttaaaaaaaaagaaagaagtgcctcagaaaataaataaaaataagaaagcaaggtattgagaacagcaacaacaatgacgcagtcacgcacaccacgaaggcaataaagcagctatgtgtgtggctgtctgaaagaggcagagcgcgtttgccgcgctcaccttttgttattgttgcgttcaatcgctctagaactgccaacttgttaggatgttgaaattttatgccagaataactttgtacgcaaaaccattcttttttcatagttatttcttgttttgtataaaaaaatggaaaatttatttaatgtgaaaaaggttaataaaaattatgcagtcaaaaataatacaaaaaataccgcatcaataaatattgaaataatttttttaaactcaaatttcgcttttaaaatcagttggcagctcaatgtacccttttggtgctcgcgtatgtgtgattgtgcacaaggtgagcgagacagcagtttcagccttcaatttgcgggtttacgttgattctaattaaataattcgttgaaatcgggctcactgcttctgtgaggtccaattgtaatgcacacacacaaacacgttctcagtgctttcctcaaattttctttgtgaagcgcctcaagtttcgactggcttttaagtctggtttggttttggctgtttgaaaacttgaaaaacaagttacttctgaactcaaactccccagttttggcagtctctccacacttctctcgatctttctcccgagaaaaaaaaaacacttgccgcgtcgccaaccaattgtttgcaattcgcaattgtattttagccagaggccaacgaacaagtctcttgaacttgatggtcggaacgaagttgaagtgtattagacgttgaacacttttacacatatttagttgtaactttttcaagccttcatcattatattattaaaacttgagtgttaaactgtatgtttaaatatactatgttatcatttcaataagtattgaattagtaaacaacactgaagccgttgtgttcaatcgtgtaagcctattcccaaatttataatcgttattttaatttaaaaaccttttaattgctcttaattttgatccaacacgcattttggctcaccggtaaatttgtgtataatcttttacataaagaagagggttctctaatccttaaatggatttatagttttgatgagaattaatactaaagttaaatattttatagtaaagttttccatttactgtgttgtcaattttttaggacaaacaaacaataaataacaaaaagtttttatcacattaaatatcatgtgactcaagagagttaaaaacatctgataatttgcagaacacgtacgaatatcaaactaattagttttttttatagaaatgggtccgtgtgacaggaacctctttaccacatttcagatatcacttgatcagcgtcagttaatatttcctagtgccgcattccatgacagatctgaaattagcacaggaataattagaacatgctagaccacctggctttattatcaatagaaaaaagcatcaataatacccaatgggagggcaaacaaaccttcctgcggcgcctggaagtcggagagtttggtttgtgccatttttttgtttggtccagggactttggtgcacctcggacatgcgctgcacccagtagctagttagttgcatgtgaactttgaactttcgagctggaaagtggaaggcggatttgcatttcctatcgctgcaggtgtctcacaaagagagaggctctctcgtatcctccgcccccgctgcatttttttcattgcgcaatgagcgagacgaatcgataactgcaaggtttccatgttttagcagctcaacttttgcgcgtatacagattttttgtctgtattattttattttgtgaaggagctggccgccgaattcagttcgattcgagatgggaacatgtgtttttatggttccgccattgtcatggtgagatgcacttgcttttttttgtcttcatatttttacttcctctctccgcacgcacgcgtctgtgtgtgagtgcgctggcgagtgaggtggtggaggagtacatgagtgtgtaaagtgtagccgtggcagagttgtagctcgctagtggtccgtttggtttctgattttcggtttcgtcgatttcacatatgtactgcaatggtcggctaaaacgctctgccgacgtcgctatctgctgtatactcgttgcgcttgtgtgggtgcgctgctctcacacccgctctctctctttggctcaaacagggtgtcttacccagatgttctgatcatcgtttccaccacatggctgggtgacaatggtacaccctgttttctaaacaacttgttttctctcttcccagcgttgttgttggtcctcgcacttacgtaagcctcacgtatttcgtttcttatccaaattctaagcgccattttgcgactatttgcatgcggtaccgctcaccgctaataaaaataaccactgattgtgattatttgctaataggtaatgaatggtatataaactatttttgccgtcagctactgatgtgttttcaacgcgctcgacggaggattttagttgttgcgccgttgagttgccaccctgttttagctgcggcagcagaataaaatgaattccaaagcaacactgcgcgcgcgctctcacgctctccgttttacactcatttcgctctctctgctgactccaaatgactggccgtcgcgtttcgctgttttaatcgaaaatgtttgcggcggcgttgagatgtacgaaaacgttctctcgccaaaaatttgtgaatagaatagcagtagcaatctatcgagaagaaaatgtcttaaattcgagccgtgtgatctagttaaggtcttagagccaagtgcaaattgattgaaataagcgttaaacttaaactgaactggagaacgaagccccagctactgaaagaaaagaaaacggtgaaaataaagatttcggtgtgccagtgagtgcgaatatagtagttgcatgtgcaaaatactgcgtaaaacgtgaaagtttccaataacaccacaaaaccaacggcagttttgtagtaaatatacatacgcgccccgtacatatatacatacatttcgaatatacatacacacagccgaatatcaaccgacgaagctaactgcttattgctgatgtaagtgtaatatgggcggtgggcggttgtggggggcgtgaaaattgcagagtagcattatccttcaagtgcacttggagtgcggattcgagttcaaacaatattttcgttcgtgccactgaaaacttgtgaaaatacaacatttttaggttaggtcaatttcaattggtttatatacacacgcacgcacaaactcacacacacacaaacaacaatggcatagcgaatacatatagaaggcgcacagacaaaaagtcgtcgacggggacgtggttgttgtttgtgttgctgctgctgctgcctctacagtttctgctctcctcacacacagttgaacacagttgtggagaggagagccacactcatacatacgctttgaaccattgcttttggttcgcttatgaactgactgtattttttcaacgtagtgtcgttttattttcgttgttgattcgttctttgctcagttcgtgcgcttatcttgacttttgctttgatgcgccattcgcatgtactggcgagagcagcctagtgtgagtgtgcatttaaatggctccccaatgagagcatcattttgtggccctctttttgttcagatcttccttttgctcctcttcttcatgctccccagcccatccgtcgtttgttgttcttgctccgcctgttttttttcattcggttttgaatttacacaaaacgtttgccgttgcttcttcatgctgaaatagtatatatgtatgtgaatatattgtacatatttctctacacatccatatgttttatttgcaaaatttattaatagcgcagcgccactccgcggctgtgttagtgcgccagagtgagaaagtaacagtaaaaaactaaatattaattcgcgttgattccgattcgtattgcagttgttcaaaaccgagtgctagtgatatttgcaaaaaatttaacatattttccgctggctgccttttgtgttgcgtattctgctgtgctgtgtatacacataacaaaacagataagataacattatacgtgtgcacgtaatagagcgggctgaatcaaaaaaaaaaaaaaagaaaaaatggagggaaaatttgcccacatgtctccccaaagcacacacacgcacacaacgccccaatttggagcctctctcgtcaaacactcacacacaccagcaagcgagtaaatgtgtttggtatgcactaatggcggatccaaaaatacaataacaacaaagacagttgggagagctcaaaagagcgaacttgttttaccttcatttattaaaggatagttggtggtggcagagacaggagagagaacgagggctaaagcttttgtgcggctgtactgtgctccaatatttgtttacaaatgctaaaagggggcagctgttggttcgatggggtgtttcaattagttggagcaggatgatcctctaggcggtttccattcacctaatatttgctcgcggtctttggtttgcgcagcgttgcgctctcttcatttttgccgctctctctctcgaatgcccgccaaatgcttgctgtgtccgtgtgtgagtttggccccaaacgggtgaaatacctttttgaaaaaaaaaaaatcatccatatactgcgcctcaacaacaaatgcggctctctctggttctctctgtggctgcaccaccaccaccgtatcgccaccaccacctttgcattgttgcgtttgctgctgctgttacctctgactcttcttcttcttattcttgtaagttgtagatacagaacatgtaccagcagctctcacacaccacccgcccgcccccttggcggtatcgatatataaatattttctatgtgtgcgtctgaattctatgcaagccgatgtcgtgcatggggcatttggcaccttccacattcacaaatactgatatgtacacacatacacacacactcggaggtgtacacagaaagctcgcttaggaagtttttactgtaccgctgaaagcaataacaaagcgcgcgcccaattccggttgaacgtacacacactaaagtgaattacgcgctcctccttatgccttgcactcactctcctccaagactcaacttccactccacgatctccttcccgtctatatgtatcaatctctggttgctgttgttgttattggtcacagctccactgcttcattccattcctattgtccctcatctcactcttctcccccgaatccagaacacccaatacagagacaccgttctccactctgtagtttttgtgatacggctaaaagaagaattcccccgtggctttttagttcaccttttttcttgttgaaatatgcaatcgttccgatatctgtgaagatatagaccgaattgatcaatcagctgtgctatactagctaacatgttttgggaaaattagcaagactcgtggtctttaatatatggaaaagtatatttggcatatttgtcctttcatttcagtgtcagtgaataaattctagtattaatgtgtaagattgttccagtaatgcagaatttaatgatgactaacttcattaaaaatagacccaaacctaattcttgggggtttttatacatttaatgtcgacattattgtatgaccgtttcccttctcttgctttgcttgcagtgatattcagaaagaactccaaacgctacgtggcagaggcgaatcaccggcgcagcaacaccagcagcagataaccagccgtcagtccaatttctctaccttagaactcgagcgcatttgccgcttgcggggcgaccaaatgcatagacaacatatgtcgcattcacgagcagtccaagatcaagagttgcgaccccgaccgtttgttgcatattacatacgctcatagagggcggccactcacctagagcagccagagtccttgcacttgggcagggatccagggagcaacaaagtgcttagaaagaagaagcagcagcacaggattatacgctccgccgaggacagagcaacaaaaaagatgatgaaacgcactcgcgtagacgaggtgcaatttggcacacgacccgttcctcagacctccggaggtgtgggcgttggtgtcgtcggcgtaactggaggtgggccaacatccggcggcggtggcactgctactgtgggcgtcaatacgacgggcgttaccattggtaccgtcgtgcccagtgctcataacgccaccatcagcgggatcggttccattcaccatcgcatccttactccacagcatggaggagcacaaaccattgcctatttgccgtccaccacgccgacggctacgaatttgaagaccacaacctcgattgtggatagcactaccgctggaggaccagtaggagcaggagcacaggtggccgtaggagttggctctgcagccggcggaggaggcgtggtggtctccacagggagcacgggaacgcaaacattacagtatacaacatgtaagtaatctatttcaaactctgatgaaatacgtttgacattcaaatgatttattttcttgatcatatagcttatagtgtggcttcgatacaggctggtggaactctgaaagccaacacagcggatggcgcgaacacggtacagattcatgtcacaggaggaggagctgcaaacaatcctgccagtgcacagactgtttccagcagctcacaaacgggcacaatccgtcagcgtacaatcagcggcacccagacagtggccactgcagtgggtaatctagccacgatttcccagcaacaaccggttcaacaatcacctttgggcaaggcccaaacgcctccatcgtccgtggttgccaacagtatcccagtgggtggaaccaccccaccacaaggacagtcgggaaatgccacgccacgcttaaaagtggaggatgcgttgagctacctggaccaagtaaagtaccagtatgcagaccagccgcaaatctacaacaacttcctcgacataatgaaggaattcaagtcgcactgcatcgacacacccggagtgattgagcgagtctccacactcttcaaggggcacacagagctgatatacggcttcaacatgttcttaccgccgggttacaagatcgaaattcattcggatgctcttggctgttcggtgccggtggtttcgatgccctcaccaccgggagcgccaacgagcacaggaacggtgcatatgctcaccggaaatagttcgatgtccggtgccggacatatcgccatcaagacgaccaatgctgcgactttaacaccggcagcaggggctggagcagcggccgcagcagcagctgtggctcagattcaatccgctggagctgtaaatctaatgacccacggcggagcctcgcttacccagaccactattcatgcattgcaacaggcgacgcctcctcaatcacaatctccaggcggaggtcatgtccacgtgagtgtaacaaactctacggcagcaaacgccgtagtgcccggacagccaggcatctccgtatcggcgcacaatgtaccgcagaactactcgagagatcgagaaagggccaccataacacctactgggcaagtggctggagcagcggcaaacgtgaatgcgtctgctagtatagttgtcggtggacctccaacgcccaattctctaagtgagcttagccctcatggaggagcaggaggtgggccaggtgcgggagcggcgcagcacaatctgcatcacatccagcaggcgcatcaatcgattttgcttggggagacgggacagcagaatcagccggtggagttcaatcacgccataacctatgtaaataagatcaaggtaacgtctactcaacatcattcaaaactatgtaggttacttataatcttttcttcttttttcacgaacagaatcgtttccaaaaccagccggccaagtacaagaaattcctcgaaattctgcacgattatcagagggagcaaaaggtgatgaaggagggcagcctgaaccagggtaaaatgctcaccgagcaggaggtatacacgcaggtggctaagctttttggccaggatgaggatttgcttagagagtttggccagtttcttcctgatgccaccaaccaccagtccgggcagtacatgtccaagtcagcgtctgtgcacaatgaccatggcaagcgtcccacggctactttaagcggtggagctcacataaccatgtcatctgcttcgccagcgccaagtggatcccctctgcatttgggtgcaacgactcttccgcagatcgacaaaagcgcccatgcagcggccataggaaacctttcggcggtgaacactagtgtcagcattaagacgtacaataataatcagcaacagcagaatcatgtgatcggttcagggctgaatgcgacgcggaacgatattctctttgagaaggactatcacgcgggtctgcagcagcaagcgcatcagcgaggagctggagttggaggccatcatcatttggccgggactgcagcgggcgccaatatcggacggcctggagtgggagccagcgtgatggtgtcgtacgataaagagcatcgaaataatcatcatgtacaaaagtacgttggccacgcgccaaaccagaatctaacgcatggtcataacgcaaagaaatcaccaagttatggcattccttcggtgattggttccatgccgcacatttcggacaattcgctcgaccgcagttcaccgggaattagttacgccacgccaccattgccctctggtccacatggacagcataactctggttcagctacgaggaggccgggtgatgacagtttagtcggacactatgctagtggagcgccgcctgctaagcgaccgaagccttattgtcgtgatgtcagcttttccgaagcatcgagcaagtgcaccatctccgacgccgcgttctttgacaaggtgcgaaaggcgttgagaagtccagaggtctacgacaacttcctgcgatgcctgaccctttttaaccaggaaattgtctccaaaacggaacttcttggtctggtatcaccgttcttgatgaagttccccgacctgctgagatggttcaccgactttctgggaccgccctctggtcaacctgctggaggattgattgacggcatgcccttagccgcaacgcaacgtcagggaggtggaagcagtaatagttcccatgatcgaggtaccagtcaccagagtgccgccgagtatgtccaggatgtggatctgtcttcttgcaagcggctgggtgcatcctattgtgctttgccgcagtccacagtacctaagaagtgcagcggacggacggctctctgccgggaagtgctcaacgacaaatgggtatcgttcccgacgtgggccagcgaggactccacttttgttacatcgcgaaaaactcagttcgaggagacaatttacaggtaagaaatattcctttaaccttttcacttaacagttccactttaaataagtcacgagtaaaatcaatactacttctttattggtacttttgtttcctttccgttttcatttgagtctaatatgtgcggttaaccttttaagaaatttgtttttaaaaaacaaaaaaattgtaattcttcatttgttacaaaagaaaaatttgttccatgtttttttttttttgtaaccgcatatattttatactctcaacttacacatctgtcgtttgttttggatcttctgtttctttggctttcgtttatttcaattaaccaatgcgcacgctctaaacaaaaggaatattcacagaacggaggacgagcgattcgagctggacctggtcatcgaggttaatagtgccacgattcgagtgctggagaacttacagaagaaaatgtcacgaatgtccaccgaggaattgagcaaattccatctggacgatcatctgggcggcacatctcaaacgatacaccagcgggccattcatcgcatctacggcgacaagtcgggagagataatcacgggaatgaagaaaaatccgtttgtggcggtgcctattgtactgaagcgactgaaagtcaaggaggaggagtggcgagaagcgcaaaaggtaagtgaactctctcattgctttacatttatgtaaattaaatgaacccttcttttttcagaccttcaataagcaatggcgggaacagaacgagaagtactacctcaagtctctcgatcaccaggccatcaactttaagcccaacgacatgaaagccctgcgctcaaagagtctgtttaacgaaatcgagacgctgtacgatgagcggcacgaccaagaggacgacgccatggaaccgtttgggccgcatctggtgctgccgtacaaggataaaaccattctggacgatgccgccaacctgctgattcatcatgtgaagcgtcagactggcatccagaagcaggagaagcaaaagattaagcagatcatccgacaatttgtgcctgaccttttcttcgcgccgcgacagccactaagcgatgacgaacgcgatgacggtaagttctcgtggtcaaaattcctaaaaccatcatcagttcactgtcaattaacctccaacatatttaatttttcggttgcgctaacactattctttaatttagtagcttctaaaactaactaatattttcaagatctctttaagagttgacttaaaactcatcatcatcagtactcatactaacaatatttatattcatttttttttattaaggagtagtgctttgtgattttgaaacgttaactagtcatgtaaaaaaatttacttctcgatagaaatttgcatgactatttttctttcaatacataaagtttctccctaataacttttgcccgattgtattttttaacatagtgtatgttttttgtttctttttctccattttttttttgcaattaataacaaaaacaacataaacaaataaaaacaaaattttgtaacgtaatcaaaatgctattaaataaaataaaaccaaaactggactgcaatgcaccaacacccacacactgacccctgaactgcatcgaatatccgaacatatgtgttgtgcacaccgtttctctatatagcctttccatttttggtagatgacaatacgaaaatggacgtggactcgccactgggtcgcacggagtcttcgactcgaaatgccaagagtacgcccagtgaaagtgcctctccggcgcgtagcaatgcaagcactagcagcgtaacaccagcgggaattaagaaagagactgatgactcgaaagcgacgacaggatcttttgcaccagcgtcctcggcaacggcatcttcagcgacgcctgtggacgatgctacgccatcaacatcctcagcagcggcggcagcatcagcggcatcgtcatcaactgtttcaggaaccgaaggcaagccaaaggatgaccccctatcgtcgcacaaggaagaaggagccggtagcaccagctctggagttgccacgagtcccaggcaagcccaagacactgcaggagcaggcgtcgatgtggaaatcaaactggaacatcctgcggacttttccaatccaaagcttctaccgccgcacgcgcacgggcaacgcgaagtacgttaaacaacgcttttaaatataatatgtattaaatatgggttttttatcataaacaggacgaatcctacacgctgttcttcgctaacaacaattggtatttattcctgcggctacatgcgattctctgcgaccgtctgcatgttatgtatgaaagagcgcgtttgctggccatcgaggaggagcgctgtagggtgaatcgaagggagagcacagccacggcgctgcggctaaagcccaaaccggagattcaagttgaagactactaccccaccttccttgatatgctcaagaacgtcctagacggcaacatggactcgaatacgttcgaggacacgatgcgtgaaatgtttggcatttatgcctacatctctttcacgctggataaggtgagtgttaaaattttattcaaaaagttgatatctattttttctaaaaacctttccttttgaatataataaactaaacttttcgcatttgttcatcttcaggttgtctccaatgctgttcgccagctgcaatattgtgtcacagaacgagccgcactggattgtgtagagctgtttgcaacggagcaaaggcgtggctgcaccggaggattctgtcgagatgcgcacaagacatttgacagggagatgtcgtatcagcggaaagctgagagcattctcaacgaggagaattgcttcaaagtgtacattgtaagttttagaatgcagcaccgttaaagaaattaactaacaaaaactacatttgcagtacaaaatcgattgccgtgtaaccatagagctgcttgattcggagcccgaggaagtcgataagccggctgcgttgaaggcccagaagttcagcaagtatgtagagcggttggcgaatcctgcgctcggcggtggtggcaatactggccgctccgattcggcgctcggcaatgacagcgttgtagatgggtccgatatcaagacggaggcggacgaagatactgccgaggtaagtgtcataaggcagcgatgagatgctccggagccggagcagctatgtgtggtgtgtgcttgaagagtggttaaccatgttgtttgtgtatttcgttgttcatttcgattatgtttacgtttacgtttttgattccctgttctactcatgagttgtgttttcggtacttccactgtacatacaaacctgtcacctgatttagacgatggacaagacattccacatcctaccgtactatattctgtatatacatatatatatataaatatatcttagttttctgttatctatctgttgttacctatcgacttttttcactgcactttctattatttaaatcccttagtttcgccagcttgtaactttatttctattattgtatgttttcgttttggtatcatttatcaacatgccgccaacttattaatcgcccacatttcgtatgcatacaaaagaatacgctgcttgcatacgagcaaagaaagtacataaaaaaggacaagaaaatattcactaattaatgcttttttgcattcttttctctcattttttccaatttattttttcgtaccaggtcaataccaaggcttgaaataacatagttttgataatttcattgaataagaagaagaaaaagtcatattgcaaaatgaaatagtaataaatgaatttgttttttgattaccaaaaccggaataagagaaattgaaacaccaaaccctttcacccaccaccaccaccaccaccaccactactactactactactactactaccacgctcaacacccaccaccgccacccactcacacacattaaatgtaatgcattattttctcagagacaccaaacaataacctgcagaaccaacgaagaaacagaacccaaagtacacactttaattaaatgtagtattccatccacgaacatgaacatgcataaaaaccgacattatgtaaaatagtagatgatgataacaataacgtaggcacgcgcttgttgcattcccttctgatttcgttatgccttgagttacccaagagttatctatagcgatatagacagtttcatatatcgggtgatcgaagatccggcacctaggatgtgatgatgtgaggttgaacatgaagatgaagatgatgcatacaaagatggtaatggtgttgtggattggggtgtggtgtgtgtgagtggtgcttctgatgttaataagactattgcgtttaactataggcctaaattacacctcacacaattgtatatagtaattaacgtgttttaactgtacataacgtaatgctaatgctaatggtaatcggtcaatgtatgtattattatgtgtaaaacgtgtagtagctaattttgtaaaggaagcagacaaatgtcttttaaattcggtaaacatttttatatctaggcataagaaaacacacacacaccactccacacactcaataattgtaaattaaatagcacacacaatcacaacagtggacattactggagagtgaaaatgagaaatatatctggagcagcccattaaaaatacatgttcaaagttattgaaacagtgggaatgggatggtcttgagggggtttgggggttttcctttttccgggctagagccacaatcgaactcagtaattgccacacagacttaagtttaagcaaggtaagtcatcatcgcattgttcaactctttgtttcacttagattaagcttaatatttgttatatttattttctttgtgttttgattgtatttgtagttgtgattgattttgtttcgttccgactttcaccctgtattttatgtcctttggtttgtgtttgtcccattgtgcgtgtgagtctatgtcttcggctttgtgtttgttggcctggtacctccatcctcttgtgttctttatatctttacaatacccttaatatagttaatatctgtaaactgttccgtaacgctacaatacacagcccacacatctcagcattcccagctttaagtattctcgtatattctgtgagcatgtcgaattgccgccggatttcaagtgctcttcttggctgcattgtcgccggcaattgtcgcaattactcacaataaagactaactttgcattgcttttattccagttgcgctacagagaaggtggaatcggaggagcaggcaaggcgcgctttttggtgcgcaacaagcggagatcaaagctgcttgaggagcaagtgcgtcagttgtttgaacataggcggaatcggattgagcagcatggtactgcggcctcacttgaacccatctccgttgacagtgccatttcaagcaacagcaccaccggcggtggcggcagcggcactaataacaacaataataataataataataacaacagctggggcggcaaacgtctggagaggctgggcgccccacaggtgggcttggccgagcaatacgcctttaatgatcgcgacgagatcagcacaaatatcagcaacgggcgatgttttgtgaccagcaagaatctcaagctacttaagtacgatgcagtgcgtcgtgccaagaaggtgagtgttttatttaaacgcagtatttggataaaaacatacttacgaatttgtttatttctctgcagagtcattgccgcgtaactcaggcgaaatacgctcacttccaaacgtacgttaacaagtggcttcagcaacatgtcagcgagcaacagcagcagaactgcgtcgactggctgctgggcaagacggcagaccaaatcaatgccagcggctggggatccgccagcaaaaccaagacggtacagcagaaggatacttcgaagacaccgtatcgcatctacaacagatacagagtggtgcagagtgcagtaagcggcggtttgatgagtgccactgctccaactccagatggttcagttccggcggtcaattccgcgccatcaggctcagtttcaacggtgaacaatgtacagggctcggcggcagtatcctcaacttcccactcgatgtgcaacagtagcattttgtccgcggactccaccaccaataccaatgcgtcagcacagcagcagcagcattgcaacagtgcagcagctgcaacaacaccgaatgcagaggcactgcaacaggtgcgacccatggagagctaaccgacgggaatgggagcaacaacggcagtggtcgctgcatggccagattcttcattcacatgacgacaatgagaagatgtgggatgaattgcctgcattgaaataaatagtgttttaaatgtgataccagttcctcgacgcggtcatcgagattgcagctataccaacgcgcgatcgactgtttaatgtccggcatggcattgggctctggaaattgattgatgaacgaaggaaagctctttttcatattgtacaaaaagtcatttaatcttaggcgaaagtgctcctaaataagaattttatagtcttacgttgcataaattttagaattaattttacgacggcagcgtcctgttttattgatgcgcttttagaattaagatataaagtttatacgcctagagccacatacaccttaaacacaatcgcaagaccacaatttaagtcacggatatttttaacgattttgcactagaaaccgatcgagacagttgtgctagtaactaggaaccagaacacgtctgtttagtgttttaagattttttaaaaccaagctcttttactttatcataagtgtaacgtatttttaatacaaaacaaacaaaacacccacatacaaaccgtgtacaattccttgtgaatactattgtttatatattttacgcgtttaaggttattaagttaaattgtaaaaatgtattgcgcagatattaaaacaaaagtttatcaaaagtgaatggaaaatatttaattgattagacccacttttggcattcgataaattttcgtaaaagtgcatttaatgcaaagttacttgtaaataaaatcccttctcgttataatgccagcaatgcgattctcatggttgatgaccagcaaatgacgcaaccccaatgcgcggaatatctgaaaaattctaggcaccgaatcgtgctaagaaacaattggataatcaaacagtgcttggagaaatttcaaaaaatgtaacattactcaccggattgactcgaataggtgatggattcataaacatggacaagtccacagtgtaattgattttctcatctagcttgcgaacactctgaaataggaaacttgaaatattttccttaataatgttgtaatacaaatcaataccttgattgatggaaaacggggatagaggtccctgaatgtctgaattgaagtttctggcagccagaatcgtttgttctccacatacagggatttgagcaaaataacaatcagttgcgagcgcaagatgatgccacaaacgcgaccctccgatcgacgatcctgcaagattggtaaaatactaataacatggagttatgtgaaatttctttgatcttactccgcaaacatcatcgaccaccggaaatccgttgtggtcgcacttcttgagcatctcatatatgtaattagcggaatcgcggatcttgatacagatcactggtttgcttagaatttcgcgagctttcagacccttgtattgcggcaatggctcccaggtcagcatgggcacatgatttacttggatctgcgtatcgtagatgccctcgttgaagtagtcaccgacccacttggcgctgataagtgcaatgataaggggaaagaagaaggacgtctccacgccagtggtttccatcaatataactgacaagctaatggtcattcgaagcactccacccaagttagctgcagctccaattagggcatatttacccggatgcag

SEQ ID NO: 27605 - DNA, 7744 bp, DROSOPHILA
aaagaccagacgcagcgcgcagtaattcaaatcatctagaagatctcgtaaaacaaaatgtaaagtcctggcgtggggttgatcataacgcatacatatacccatgtgtacgtgtgtgtttccattgtaatctaaagcacgagtgaatttacgtgcgttaaatttaaacgaaaatttaaaaaaatatttcgagatattgcaacaaaggcagtattaaatcgatttctggtgcatgtgcttgtgtgcagaatgtttgcatgtgtttgttgcaaatgtaagaagaagtagccactcacgcgctactctcttcctttctctctctctccgccccctccccattagctctacaagcagctgaaagttgtagccgcactacattcaaaagtttccaaaagtctgcttgctggcagtagtaagaaataaagacttaaaaacaaaaacatcacttagtaatatcagtgatattcagaaagaactccaaacgctacgtggcagaggcgaatcaccggcgcagcaacaccagcagcagataaccagccgtcagtccaatttctctaccttagaactcgagcgcatttgccgcttgcggggcgaccaaatgcatagacaacatatgtcgcattcacgagcagtccaagatcaagagttgcgaccccgaccgtttgttgcatattacatacgctcatagagggcggccactcacctagagcagccagagtccttgcacttgggcagggatccagggagcaacaaagtgcttagaaagaagaagcagcagcacaggattatacgctccgccgaggacagagcaacaaaaaagatgatgaaacgcactcgcgtagacgaggtgcaatttggcacacgacccgttcctcagacctccggaggtgtgggcgttggtgtcgtcggcgtaactggaggtgggccaacatccggcggcggtggcactgctactgtgggcgtcaatacgacgggcgttaccattggtaccgtcgtgcccagtgctcataacgccaccatcagcgggatcggttccattcaccatcgcatccttactccacagcatggaggagcacaaaccattgcctatttgccgtccaccacgccgacggctacgaatttgaagaccacaacctcgattgtggatagcactaccgctggaggaccagtaggagcaggagcacaggtggccgtaggagttggctctgcagccggcggaggaggcgtggtggtctccacagggagcacgggaacgcaaacattacagtatacaacatcttatagtgtggcttcgatacaggctggtggaactctgaaagccaacacagcggatggcgcgaacacggtacagattcatgtcacaggaggaggagctgcaaacaatcctgccagtgcacagactgtttccagcagctcacaaacgggcacaatccgtcagcgtacaatcagcggcacccagacagtggccactgcagtgggtaatctagccacgatttcccagcaacaaccggttcaacaatcacctttgggcaaggcccaaacgcctccatcgtccgtggttgccaacagtatcccagtgggtggaaccaccccaccacaaggacagtcgggaaatgccacgccacgcttaaaagtggaggatgcgttgagctacctggaccaagtaaagtaccagtatgcagaccagccgcaaatctacaacaacttcctcgacataatgaaggaattcaagtcgcactgcatcgacacacccggagtgattgagcgagtctccacactcttcaaggggcacacagagctgatatacggcttcaacatgttcttaccgccgggttacaagatcgaaattcattcggatgctcttggctgttcggtgccggtggtttcgatgccctcaccaccgggagcgccaacgagcacaggaacggtgcatatgctcaccggaaatagttcgatgtccggtgccggacatatcgccatcaagacgaccaatgctgcgactttaacaccggcagcaggggctggagcagcggccgcagcagcagctgtggctcagattcaatccgctggagctgtaaatctaatgacccacggcggagcctcgcttacccagaccactattcatgcattgcaacaggcgacgcctcctcaatcacaatctccaggcggaggtcatgtccacgtgagtgtaacaaactctacggcagcaaacgccgtagtgcccggacagccaggcatctccgtatcggcgcacaatgtaccgcagaactactcgagagatcgagaaagggccaccataacacctactgggcaagtggctggagcagcggcaaacgtgaatgcgtctgctagtatagttgtcggtggacctccaacgcccaattctctaagtgagcttagccctcatggaggagcaggaggtgggccaggtgcgggagcggcgcagcacaatctgcatcacatccagcaggcgcatcaatcgattttgcttggggagacgggacagcagaatcagccggtggagttcaatcacgccataacctatgtaaataagatcaagaatcgtttccaaaaccagccggccaagtacaagaaattcctcgaaattctgcacgattatcagagggagcaaaaggtgatgaaggagggcagcctgaaccagggtaaaatgctcaccgagcaggaggtatacacgcaggtggctaagctttttggccaggatgaggatttgcttagagagtttggccagtttcttcctgatgccaccaaccaccagtccgggcagtacatgtccaagtcagcgtctgtgcacaatgaccatggcaagcgtcccacggctactttaagcggtggagctcacataaccatgtcatctgcttcgccagcgccaagtggatcccctctgcatttgggtgcaacgactcttccgcagatcgacaaaagcgcccatgcagcggccataggaaacctttcggcggtgaacactagtgtcagcattaagacgtacaataataatcagcaacagcagaatcatgtgatcggttcagggctgaatgcgacgcggaacgatattctctttgagaaggactatcacgcgggtctgcagcagcaagcgcatcagcgaggagctggagttggaggccatcatcatttggccgggactgcagcgggcgccaatatcggacggcctggagtgggagccagcgtgatggtgtcgtacgataaagagcatcgaaataatcatcatgtacaaaagtacgttggccacgcgccaaaccagaatctaacgcatggtcataacgcaaagaaatcaccaagttatggcattccttcggtgattggttccatgccgcacatttcggacaattcgctcgaccgcagttcaccgggaattagttacgccacgccaccattgccctctggtccacatggacagcataactctggttcagctacgaggaggccgggtgatgacagtttagtcggacactatgctagtggagcgccgcctgctaagcgaccgaagccttattgtcgtgatgtcagcttttccgaagcatcgagcaagtgcaccatctccgacgccgcgttctttgacaaggtgcgaaaggcgttgagaagtccagaggtctacgacaacttcctgcgatgcctgaccctttttaaccaggaaattgtctccaaaacggaacttcttggtctggtatcaccgttcttgatgaagttccccgacctgctgagatggttcaccgactttctgggaccgccctctggtcaacctgctggaggattgattgacggcatgcccttagccgcaacgcaacgtcagggaggtggaagcagtaatagttcccatgatcgaggtaccagtcaccagagtgccgccgagtatgtccaggatgtggatctgtcttcttgcaagcggctgggtgcatcctattgtgctttgccgcagtccacagtacctaagaagtgcagcggacggacggctctctgccgggaagtgctcaacgacaaatgggtatcgttcccgacgtgggccagcgaggactccacttttgttacatcgcgaaaaactcagttcgaggagacaatttacagaacggaggacgagcgattcgagctggacctggtcatcgaggttaatagtgccacgattcgagtgctggagaacttacagaagaaaatgtcacgaatgtccaccgaggaattgagcaaattccatctggacgatcatctgggcggcacatctcaaacgatacaccagcgggccattcatcgcatctacggcgacaagtcgggagagataatcacgggaatgaagaaaaatccgtttgtggcggtgcctattgtactgaagcgactgaaagtcaaggaggaggagtggcgagaagcgcaaaagaccttcaataagcaatggcgggaacagaacgagaagtactacctcaagtctctcgatcaccaggccatcaactttaagcccaacgacatgaaagccctgcgctcaaagagtctgtttaacgaaatcgagacgctgtacgatgagcggcacgaccaagaggacgacgccatggaaccgtttgggccgcatctggtgctgccgtacaaggataaaaccattctggacgatgccgccaacctgctgattcatcatgtgaagcgtcagactggcatccagaagcaggagaagcaaaagattaagcagatcatccgacaatttgtgcctgaccttttcttcgcgccgcgacagccactaagcgatgacgaacgcgatgacgcctttccatttttggtagatgacaatacgaaaatggacgtggactcgccactgggtcgcacggagtcttcgactcgaaatgccaagagtacgcccagtgaaagtgcctctccggcgcgtagcaatgcaagcactagcagcgtaacaccagcgggaattaagaaagagactgatgactcgaaagcgacgacaggatcttttgcaccagcgtcctcggcaacggcatcttcagcgacgcctgtggacgatgctacgccatcaacatcctcagcagcggcggcagcatcagcggcatcgtcatcaactgtttcaggaaccgaaggcaagccaaaggatgaccccctatcgtcgcacaaggaagaaggagccggtagcaccagctctggagttgccacgagtcccaggcaagcccaagacactgcaggagcaggcgtcgatgtggaaatcaaactggaacatcctgcggacttttccaatccaaagcttctaccgccgcacgcgcacgggcaacgcgaagacgaatcctacacgctgttcttcgctaacaacaattggtatttattcctgcggctacatgcgattctctgcgaccgtctgcatgttatgtatgaaagagcgcgtttgctggccatcgaggaggagcgctgtagggtgaatcgaagggagagcacagccacggcgctgcggctaaagcccaaaccggagattcaagttgaagactactaccccaccttccttgatatgctcaagaacgtcctagacggcaacatggactcgaatacgttcgaggacacgatgcgtgaaatgtttggcatttatgcctacatctctttcacgctggataaggttgtctccaatgctgttcgccagctgcaatattgtgtcacagaacgagccgcactggattgtgtagagctgtttgcaacggagcaaaggcgtggctgcaccggaggattctgtcgagatgcgcacaagacatttgacagggagatgtcgtatcagcggaaagctgagagcattctcaacgaggagaattgcttcaaagtgtacatttacaaaatcgattgccgtgtaaccatagagctgcttgattcggagcccgaggaagtcgataagccggctgcgttgaaggcccagaagttcagcaagtatgtagagcggttggcgaatcctgcgctcggcggtggtggcaatactggccgctccgattcggcgctcggcaatgacagcgttgtagatgggtccgatatcaagacggaggcggacgaagatactgccgagttgcgctacagagaaggtggaatcggaggagcaggcaaggcgcgctttttggtgcgcaacaagcggagatcaaagctgcttgaggagcaagtgcgtcagttgtttgaacataggcggaatcggattgagcagcatggtactgcggcctcacttgaacccatctccgttgacagtgccatttcaagcaacagcaccaccggcggtggcggcagcggcactaataacaacaataataataataataataacaacagctggggcggcaaacgtctggagaggctgggcgccccacaggtgggcttggccgagcaatacgcctttaatgatcgcgacgagatcagcacaaatatcagcaacgggcgatgttttgtgaccagcaagaatctcaagctacttaagtacgatgcagtgcgtcgtgccaagaagagtcattgccgcgtaactcaggcgaaatacgctcacttccaaacgtacgttaacaagtggcttcagcaacatgtcagcgagcaacagcagcagaactgcgtcgactggctgctgggcaagacggcagaccaaatcaatgccagcggctggggatccgccagcaaaaccaagacggtacagcagaaggatacttcgaagacaccgtatcgcatctacaacagatacagagtggtgcagagtgcagtaagcggcggtttgatgagtgccactgctccaactccagatggttcagttccggcggtcaattccgcgccatcaggctcagtttcaacggtgaacaatgtacagggctcggcggcagtatcctcaacttcccactcgatgtgcaacagtagcattttgtccgcggactccaccaccaataccaatgcgtcagcacagcagcagcagcattgcaacagtgcagcagctgcaacaacaccgaatgcagaggcactgcaacaggtgcgacccatggagagctaaccgacgggaatgggagcaacaacggcagtggtcgctgcatggccagattcttcattcacatgacgacaatgagaagatgtgggatgaattgcctgcattgaaataaatagtgttttaaatgtgataccagttcctcgacgcggtcatcgagattgcagctataccaacgcgcgatcgactgtttaatgtccggcatggcattgggctctggaaattgattgatgaacgaaggaaagctctttttcatattgtacaaaaagtcatttaatcttaggcgaaagtgctcctaaataagaattttatagtcttacgttgcataaattttagaattaattttacgacggcagcgtcctgttttattgatgcgcttttagaattaagatataaagtttatacgcctagagccacatacaccttaaacacaatcgcaagaccacaatttaagtcacggatatttttaacgattttgcactagaaaccgatcgagacagttgtgctagtaactaggaaccagaacacgtctgtttagtgttttaagattttttaaaaccaagctcttttactttatcataagtgtaacgtatttttaatacaaaacaaacaaaacacccacatacaaaccgtgtacaattccttgtgaatactattgtttatatattttacgcgtttaaggttattaagttaaattgtaaaaatgtattgcgcagatattaaaacaaaagtttatcaaaagtg

SEQ ID NO: 27606 - protein, 2061 aa, DROSOPHILA
MKRTRVDEVQFGTRPVPQTSGGVGVGVVGVTGGGPTSGGGGTATVGVNTTGVTIGTVVPSAHNATISGIGSIHHRILTPQHGGAQTIAYLPSTTPTATNLKTTTSIVDSTTAGGPVGAGAQVAVGVGSAAGGGGVVVSTGSTGTQTLQYTTSYSVASIQAGGTLKANTADGANTVQIHVTGGGAANNPASAQTVSSSSQTGTIRQRTISGTQTVATAVGNLATISQQQPVQQSPLGKAQTPPSSVVANSIPVGGTTPPQGQSGNATPRLKVEDALSYLDQVKYQYADQPQIYNNFLDIMKEFKSHCIDTPGVIERVSTLFKGHTELIYGFNMFLPPGYKIEIHSDALGCSVPVVSMPSPPGAPTSTGTVHMLTGNSSMSGAGHIAIKTTNAATLTPAAGAGAAAAAAAVAQIQSAGAVNLMTHGGASLTQTTIHALQQATPPQSQSPGGGHVHVSVTNSTAANAVVPGQPGISVSAHNVPQNYSRDRERATITPTGQVAGAAANVNASASIVVGGPPTPNSLSELSPHGGAGGGPGAGAAQHNLHHIQQAHQSILLGETGQQNQPVEFNHAITYVNKIKNRFQNQPAKYKKFLEILHDYQREQKVMKEGSLNQGKMLTEQEVYTQVAKLFGQDEDLLREFGQFLPDATNHQSGQYMSKSASVHNDHGKRPTATLSGGAHITMSSASPAPSGSPLHLGATTLPQIDKSAHAAAIGNLSAVNTSVSIKTYNNNQQQQNHVIGSGLNATRNDILFEKDYHAGLQQQAHQRGAGVGGHHHLAGTAAGANIGRPGVGASVMVSYDKEHRNNHHVQKYVGHAPNQNLTHGHNAKKSPSYGIPSVIGSMPHISDNSLDRSSPGISYATPPLPSGPHGQHNSGSATRRPGDDSLVGHYASGAPPAKRPKPYCRDVSFSEASSKCTISDAAFFDKVRKALRSPEVYDNFLRCLTLFNQEIVSKTELLGLVSPFLMKFPDLLRWFTDFLGPPSGQPAGGLIDGMPLAATQRQGGGSSNSSHDRGTSHQSAAEYVQDVDLSSCKRLGASYCALPQSTVPKKCSGRTALCREVLNDKWVSFPTWASEDSTFVTSRKTQFEETIYRTEDERFELDLVIEVNSATIRVLENLQKKMSRMSTEELSKFHLDDHLGGTSQTIHQRAIHRIYGDKSGEIITGMKKNPFVAVPIVLKRLKVKEEEWREAQKTFNKQWREQNEKYYLKSLDHQAINFKPNDMKALRSKSLFNEIETLYDERHDQEDDAMEPFGPHLVLPYKDKTILDDAANLLIHHVKRQTGIQKQEKQKIKQIIRQFVPDLFFAPRQPLSDDERDDAFPFLVDDNTKMDVDSPLGRTESSTRNAKSTPSESASPARSNASTSSVTPAGIKKETDDSKATTGSFAPASSATASSATPVDDATPSTSSAAAAASAASSSTVSGTEGKPKDDPLSSHKEEGAGSTSSGVATSPRQAQDTAGAGVDVEIKLEHPADFSNPKLLPPHAHGQREDESYTLFFANNNWYLFLRLHAILCDRLHVMYERARLLAIEEERCRVNRRESTATALRLKPKPEIQVEDYYPTFLDMLKNVLDGNMDSNTFEDTMREMFGIYAYISFTLDKVVSNAVRQLQYCVTERAALDCVELFATEQRRGCTGGFCRDAHKTFDREMSYQRKAESILNEENCFKVYIYKIDCRVTIELLDSEPEEVDKPAALKAQKFSKYVERLANPALGGGGNTGRSDSALGNDSVVDGSDIKTEADEDTAELRYREGGIGGAGKARFLVRNKRRSKLLEEQVRQLFEHRRNRIEQHGTAASLEPISVDSAISSNSTTGGGGSGTNNNNNNNNNNNSWGGKRLERLGAPQVGLAEQYAFNDRDEISTNISNGRCFVTSKNLKLLKYDAVRRAKKSHCRVTQAKYAHFQTYVNKWLQQHVSEQQQQNCVDWLLGKTADQINASGWGSASKTKTVQQKDTSKTPYRIYNRYRVVQSAVSGGLMSATAPTPDGSVPAVNSAPSGSVSTVNNVQGSAAVSSTSHSMCNSSILSADSTTNTNASAQQQQHCNSAAAATTPNAEALQQVRPMES

SEQ ID NO: 27607 - DNA, 5249 bp, DROSOPHILA
tgcccggtcacccgacgtgccggctcctcgcccatggctccattgtaggacaggtagcggtgcaggtccatcagcgcgaactcagtgaccacgaaaaggtccgtcttcgactcgaaggactcgatcatctcgatgacgtgcggatgcttcagccgggcctgaatgtcgcactccctgcgcaaattcttcagctctttcgtggctcttccgcgctgcagaacatgaatatggtgtgaactagttgtatggacttgttgctttatcacctggcccgccccactcaccttggagatcactttgatggccaccaccttgctgtcgtccttgcgtgtcgccttgtatacgcacccgaaggatccttgccccaccatcgagcttaccgcgtagcggttcatggttattctttgttttgctgcggattgggatgtgattaccactgaagtgcgtgcggtatgaccgtagcaggttgactccgaggtgggaactcggcttcggtacgtaggtatatgaaaatactagattgctcatacagggttccttttctgataaatgacgcttttgctggacagcaattgtacctaaaaatctatatagaccagatcatgatacaatccaagacaaatacaagactagtttgcgcttttatctgtggcagtaggtattagtattatctgcgaataaacatttattaagtgataaaagttggaacgaactttaacttatatattattatatattataaatatttatatgtatatatttcttaatgtacaaatttttacttaataagtgcaataaatgatatgcaatataaataattaaaaattccaaaagtgcagtagataatataactaattataggtatgtacctatatatcgtaatgtacctaaaattcagtgtgaccaaaccaacacaaatgacccttttgacagcaactcggtacggtcaccctagacaagcacggccgaagaacagctgattgctggctggtttttattgtgcggagccaggaataatcgttgtgaaataaataatgattgccaatttgaacacagccacccagtgagacgacacccacaatcgcagcacgatgcgcgagcccaacctgtacgtgatcctgtcgcacgcgctgatcggtgagtttccgccaaccggcagacacttctgccacgcctcttccgcttccaggcggcagtctaattgagttggggattcccactgccattgaccacactcccaattccaatccgcatcccaggctgcggcttcttcttcctatacgtgcagcatgtgcgcgtgatcttcgagacgcgcaccaacatccagcagctcaatcagctggagcgggaggcgcttctgcggcgcgaggatgccctgtactatgccttctacaagcagctggccgaagggccggacttttggcacggctacgagcagctgaagaacgtcacggacatcgagtatccgcacagtgtcaatgtgctgcagcgattctacgtgctgccggagctggtcacggcgtaagtgactgccagaggagtgatgcccaaaaagtccactaatgcagatgcactttcgctccccaaaggtacttctttcacgtagtgcgctccggcttcaatccaatggtgcaaccgatgcagttctatctggagttcgtgtggctgatgggcggggtaaccctgctggtactctacctgtacggaacgctgctcagcgagaacattttcggtggcatatacggcgtaatctcgtacctgatgttccacagcttcgtggccaagatctatgagcggccgctggcgcgggagaacttcgcctttccgttcattttcctgcagatgttttatctgtgtatctgcatcggaaggatcatacaccgacagcggcacacatctcgcatgttcatggtaataggtgtgctttattgcattaagctcagtaacatctttgcccttcgaagatcttcgccatgtcgcttttcaccgcctgcgccctactctcctggcagttctccaccttcatcttcaccacccagatcctgatcatgatgacgtcctggaacgcgagcgcgctgcccacggctctggtcaacgccttcgtgctggactactcgctgtcgcacctgctgggccacgctctcgcctttgtaatgtcgcacggcaacagccagctgcttctcacctggcagctgagcatctcgctgttcctatttttgattacaatggtgcgacagttgcgtcacgtgcgcagccggcgactgggacacgcgcaggatctgctgaacggcgacttattctcgttgaagttcctcatgctcacactgctgctcgccagcagcgtgcagaccacgctgatagagctcttcaatcgggctggcgtggtcagtgtgacggaaggcgaccagcagcacttcttcgacatatgtgcccactgggctctgcaggtcaatgtcggctttgtcgcccacctttccgcctgcaatccgcagtacgcgcgcgtcgcctggtcagaattgtggcagctggtcaagacgatgattgttaagccgtactgcatgtacggcgtggtcatgctggccatgttcttccggcgctggcgcaagagcggcgccccagtaagtgccctcaccgaagagcagcgcgagagagcgcgcaaatacgtgctggaagacttcatagaggagcacttcgtttccatgagcgacatgtctagcaaggagacggagaaacagctgtataagtgcttccgcctgctcaaaagctgcgactacgactacgagcgctacaagcgcgcacaggccagcctgcgtaaggagcagccgcccgcccgcgacgactttatgcaggatatcaagcggctgcgagcgcaaattaaccgcaacagcgtcaagcagcgcaaggagcgggcgcaggaaaccaaagaagcggccaccgacggggccagcacgccgactgaggaggaggataaggatccggaagcagaatcggaatcgaagaagaagaatcaggagccaggtagtggcgaaacggagaccgagtctgcagcagatcccactgaaacgccgccgtccaggtccgcggacaatgaagaggaggaggaggaacactctgccaccgccgccggctgcggctcaaactcgagtggccatcgacagaggaagcgcagctcctccagacgcagctccgtggtgcccacggccaacgcacagatcctcaacatgcactacgtgtacagcttcctgcagatgctagtcttcacccttatcggactcgccgtgcgcaagctcttcttcctcagcttcacgcagggctgcgtcatcgcacccaccgtctgctccaaactgtggtaccatcgccagcgcaacatcttctggtcggtctcgctggccgtcttcctgctcagcatgttcgatccgggcatggtggtaagttggataccgcctctattgctcacgggaattgttgtgatttcgtcgccctctcaaaaatagaacattcgcgaagagtacttccccacgcgctactccaagagcggtgacgacctggacagcatgctcgagtggatcaagctgaacacagagcgagatgcggtctttgccggccccgtggacatcatcggcaccgtgcacttgaccaccaaacggcccatagtcaaccatgcgcacctggagatgcgtcagatagcgtaagttctcccaatctgagcgagatagcctatcgactatgcccctgctctgtcccgctctcattggcatccatatcctggccatgcacgtactgaaacttccgcctttgtttatcttttttaagggagcgcacggagcacgtgtactcggtgtacagtcgtcagcagtcgtcggatatctacaaccagtgcgcccagctgaagatccagtacttgatcatatcgctggacgagtgcaccaacgaagtgcggtgagtagacgcagacaaaatcctcgagacgggcacttgaacgcttaattgagatattgtattcttatcgcattaatatgtacttttgcctgctttctacaacagcgacgattgcgatctgctggccatttgggatgacaagcagccggcctaccaaaaatacccacagttctgccacgagctgctccacaagaacgtgcccagcttcctgaaagtgttcgccaacgaccactacggcattatcaagatgttctcgcagagcgtccagatcaacctcaagcacaacaagatgcccgagatgtccatatagggctggccgtccacggaggcggcgcgatgatggaatgctggaatcgtgttgtgttgtacgtagctgtgtgagctgtgtgactaggatttagcattttacgatgtgtgtgtattatgattacgtttagtattgccccaacctcggatgcccgaacacatctcgcacccaatcccaaatcccgatcccgcgtagtagctgatttgatatggcagattggcgattagaaggaggccccttccgctagatagtaaactggatgcatttagcagcttgacttgtttccgcgccgctgcgttcaaaccttgtttggatcattccccgcacccgcacctgcgcctgcgccctcgcattcgaataagttaatctagccgaacggagcgaccttaactctaaatactttcgttaagtttaagctaagctttttacatttacgcatgtagtatacatatgacgatgagacgcgtgtggcaacgaaagtggctgcatgtggacgatgtgcatccgggagccacgatcccagacccaaaaacaagcgggtaaacacgcatttgccaggcaataagtgaaataaaatgatatatttgaaacaatcctatgggcatctgttgtttgtttatatctttaaaatgcttactccttattgttcacaacttttgaacagtaaaaatgtgagtatatatttgttttgaaatatattcacatttttagttttatacaatacagcttataatatgtaaataaataatatcattaattatgatttccatttatacaatttatttaaatttcgaatttcaccttacagggtttgtgtcgcagctatccaccctgagtttgtatcgcggtttcgagtcgattgcttaaatatcgatattatcgagcactaccatccgcatctgggattaacttcgtttcgccatccggtcacacacatacccgcaacaatacacgaattttcattaataaacacacaaagtagttaaaattttgggtttacacc

SEQ ID NO: 27608 - DNA, 2832 bp, DROSOPHILA
tgcggagccaggaataatcgttgtgaaataaataatgattgccaatttgaacacagccacccagtgagacgacacccacaatcgcagcacgatgcgcgagcccaacctgtacgtgatcctgtcgcacgcgctgatcggtgagtttccgccaaccggcagacacttctgccacgcctcttccgcttccaggcggcagtctaattgagttggggattcccactgccattgaccacactcccaattccaatccgcatcccaggctgcggcttcttcttcctatacgtgcagcatgtgcgcgtgatcttcgagacgcgcaccaacatccagcagctcaatcagctggagcgggaggcgcttctgcggcgcgaggatgccctgtactatgccttctacaagcagctggccgaagggccggacttttggcacggctacgagcagctgaagaacgtcacggacatcgagtatccgcacagtgtcaatgtgctgcagcgattctacgtgctgccggagctggtcacggcgtacttctttcacgtagtgcgctccggcttcaatccaatggtgcaaccgatgcagttctatctggagttcgtgtggctgatgggcggggtaaccctgctggtactctacctgtacggaacgctgctcagcgagaacattttcggtggcatatacggcgtaatctcgtacctgatgttccacagcttcgtggccaagatctatgagcggccgctggcgcgggagaacttcgcctttccgttcattttcctgcagatgttttatctgtgtatctgcatcggaaggatcatacaccgacagcggcacacatctcgcatgttcatgatcttcgccatgtcgcttttcaccgcctgcgccctactctcctggcagttctccaccttcatcttcaccacccagatcctgatcatgatgacgtcctggaacgcgagcgcgctgcccacggctctggtcaacgccttcgtgctggactactcgctgtcgcacctgctgggccacgctctcgcctttgtaatgtcgcacggcaacagccagctgcttctcacctggcagctgagcatctcgctgttcctatttttgattacaatggtgcgacagttgcgtcacgtgcgcagccggcgactgggacacgcgcaggatctgctgaacggcgacttattctcgttgaagttcctcatgctcacactgctgctcgccagcagcgtgcagaccacgctgatagagctcttcaatcgggctggcgtggtcagtgtgacggaaggcgaccagcagcacttcttcgacatatgtgcccactgggctctgcaggtcaatgtcggctttgtcgcccacctttccgcctgcaatccgcagtacgcgcgcgtcgcctggtcagaattgtggcagctggtcaagacgatgattgttaagccgtactgcatgtacggcgtggtcatgctggccatgttcttccggcgctggcgcaagagcggcgccccagtaagtgccctcaccgaagagcagcgcgagagagcgcgcaaatacgtgctggaagacttcatagaggagcacttcgtttccatgagcgacatgtctagcaaggagacggagaaacagctgtataagtgcttccgcctgctcaaaagctgcgactacgactacgagcgctacaagcgcgcacaggccagcctgcgtaaggagcagccgcccgcccgcgacgactttatgcaggatatcaagcggctgcgagcgcaaattaaccgcaacagcgtcaagcagcgcaaggagcgggcgcaggaaaccaaagaagcggccaccgacggggccagcacgccgactgaggaggaggataaggatccggaagcagaatcggaatcgaagaagaagaatcaggagccaggtagtggcgaaacggagaccgagtctgcagcagatcccactgaaacgccgccgtccaggtccgcggacaatgaagaggaggaggaggaacactctgccaccgccgccggctgcggctcaaactcgagtggccatcgacagaggaagcgcagctcctccagacgcagctccgtggtgcccacggccaacgcacagatcctcaacatgcactacgtgtacagcttcctgcagatgctagtcttcacccttatcggactcgccgtgcgcaagctcttcttcctcagcttcacgcagggctgcgtcatcgcacccaccgtctgctccaaactgtggtaccatcgccagcgcaacatcttctggtcggtctcgctggccgtcttcctgctcagcatgttcgatccgggcatggtgaacattcgcgaagagtacttccccacgcgctactccaagagcggtgacgacctggacagcatgctcgagtggatcaagctgaacacagagcgagatgcggtctttgccggccccgtggacatcatcggcaccgtgcacttgaccaccaaacggcccatagtcaaccatgcgcacctggagatgcgtcagatagcggagcgcacggagcacgtgtactcggtgtacagtcgtcagcagtcgtcggatatctacaaccagtgcgcccagctgaagatccagtacttgatcatatcgctggacgagtgcaccaacgaagtgcgcgacgattgcgatctgctggccatttgggatgacaagcagccggcctaccaaaaatacccacagttctgccacgagctgctccacaagaacgtgcccagcttcctgaaagtgttcgccaacgaccactacggcattatcaagatgttctcgcagagcgtccagatcaacctcaagcacaacaagatgcccgagatgtccatatag

SEQ ID NO: 27609 - protein, 757 aa, DROSOPHILA
MVQPMQFYLEFVWLMGGVTLLVLYLYGTLLSENIFGGIYGVISYLMFHSFVAKIYERPLARENFAFPFIFLQMFYLCICIGRIIHRQRHTSRMFMIFAMSLFTACALLSWQFSTFIFTTQILIMMTSWNASALPTALVNAFVLDYSLSHLLGHALAFVMSHGNSQLLLTWQLSISLFLFLITMVRQLRHVRSRRLGHAQDLLNGDLFSLKFLMLTLLLASSVQTTLIELFNRAGVVSVTEGDQQHFFDICAHWALQVNVGFVAHLSACNPQYARVAWSELWQLVKTMIVKPYCMYGVVMLAMFFRRWRKSGAPVSALTEEQRERARKYVLEDFIEEHFVSMSDMSSKETEKQLYKCFRLLKSCDYDYERYKRAQASLRKEQPPARDDFMQDIKRLRAQINRNSVKQRKERAQETKEAATDGASTPTEEEDKDPEAESESKKKNQEPGSGETETESAADPTETPPSRSADNEEEEEEHSATAAGCGSNSSGHRQRKRSSSRRSSVVPTANAQILNMHYVYSFLQMLVFTLIGLAVRKLFFLSFTQGCVIAPTVCSKLWYHRQRNIFWSVSLAVFLLSMFDPGMVNIREEYFPTRYSKSGDDLDSMLEWIKLNTERDAVFAGPVDIIGTVHLTTKRPIVNHAHLEMRQIAERTEHVYSVYSRQQSSDIYNQCAQLKIQYLIISLDECTNEVRDDCDLLAIWDDKQPAYQKYPQFCHELLHKNVPSFLKVFANDHYGIIKMFSQSVQINLKHNKMPEMSI

SEQ ID NO: 27610 - DNA, 3580 bp, DROSOPHILA
tttccatttgcctattccgctttttcactttgttgttgttgttgttgttatttggccagaggatgtggtgtgttgttggtgccaggattccttcgataaggactatttaccgagccaagtttcctttgagccgccgtcgctctcgagtcgcaaattcacactgagccggagttttggattcggttttggatgctggttgcttcgcactcggatgctgctggttgtgctgctttggtcttctgccgccgcggccaaggactcaggcgcaggctgtcggcgcagaaaccatcgccccaattctcttcgccttggtccttttaagagagccggaagagcgcgtattaagtgaagagcggaagcgcgtggtggattaaccacttgaaaaccgtggcgcccgcacttcagcaaatgcgttgcaaatgcacacattacgtccacttgtaattagcgggcttaatgcacatcaagcatccgcttttcggcggatatagggagggaagtccctgcgacaagcctatcgagattgcaaatcgagtcgagtgttgcagcgatcagtatatgcctgacaccgatcaagcgcttcaatgactttcaacgatagtgtaatatatcggtataacttacaggattttaaatgaaaaagcaacaagattaaactcgttttagaatagcaattaaatgtttaattttcgattgactttataaatatttaagttaatattaataatgtaatataaatatcaatatactagatttcttgatatttatgcgtagagctttgaaagcattgtattgttttacactgtttacaatgctagaatatttttttgttataaatattttattaataaaagtcttagcatagtgcctgggcacaaatttgcccaactaaaatattgctgaaggttatgttaaccacttttcaaaaaaagatttaaaacctatcgcattcgcttcattcgacgtccatctctaagtgtgacccttggatgtggcgattgtacgggctatcgataactccgacgcgacagcgacgcggcagagaaaactcgttgatgcctttcgtttgactaattttatataactttcggagtgacaacacggccgacacataaacaaaaaatatatcctagcttgtgaatatttaggcacacacttcacacacctgcaacgcggcctgcagttccaaattcttcgtgttttcgatcaaggtgttccaggcggtaaacaaacaacagcaacaacagctggcaccacaaaaacaacaacaacacggcgaacaacctgtaagaccttgaggggatttttttcggatttatattgcgcggcaatggcaatctaatctaaattattccaccaggtgcgcttctgattaacatttctggtcagatatattcaattagcaaagcggtagcatcatgtcgatcaggagagctatgtccacaacggcctcaaaggagtggcgggattactttatgaggtctgtttgttggttatcaattggccttatatgacttattgtaaatattgctttttatatccacagtacccacttctggggcccggtggccaactggggtattccggtggctgctctcgccgacacacaaaagagtcccaaattcatctccggcaaaatgacattgggtaaggatatccccccttgggttttggcctccatctggcatccatacacgcgcgactggcatcgaaagttttcgcttaagatgtcgtaatcagagccgctgtgatatgttctaaacaaatcactctataatgcctgataagccagatacggaaactgtcgaaacgtctgccgataagattgcacagagaaaaaactaagcacaatttgtccattttactccataatccgattccatcggaataagatgccagcgaggcaatatgcacataatgtaatggaaattatgacaaattttgcttataatttgtcctgtgcctttgcctatgtaaataagtctcccagaaatgcttatcctcgatcttttccagctctgaccctgtactcgtgcatctttatgcgatttgcctacaaggtccagcccaggaattggctgctcttcgcctgccacgctaccaatgccaccgcccaatcgatccagggtcttcgcttccttcactacaattacgggtctaaggagcagcaggcgtaaatgtaatccttgccccgaaatccacttccccgagacgcgacgcgcgaagccacttcaaatgtttacccaacagcagcagctatcgcaatttactgccaccacacgcaacgaagatctagcaaattgcactgccgcaatcccattcaaatcaaatccaagtggtggagtaattgccgtgaatcacacccgcacaatcggctgaatctcgaatcgcgaagttgtcgtgccccagtagccgttttcgctggggtcaaattccaattccaattgagtctatacccaacttgttactttgcccatttagttaattccgttaggcagttgatcaaaattttaagtcggtgcaatgcttagattacgattatatgaatatggtttaaaatccaataaaagatatcaaaatctaattttgtctagtgtctgtcaatacaaaatggttgtaataaaattgtaacatttaatcattaaaatgaagaacgttatagaacccattcaaatatacaaagttagttgattttgtcacgtttattgaaacatgctttttattcaaacaattacggttatataagttgatatctgtaaaatatacatttcaattgttcttaacaatagcatatttttttgttgacattttttaaacttttttttgttcatcaatggggttaaaacatacgaactcgtaatcatttttttgttgtgctttttttttttttgattacgctttggacgaaaaacatatccgtgggtataaaaattttttagttttctcaaacataataaaagtaaaattaaagttaaacactcctcgcgcactatgggcgccatcactatgcctaataagtggcttaactgatgtccacatggaaatggaaatttgatttctgcttctcgacttcttcaacgacaacttaactaactaaacaattggatgacgacgataggtactatgacaggcttatgctccgcaatttctattctatggctacgagaatctcagtcctgctcctgcttaacgtaagtgctcttctgccgctggcgctccatcaggtacttcttgaacttccgttcccgggaggccacttcgtcggcccgggcacgcagtcgcagattctcggccaatagcgtgtcctcggcgcgcttctcctcctcttcgcgcaccttcgtcttccggcgcgatacgcggctcgcttcgttgttcttgagtctgtcctggtaggccttcctctcctcctcgcttttcatgcttgacatgagcacgggatcgggaccgtcggcatgatccttggcagggcgaccgcgcttccgcttgccgctgattccgctggctggcgaagggctgaacacggacgtactggctgttgaataggcgggcgaggtgggagcagtgaggaagccaccatagc

SEQ ID NO: 27611 - DNA, 1014 bp, DROSOPHILA
gtacgggctatcgataactccgacgcgacagcgacgcggcagagaaaactcgttgatgcctttcgtttgactaattttatataactttcggagtgacaacacggccgacacataaacaaaaaatatatcctagcttgtgaatatttaggcacacacttcacacacctgcaacgcggcctgcagttccaaattcttcgtgttttcgatcaaggtgttccaggcggtaaacgtgcgcttctgattaacatttctggtcagatatattcaattagcaaagcggtagcatcatgtcgatcaggagagctatgtccacaacggcctcaaaggagtggcgggattactttatgagtacccacttctggggcccggtggccaactggggtattccggtggctgctctcgccgacacacaaaagagtcccaaattcatctccggcaaaatgacattggctctgaccctgtactcgtgcatctttatgcgatttgcctacaaggtccagcccaggaattggctgctcttcgcctgccacgctaccaatgccaccgcccaatcgatccagggtcttcgcttccttcactacaattacgggtctaaggagcagcaggcgtaaatgtaatccttgccccgaaatccacttccccgagacgcgacgcgcgaagccacttcaaatgtttacccaacagcagcagctatcgcaatttactgccaccacacgcaacgaagatctagcaaattgcactgccgcaatcccattcaaatcaaatccaagtggtggagtaattgccgtgaatcacacccgcacaatcggctgaatctcgaatcgcgaagttgtcgtgccccagtagccgttttcgctggggtcaaattccaattccaattgagtctatacccaacttgttactttgcccatttagttaattccgttaggcagttgatcaaaattttaagtcggtgcaatgcttagattacgattatatgaatatggtttaaaatccaataaaagatatcaaaat

SEQ ID NO: 27612 - protein, 107 aa, DROSOPHILA
MSIRRAMSTTASKEWRDYFMSTHFWGPVANWGIPVAALADTQKSPKFISGKMTLALTLYSCIFMRFAYKVQPRNWLLFACHATNATAQSIQGLRFLHYNYGSKEQQA

SEQ ID NO: 27613 - DNA, 9680 bp, DROSOPHILA
gttgttggtgtgccagttgtagttttgttgacaaagacgaagacgtacgagtccgaaatgcacacacagatacgcacatgcacgcacacaggcgcacggcacacacacgtggcattcgtgtgcgtgtgcaaatggcataaataaataaaacgcatgtgcatattcagttgtttgcgaagccaaaggcaggtggcagtgtgtgtgtgtgtgtgtgttggagtttgtggtgtgggccggaagaaaagagaaagccggaaatacatatacattaaaacacttacgatacacaaatacacaaggacacaagtgggcactgaaatggaactgaatctgcagctataaggccatggaaatggcatttctaaatggcaaatgcaggcacaagttttcttttgcatgggatgttctttgtgaagttcttcgagcgaggatacttggaaaaaatagttatcaactcaggacatggattggattctaagagaagtactttaaactctgatgtgacctatttatttctctttaagttgtgcccataattggcaaatggtatttagaattattttattccatatttcagcactttttttttataatcgatggtcatagtcgcagaaatttacattcaatgaaattctcgcccaagaatgcattttctcaatatcgaatagtaatttttcaaagtgctcagcaaatacgaaggggaattgaaagcccttgattagagtctggcatatgagaattctcattgcgaaaatatgaggcagacacaggaggactgaaaactcattgcctggtgaaaattgagttaggtcttggccaagtgctggtatccccgcccagtttgagaacaccagatctcgaaacgaaatccaagcccacacagaactcctttaattaaaagcaatttgttgtttgcaatcgacttggaattgatttcgccagacacgcagacacttaggaatgggaaaatccctaaaagtgggcagacgtggattcactcttaccgggaatccagcgactcgtcgagatactgttgcgttgcctggattttccatttaaagtcgatgggattgtcgccctgcacgttgcactgcacatggacctgctttcctttggccaccgaaatctgtttggtcttcgtctgaaagtgggcgggcactgcaaggaaaagggcgtggcattaggtaagttacacaatgtgcagtctgaacccatttcagcttccattttaagtagtgcagaactggaaaattatctaatacaaaacttaaattattttttagaaagccaattgaaaacaaattgatttgcataacgattacgaggcttcaaaggcttgttagcagttttcatttcataaaactattaatttgtcacaactactcaagaaactactcaccattcactttgaggaagatgactttgctgacaccggaaccaatgttatttttggcctcgcacaggaagtgtccttgcgactccttgctgatcttcttgaagaaaatggttccgttgggaaatagctgcactgtgggctcgtaaaggaaatccttgtactcccctggcgttggtccaatcgcctttttccacgtgattgtcggtgtgggatatcctgaggattgacagtgcagaaggacatctgcacccgcctgggcactcgagtcctttggctccaggatccacttgggcggtacattcacggtcaggggtacggtgaatctttccgtacctgccacattgctcgcgatgcaggtgtagtttccggaatggtcggaggaaatgtgctcgatgaccaaactggcggaatactcatccaggcggcggaaaacctcattgctgtcgaagaaaagaagagtatttacagttcagtaaagttcatatttacaatggttccctacattatttaaaattaaagataatgaagtttagaacttaccccgttccgatcagtggctttccgttgcgctcccatcgaaaactgacgggcaggtcgccctcgaggatttggcaggatatggcggcgcgcattccctcgcggagcatgttcgtcatggcttggatgggcataattttcggcggcactgcaatcggaaggaagccataaaacatgaaacaccagtcgtaaactaaaaaaccgttttctatggggggaggcaaaaaacggtggcgttgttgcgaaaatcggctaacaattgccatggcagttggcttgagcacaaaacccagtgagtccgataatcaaggatgttttgctgatggcaatacgaggcgttcgctgtgctggtggcaattgtgggcgtggcactcgcatcaatgcaactgcggcttggcaacagctgccgagtgaattattataaagagtaaggcagcagtagcagcagcaggaggagggggaggaggaggaggaggtggtggcagagttgccgcagacagaacacaaaagtcaatgactccattgtgggtctactagccgcccacaaccgcccgcaaaaccacccaaaccacccaccatccaccacccacagactgcatgtgcattaactgggaaaatagttgctgttgcttttgctgttgcggctgcatagtttcgctcgccactctaattggaatagtttcattgtagcagctgcagcggctgttttccagcatccattttgcaactccatctccacctccagttggagctttcaaattttaaatatcgaaaaaaaaaggaactcacccagcacttggatctccacattccggcgggatgtttgcttttgtttgttctgcgccatgcacgtgtaggtgcccgcatcctcgaggcgctgcagttgctcgataattaaggtgccattgttgtaggcacgctgcctgcgatttatgggcagcgtttggccatcttttatttgattcattttttttgttttttgccattttgaagcaagaaaaaagcgtgagaaatgggagaaagcggaaagaagttggcaattaatttggctgctcgcataaaacaaagttatgcgatttatgactggccatatagcattcggtgtctccatttttattttttttttttttggcacagcttatttatttgcgtatactagtggcaaaggagaacttgttcaagaaataagcaaaataaaaccagatttattgattcagcttggggggaaatacttcaatgtttgtctgaatgccaactgctttgaaataaaatacctgcaggtattttaatatttttgaatattcacacatttaagaaaatgcattgacagccttgaagtgtaaacttcatatttaattcacttcgtgtttcaatatttattcacctcaaactcaaatgactattgttcatttttttggacatatatagtatacgccataacgagaatatatgttaacgcactcgcatgcgagtgtgcaaagataataattaataataataaaaaaacgcggttattcgaatttaaatttatttcgcttgaaaccgaaagaaactgcgcttcgaaagaataacgtttgttttgcagttttaataattttcactgatatgcgcaataccatttttaataacaaacaactggccaaaaggcaaataagcataaagcgaaacatcatgaccaaaaaagatatcacatatgaatccatatatatgccacacatcgcatcgcatatccgaatggggtatatatatggatttttatttttatatattttcgtttatatatgtacatatgtacagctcacctcgctcccagtgaattttatcgatggggtaaccagccacgggacatttaacaatcaaatcagagccagaaatgcctgttatttttggcatttcgcgtatgtaaggcaatccatagatgttcactttggcgctgtgcgagactctggaaatgaaaataatggaaagacctttagtttgggtcctcgagatggggccgtcttactcccgatagatttccataatttattcgggatttgttgcatatctcgatactcaaaaatatttctatagatttagcacaagcatgttcattattttcttgatatcttttttttagaatttaataaatattatacataatattctttagttttttgattaggttttaaatattgctattccacatacatatatgctcatgattttcgtgcctgattctgaacaattttccatctctaggctggtgttgccttggctgcctcagcaaattgtttggattttatgccgctcccctgcctgcaaacaatgctcggccattgtgtcggatttcttttttcccccacaagccttgaatgctttttttttctatgctacgactaaatttatgatttagcatggaaatgctttttatgcccctatcgagcctatgcaacatacatggcataacaagccatgcccattcccattctcatgccattcggcagatctagtcctgcatataggaaagtgctcgccgagcatgggtttttatttatggaactgcggctactcacttgccaattgcattctgggccgtgcaggtgtactccccgccgtcctcctccttgacatttgatatattcacgtggctgatgacatcgtcgtggatggtaacatattgacccactaaaaagcgcgagctgtctggtatctgaagtgggggaagtggaagttcgttatcagagtgggccaattagccgggtcctattcgagaggctcagaggggaaatcagggtagtgtcgaggtggagtaaaaaattcatgtaaatcgaattgattgaaattgcacaagaattgcaaagtggaaagtcggagtgggtttcactctctctctctctcaagggaaaatgaaaatttatgcaaataaacgaaacaaatccctgaaaatatagccagagcaaaaaaggcaacggagccgaaattcttgaaaagaaaaaaattcaagtggagctgaggaaggaaaagcaaaagatgggcacttaacttacaagggtagaaggtggatggtttatttttcgtaaaggcgctatttgagcaaacgaaaattcggggcttaaagcatatgcatatacttaaaatattggtctgataacagaatcagtgacaaatatcccagcgtaataatagtttcaaatggcagcttaactatcggcaactgcttggcggaaacggaagtactgcgtgcatttccgtcttaagctcaagcagagtttggccgtttggcggttgaactcaccggaaatccgtccagggaccatgtaaattgaggcagtggatttccggtggctacgcacttcaatgataccgttggtcctggctgcagcgtttgctccgagaaccaataaagcagttccggcgaggcatctgaaatgaacattaaacggaaaatgcgagggaatgggaggggttagttgaaaactttgctcaaatgagaagcctgcctctgtggcaaggatggaaggatggtcggttggaaggatgtgtgcctgtctgtgggactttcattagtgcctgttgaaatgcctgtgctgcacatgtgtgtgtgtgtgtgtgtgttttactgtttgagcttgtgtcttttctcctccttcaactttttcgattgcagaaagatgattgcatcgatggcttgcttcttaattatgcacatgactgagttacgtgcgaacgggtgtggaaatcttcattaaaacggcattcaaaggaaatcaaaaaaacaaaaaaaataatgcaaaaggaatgcgacaagaatttgctacatttattagtttgcttgttttatattccatgcctttatcaaatgactttgccatcatttagatctgttccaattcctttaatgatgttccgctgaggacattcagattccttcgaaggatttcagcaaccatttccagatttgcacttttcgtttgcgaagcatttgctcagacttcattgcttttccttgcgtattgcttatgttgagccaaggcaaacggaaaatgcatttgacaagcgagcaaatgctatccagctgatggaaattgtatcaatttcctctggcgcagtggcaggattttttggctctggcgttcccagttataagctgccatatttatttgctccctcacccacacatgcggtactcacacacgctcacacacttgcagagcacagtgacatacgaatactattgcagcgttgacacaattgctgccatatccggccgcttaatggcgcttttctcgatggttgcgtgaggttttgggggggtacggggctttcagcaccccaaaggaaaaaaaggcggcgggaattccacttcctgtcccgcttgtcggccccttttcgcctctattgtgccaagcatgccaataatatatcgaaatcaatttccgcttgcgcctaaaagcaaatcacaaaatgttgccaaagcgcgaatgtgtctgctttgatgtttatgcggcatcggataacgagataacacagatggaagaagattatccctcgaataggaagtggaatatctgggttattgtgtgcggatttgtaaatctttttgtatgaagacggaaccaggaaatacgttaatttcttgattgagaaggaacgtttttatagaatctaatttaatcataatatttttgtcatattcagtactgtagaaattccttttaaatgctacttgatgtcctaagcccacttaacagcttaactgcctttctccatcgtaatgctgatgatcccagattagttttaatcatattgatgctacgcataaacccctcaaagcggccgtattcattatgctcctgtttcgctgcgtgtgtgagtgtgcaaggccccaaggcaactaagcggtaaaatgtgctttcccattcatgcgtaatatcctgccccgcccaaaaaacaatgcccctctgtttagtggctgcggctagatttttagagctggtaataaaattaagtcgtcgtcgctgcgttttatgggcagctcctcgttgctgttgttgttgctccactgtgatttgtcgacgtgtttgttgttgctcgtgttgttggtgaaaaatgttagcaatttgctaaattagaaaataatgaaatgcaattatggcaaacaattatttgtgtggtctgcggtcatcattcgccggcttcgagaaggaaattacacttttgattgagatggaatgtttgtgtgtgtgtgtgtgtgtgtgcgtgggcggtcataagtggttattaatggccataacgatggatggccaatttattagccccatcgggcgagcaatatcataacttaccgcccaactgcagttcagcggtggattggatctgctcccattcgttggagacgaagcactggtacatgccagggtcctccttttgcacttttttaattatcagtcgcggtggatcggtgagtatctaattaaagcataagcaatatatatatatatgtatatcaacaatacgattaaaacgtatttattaattggtgataaatcaggttggccattattaaaaatattatcttaattcactgacaacgttatagaaaatgaaattaagattttaacataaaaatcatatcgaatcgaacaaataacctctttatttgagattttaaaagccgattaaattatgaatgatatggggttgtctgctcacctcaacccgattgtccctgagtatgggtttgccgtcgtgcagccagttgacatcgtggaccggatggccagagacaatgcattggaattgcgcatccttatcgacatccaccgtctgcacctgtggctgtaggtgcgccgtcaaaggagctgtgtttgcgaaagggttgccaacgatttgagtgcccatctactcttgttttttttttttttttagctgccatcatcacggcagacacacatacagtggagcccagaagcagatgcactcacctgtcaccgttagcgacacttggatggtctcctcgccagccgtattgttcacccagcacaaatattttccactatcctcgagacgtgcctgcaatggacgaaatcaattggcaatcagcagggttttccatcacttctgcccaccccccttcaaccagtctggctacgcccataatgggtataaagaaaagattgcagccttctatctcaatggaattggtgtttagagatgagggtaagatttcgttttaatattggtatgaaaaagtaaaagagaaccatatattgttacattttcaaaaataataggttaaataataacaaagggactttcctattaaaaatatgtcacatatttttcagttttgaaccaaaattacatcataatgtaaagaaatcgaaaaggtctttttaattaaactagtacttctcccagtgtaacctacgcaccttggtgattttgaggagtcctgcggatacgatggtgatgcgttcgctgagttgcagcggcagcagttgctcgttttcctccttgaaccacctggaaaaaaaaagcggagaaaaaagaatgacagggagatgaaatgccgaccaaacaaaggaccaagaacaaaggcaaacatggcggaaatcggggaatcgggaaattcatttccgctttatttgcccaagattttgacagttgaatgcgagtggcgtggacgcattcgcgtgctttaaataaatcgaaacgacgattgaattatcaataatttcgattcgcccacattttttcatacattttttttttcgcgttgcacgtagcctttgattgttggcttgttgtgcaggtcgaggtccacatgccagatgaaatgtatttcaatagttcgtaaaaatgattgcacttaagtgggcataacgagaggaagtgggtggtgtgggctttattcatacatatgaatatgcattgccttatttaacgggtatttatgttcgaatggcctataagtcgagcatatcgagtgcctcatttgctttgccacaattatgtgtggaaaacatgagatatttaatcttaatatcacatgagtacattattgcagaaatattttcatatttgtaataaataactacgatcttttatctcatatttacaattaatgaaatgaaagtttatattaatttttcatcctttagttaatatggctgtttgctattaatttcatgaagagtattttcagtatctgtgattgtgatttgcatgcatgaatttccagtcagaagaacgagatcgaatgctgctggtggtagttgaaggttgaaaatatctgaattgcgtaaatcaacagatttttttcacatttatctggtgcgcgtgtcataatctgtttgatggctgcccgccaccctcacatactcgtgcgaattttccaaggcgcacgcagacatatgcaatcggattttttcaccataaaagttattgattttaatttggttttaattgcacttgagtgcatttctcgtcttacgacgagcattttgcaaaggcatgcccatttgcccctggcatggcattccttaattaaaatcatggaaaatgccgagcatgcaatgcgaacgattttcactctgagctatttccatatgcaatgctgttaaattggaaatatggtcagtgattatcaacaactgcatcaatatggcaccgggagccgaactgaactgtactgaaatgaatgccatcgaaggcaggaggagtatcagtatggatgtatgtgtgtgtgtgggtgtgcacacaa

SEQ ID NO: 27614 - DNA, 1605 bp, DROSOPHILA
atgtatgaaaaaatgtggttcaaggaggaaaacgagcaactgctgccgctgcaactcagcgaacgcatcaccatcgtatccgcaggactcctcaaaatcaccaaggcacgtctcgaggatagtggaaaatatttgtgctgggtgaacaatacggctggcgaggagaccatccaagtgtcgctaacggtgacagctcctttgacggcgcacctacagccacaggtgcagacggtggatgtcgataaggatgcgcaattccaatgcattgtctctggccatccggtccacgatgtcaactggctgcacgacggcaaacccatactcagggacaatcgggttgagatactcaccgatccaccgcgactgataattaaaaaagtgcaaaaggaggaccctggcatgtaccagtgcttcgtctccaacgaatgggagcagatccaatccaccgctgaactgcagttgggcgatgcctcgccggaactgctttattggttctcggagcaaacgctgcagccaggaccaacggtatcattgaagtgcgtagccaccggaaatccactgcctcaatttacatggtccctggacggatttccgataccagacagctcgcgctttttagtgggtcaatatgttaccatccacgacgatgtcatcagccacgtgaatatatcaaatgtcaaggaggaggacggcggggagtacacctgcacggcccagaatgcaattggcaagcagcgtgcctacaacaatggcaccttaattatcgagcaactgcagcgcctcgaggatgcgggcacctacacgtgcatggcgcagaacaaacaaaagcaaacatcccgccggaatgtggagatccaagtgctggtgccgccgaaaattatgcccatccaagccatgacgaacatgctccgcgagggaatgcgcgccgccatatcctgccaaatcctcgagggcgacctgcccgtcagttttcgatgggagcgcaacggaaagccactgatcggaacgggcaatgaggttttccgccgcctggatgagtattccgccagtttggtcatcgagcacatttcctccgaccattccggaaactacacctgcatcgcgagcaatgtggcaggtacggaaagattcaccgtacccctgaccgtgaatgtaccgcccaagtggatcctggagccaaaggactcgagtgcccaggcgggtgcagatgtccttctgcactgtcaatcctcaggatatcccacaccgacaatcacgtggaaaaaggcgattggaccaacgccaggggagtacaaggatttcctttacgagcccacagtgcagctatttcccaacggaaccattttcttcaagaagatcagcaaggagtcgcaaggacacttcctgtgcgaggccaaaaataacattggttccggtgtcagcaaagtcatcttcctcaaagtgaatgtgcccgcccactttcagacgaagaccaaacagatttcggtggccaaaggaaagcaggtccatgtgcagtgcaacgtgcagggcgacaatcccatcgactttaaatggaaaatccaggcaacgcaacagtatctcgacgagtcgctggattcccggtaa

SEQ ID NO: 27615 - protein, 534 aa, DROSOPHILA
MYEKMWFKEENEQLLPLQLSERITIVSAGLLKITKARLEDSGKYLCWVNNTAGEETIQVSLTVTAPLTAHLQPQVQTVDVDKDAQFQCIVSGHPVHDVNWLHDGKPILRDNRVEILTDPPRLIIKKVQKEDPGMYQCFVSNEWEQIQSTAELQLGDASPELLYWFSEQTLQPGPTVSLKCVATGNPLPQFTWSLDGFPIPDSSRFLVGQYVTIHDDVISHVNISNVKEEDGGEYTCTAQNAIGKQRAYNNGTLIIEQLQRLEDAGTYTCMAQNKQKQTSRRNVEIQVLVPPKIMPIQAMTNMLREGMRAAISCQILEGDLPVSFRWERNGKPLIGTGNEVFRRLDEYSASLVIEHISSDHSGNYTCIASNVAGTERFTVPLTVNVPPKWILEPKDSSAQAGADVLLHCQSSGYPTPTITWKKAIGPTPGEYKDFLYEPTVQLFPNGTIFFKKISKESQGHFLCEAKNNIGSGVSKVIFLKVNVPAHFQTKTKQISVAKGKQVHVQCNVQGDNPIDFKWKIQATQQYLDESLDSR

SEQ ID NO: 27616 - DNA, 11076 bp, DROSOPHILA
gccttggttatttacctggaggcgggcttcttggtcacccgcgaaacagtggccgaaatgctgggatgtaagctagatttggaaggctctctggatacgaaataatagttaattactccacagtgaagatcagccagtctgagggcttccatctggatgtggaggactatctactgggcatactgcagttggcgtcggagctctcccgattcgctaccaattccgtcaccatgggcgactacgagcgtcccctgaatatctcccattttattggtgacctgaacacgggcttccgtctgctgaacctgaagaacgatggcttgcgaaagcgcttcgatgccttaaagtatgatgtcaagaagatcgaggaggtcgtctacgatgtcagcatacgcggtctgtccagcaaggaaaaggaccagcaggaggagccggctgttcctgcaaccgaatagtttacttcgtacgtaggataaggcgtttattaaaatgaaaaagtttcatttaaacaagcaaatatattacattcattaaacagagtatcattttattttactatttaaatcaggaatgctcgtaggaatcaaatgtagcaggatatatgtatgtaatcctgtgttaaaaatctgaaatgtgtttttgttttttttcagaacacatttctttacatcttaataggcaccatcttattttaatgatcagtttacacagaagcgaaatagtgctttgaaccataacaaaaaaacataagtttgtgcaacttaaaggtaattaaaatggctgtgcgcgttttgattaaatcataactaagtatacatagagacaagtgcagaagtttgatggcttaacccttttgaaacttgtttagccaccaccactgggccgcagttgttgttgttgccccgatcatatggtggatttgttgctgctcttctttggccgctgcttccgtttcgcctttgcttctgcttctcaggcgcagtttcagtctctcttttgccaccgcaacgcttacaacgttaacattgcgcgcgcgtctttgcattttcttgtttgctgcttcgtcgtccgtcgtccttcccgtgttgttcttattgttttttcccgctttgtgcgctctttattgtttcgccctttctagcattttgatttgaaagtggagactgcaattggttaccatttcaagaaagtaagtctggcgggcagttggccgtgtgaaaagtccgttggcccagaaactcacccgctctcttgaccacgcccccttttccgtccccggcccgaaaaaaaagctaaaaactgagagactccaacctgtttggcaataattgggtcacaaatctggtaaaaacttgttgcccgaaatggtcactaaacaaatagcactgtttttattacaaaactttagttgagtctgcagttgccttgttgttgtttgtttgttttaatttttttatttcgttccgcagacatagttgttgtttggtgtttttcaaaacacgctttaatcgaagcggttcaaagtccgaaacaagtttcctgagaggcttaacggggcacgctctctccttgttgctctttcccctcttcttacaacgcactgagtgggaggagagcgagaaatactgagagagctttcgacgtaaacatctgaaaagcaaaaccacaacagacacccacacactgacgggcaggtgttgctctctgcgtctctctttcttcctacccccattccaactttcttgcattctcatttcgaagggaaaatgccaaggaaaagcccagccgcaaaccaacaacaaaaagtcaatataataaacccagaatccgagtgctaactgttatggaaagtagcgaaaccattagctatggacctccttcattgagtgttttgcttgcatacccggcaattaaagacttgcagggtatgtgtattttcaatacatcaaaaaacaaaaaataatatatagaatatattttagtatcgaaaaagatttaaaaaaaattgaaaaattttaaaatacgccctaatattagttgtattcctcaaagtcatatttttttgagtatcgtctactgtaagtattcaattagtagtgggtatgtcttgagacaaaatcattttagtaagtttgcttgtttatttcgcatggtaattacacgtttatagaactattaacctgcattgaatatggttgtcaaataaaaatattaggtataccttgttatgaccgcttttaacgaccacactcaaccaatagtgtgttacgtttttaagtgtcgcagtacttcagaaatgttcacagcacttttagttcaataactcatgtgaatccatgtaatagtggatatcttgtagtcgagtatctcaaagataccccgctcgctttatcaattttcgttgcgctggccgcggcagctgtgaatgatttgcaaggggtcccagcgcaactggttcccagcgcctttgtgctgcccctcggaacccgaccctccagagccaccaatacctcgatcgtaccgctctcgttagacatgcgtggctggctgcctctgtcgttcgcagtcgccgcacatttcaagtttgctacggttcaaagtccaaacccaagatacaaataccagcaccagcagcaccatttcgttttcatcgcagtggttattttaaatcgaaattctccaatctgggcacactttcgatggggggggggggggggttacgaagatcccggtcgtgcgataagcagacgacatttatgccaggtagacacttccaacgcgtcaccgattgcactaggttattctgacagcaatcacctcttatcggaaccgcgtgctcgagcaatccttatcagaccaccgaaattgcgtaccactggagttctcacaggccccccgccactgcgattattggactttcaacaataaatagtgagcgataggttttatcgcctccctcaattgttgcttatccccgccacctcattggcccgttttcggttatagaatcagatcgtacatatgtacatacatatatttaagacttgtttttcagctggtttatcaagtaagctggctaaccatagtgatgtaacagcgataagaacaggtgtggagagcccatcttcagatctcaagttgcttacctaaaccgcatgccgataaagtgccatctgcgcagaggtcagagtccacttgccgaattttaaagcctaatctttatgatatgaactctgatattaccaaatcgcgccgtctgcaatctcgaatatgagttatttatgttttgtttttttttttatagcacagcgaaagatatatgggataagcaccaaatacaatcttattttatcatgccctttagacttgaaaggaatcttatcaacttacagctgtgtatgtagatttaaaatactaagtgaaatctaagtgaattgttacccctgtttattgtcattatgtattgagcgaggcaaactagaatgctaagtatattatagtatatgtgttcataggctctccaccttagttttgacaagaaatataaacgactttacataattgtaatatatatctttcgaatcttgataagccgactgataggcgacctagattcttagaaatttgtctagccacgtcgaaaaagttgaattttaaaaaacgcattatcgaggctaactgcgcatacccctcaaacgatgagtacacccatcttatatacacacttgtaggtgtttattggacccaatcacatatccatttcgccacaagataaggcccaatcgatctgaagagagcgaattcccggaatatcgccggtcaatacactccacacgggcacacaccccccaccacacactccacttttcgacgagcctctcgactggtgacgcatccataccaataccatactataccatactatatcatacaataccaaactctaccatacaatgtaccataccaaaagcacaatcgactgtgggctatactcgtagtatctccgtctcggcgctccgctccgagtgcttttaagaccctagcgaacccgttgtgctcacagtcgattcagtcaacgctcggcgtccaaccgatcaagtcgctttataagaagggggatccgaagcatccccagtgggaatttctcgtgtgtgcatctggcctaggatttcgcaattgtcatctacctattccctctccctacaacgtttataaataccacgctcacacattgcggtgcaattaacacaacccggaaacagtttacaccgaattgctttaattcgactagaaggtttgttttcgtgtcttttattcatctcctaccacaacaagctgaaggtcggaaaagcgtaaacaatgcgcaatcgaaagcaacgggtttataatccgcaatggttgcatttttgcggcttacgtggaccgctttttgcgatctttcccctcgtatttatctcgctcccacttatgtgacccaaattcgggcacatgtttttgatagttgggataatctatttaaaaaaccttatcagcgggggggaactatcagtggttacataaaacccggcattggacccgcctccctcgcaagtaaatacatatgtatgtatgtatgtaggagcacaaggtcgagcccactcgatctagaaaatagtaacaatttaaattttgtgcaatataattaacgctgtagatgtggaccgcgtataggaaaagatcgcacgaccgcgcagactgtgaaaaaaaaaatatctcgtggactttggcccctcgtgcccagcgaaaagaaaaaaaaaacaagatcttataaaaagacaacaaatcgcgcatacattatttctgtgtgctttttaattttgccatgttgaggtggcttttgtagtggttattgttgcttctctcgccgatacgcaaacaaataaatgccggtagtggtcggtgctcaaaattattaagcatacgccgcatagtcgtcgccacaaagtgggtcatatgaaaatgaattcgtatcgtatcttgttgtggctatttcgagttggagctggtggtctttctggtttattgatatgtttggacaatagatatccgattggatgcactgaccttcaccaaggtttctatatcgatacaaggtttttcttaggctagagtctatcaaaacgaagtgtattttcgggcatgctgggagttcatgaggaacttttattcattttataaatagatatatataaataaacatacatatatgtgcatatatgcactgcacgtcgagttccaaacgttgaatagccactcgaacgaaacacaatcagcaatcaaatagttgtgcaatttatttgcgaatccaaacccggtgaaggtgtagaactgcagctgcctggcgaagcttacaaattatttatcgaagcaattatctttcgagtgaggagaggtgtactttgtctttgttccatccttgccagtcgaggccgttctagaattgaatgccatccattcgatggactgctgcccagagccacaatcacagacagactctatcgttagtctcgggcgatgataacccaagccccagctgaataaagctgcgctcagtgacgtcaatcatcaattgcatgtaaagtgttatgacatcgaaagctgtatattaattaatttatatatgtttgtataacgaatctgtagcgtgcaataattgaactttggactcgtacggctccaaacaaaacacttatgaaaacagagatacacaaatgtgaagtatctacaatctaaaacgcatttaaactcaacagcgagtgacaaaatggccaagatgtttttttgtttatgaatcacacggcgtgtttgtatgtctggcgatttccattccaccttatcagataatgtttactacgacccatctagaccacagagaaacaagttatcggtagtcaaaattgtggttttgatgggcgttcaccttggcgaaagatgagtttttcgattagcgcgtctgctgcatctgacttctatttgaattgcgctagatttcccttgactttagcttaaactttctatccgttgcttatgtacatatacctattatctgtctctcgcagcacttttcttgtacgtgggatatcattagcaacctacaggtatggccgaagcccatgccgccgtggcattctcgtttgccatcacccatgagggcttcgacatcaactatgaccacgaggtgctcaatttggtgtggaactcaggagttcgttcctggaaaaagcgattggctcgcgcaagggtaagttcaaatcgcagtttcaaatggattgcaacttatatgtaacttcttttcagaacggcgtacgcaatggcgtctatccggctcacatccagagcctctggttgatctcagcaatagcgctgggtctacactttgcgggctaccaggctccattcaatctgaccaaccgtatactggtgcacctgccttccaacacgataaactggcaggttaccgcctgctttttggccgctctggtggtctggctatcgatctgtttcaccatgagatacactctcaagctgctgctcatgtacaagggctggatgtacgagtccagagctcccggtagtcgtgtctctctgcccaccatgttgtgggtggcagtggtgcgggttctatctagttggaacaaaccgggtctgtacagcttccagggttctctgcccaggctgccactgccctccgttaaagacacgatgaccaggtacttgcgcagtgttcgaccgctgcttgatgatgagaactacacgcgcatggagcgcctggccaaagaattcgaacagaccatcggcaagaagctgcagtggtacctcatcctcaagagctggtggtccaccaactacgtgtcggattggtgggaggagtacgtctaccttcgtggtcgcagtcccctctgcgtgaacagcaacttctacggcacggatgcgatcttcatgaacctcaccgacaaacaggcggcgcgtgcggccaatgtgatttccctgcttctcaacttccgtcgacttatcgagcaccaggaactgcagcctgtaagtaatagcatttttaaaaatatttgtgtagatacagttttatgtgtgttaacgccgacacttgatctcgctaaatatttaaaatactttactgcacaattaactacgtcataaagccctcattagtcatatccgtttgctttgttggaatgtgtacatacatatgtacatatttgtatatgtaattaggacatatacttgataattgttgaaaaagaacgtatgtcttactttaaatctgtttaattatttttagatcatggttcagggcatgattcctctgtgctcctggcagtatgaacgtaccttcaacacagcacgcgtgccaggcctggaaaccgatcgtatcatccactacagggactccaatcacattgtggttctccacaagggctgctactacaagatgctcatctactacaagggtcgcatcctgcgcccatgcgaattgcaagtgtaagcgacttgtggccaaaaactttaagggacagtgattaattggtattattttgcaggcaaattgaggaaatcctgaagggcaaagcaactcccgtggaaggtgaggagcacttggctgccctgaccgcctggaatcgctccaagtgggcggaagctcgcaacacattcttctcgtggggagtcaatcaaacctctctgcgcaccatcgagtcggccgcttttgtgctctccctggatgatgagcccttcgagttcgatttggcgcgaccggaattgctggacaactttggcaagaagctgctgcacggcaatggctacaaccgctggtttgacaagtgtttcactgtctgtgtgggcaccaatggtcgcgttggcttcaatgccgaacacacctggtaagtggattccaatcgctgcagccaatatcttcctctcagcatccataaaatttctacgatttgccatacttaactatctgaaccgatttgtaaaattacaatccaaaaggtccgacgctgccatcgcgtcacacatgtgggagaacctgatcgtcgatgatcttgtatcggacgggtaatgattttcgattcctataccgcctgcaatttttcggtttcggttggctgcgtttagttatcatcacctatcacccattgtcccaatcaaaaattattattatttttattaactccggttgtggcctaacaatttatttacaccatctacactttttttatagggccgatgcaccggttttgggacacctgtgggagtatatatttggtgatgatatttatgggtaaacacttaactacaatgcacacaagcacaaagcaaagttattcaagtcatttttgggttgagtacgagagatcactaggcgctaaaagctttaatgatctcgccatacagtaaatactagcataacgaacttgaaacatacaaaatctagtatgcgaatgccagacacgttttaagggattattaatttattacatgaggaatagtttgatcagtacgcagcatattttatataagcttatgttggccatttcagttgtttttccttactttccttactgtctttatttactgtatttacaaattgtaatcaacccaaaagtaaacatttagtttattttgttttcgtgactaacaacaattacacaaaattaacaatactttgatttacgttgcttgccataaatttgcccacaaaccgtctccccacaatgctaacctattcccttggtaaccctgtagatatgacgaaacgggtaatacaaagggcaccccggcgttccagccacccacgcccactaggctcacttgggatcttaaaccatgcctggcgcagatcgaagaggccaccatcgatgtgacgaagcttatcaacgaggtcaatctgcgcatcctggtgcaccaggattacggcaagggctttatgaagaagtgccgcatctcaccagatgcctacatacaaatggccctgcagttggcctactaccgagatgccggtcgcttctcgttgacatatgaggcttcaatgacccgtctgttccgcgaaggaagaactgagacagtgcgtccgtgcaccattgagtcatccgcctgggtcaaggccatgcagaacccaaatacaaccgtaagattttacaattttatgtaattagatcaaaggctaatccatatatccatgctgtacagaacgatgagcgtgtgaagatgatgcaggctgcctgcgatcgtcaccagttgggctaccaggatgccatgtgcggtcgtggcatcgacaggcatctgttctgcctgtatgtggtctccaagtacctggaggtggattcacccttcctcaacgaggtgctcagcgaaccctggcgcctctctactagtcagactccgcacggccagacgcccaagatggacctgaagaagcatccgaactgcatcagcgctggaggcggctttgggcccgtggccgatgatggttacggtgtgtcgtacattattgccggagagaacctgatattcttccatatctcagcgaagactacgtgccagcaaacggtaatgaggagccctgattcatggcatggagcacagctaatcgaattgttttctttacaggatgtgcaccgcttcgctcagaacatatcgcaggctctgtcagacattcgcagcatgttcgagcagcacatgaaggaccatccgaagcccgccaaatcactcacaaacggcaaatccacataatcccgtttagtccatgtagtcgagattcttgttagcatttgtttttacccccctagttggtcgttttaaacacatctgatacatccgtctagttcgaaatgaagtgcaaaagtcgtcgtgagagttatacataaacaatgcaattttttataaacaattgtgacttggctggttttaagatttagtctttagatacttttgcacaatatttgatgtttctcaatcaattagtctgtaatcgaagaaatcgcgtaaccttaagtgctataaatatatttcattttaagcgtacgattggcctttgtctctatctctatcacgtcgccaaaggattggcatgtatagttactccattgatcttcttgtccacatggggacgatagttcttgggattgacgggcagtttctccagttcatccagggcatcgaatccatcgatcacacggccaaagagcgtgtacttcaagtcaagatttggctgggcggcataggtaatgaagaactggctggcattggcgttcggtccgttgttggccatggaaaccattcctcgatcagtgtgctgaagaattaagtggtcaagaattaaaggatttcttcttgtatcttgggaatcttttagactgaaaaacgaacccaaccacatgacatattaaaatgtaaaatgatatggatgtcaacatacattttgagattcatgtgctggttacattctaagattagatacaatataccctttaaagccggaatgctgggtattaaagccagctgtcatggcgcaactgaatgagggtttttctggtaaaacctaggtagccggctcaccttaatggtctccttgaattcgtcgtcgaacttctggccccaaatggactgtccattctttccggtgttcgtaggatctccagtttggacaataaatcccttgatgtttcggatgaagacgcagccgctgtaatagtcgctcgcacacagggcgaggaaattttcgcaggccttggggcaggcatcgcagaagagctctattttgaggtcacccacgtcggtgtgcagcgttacagactgcaaacaacacaacaaaatcggttaaaactgtaagaaatcagatattccaacttttgtttaccattttaaaagtgattgtgcagccctcgtttcgatatgcaatcggtccattaacgataacagaaatcgaaaacagcactatttggtattcccgtgaccgaaggtcacacttttaggcgcgaattctgccgcataaagtgatttttctcttcgcacttcaactaa

SEQ ID NO: 27617 - DNA, 2869 bp, DROSOPHILA
caccgcaacgcttacaacgttaacattgcgcgcgcgtctttgcattttcttgtttgctgcttcgtcgtccgtcgtccttcccgtgttgttcttattgttttttcccgctttgtgcgctctttattgtttcgccctttctagcattttgatttgaaagtggagactgcaattggttaccatttcaagaaacacttttcttgtacgtgggatatcattagcaacctacaggtatggccgaagcccatgccgccgtggcattctcgtttgccatcacccatgagggcttcgacatcaactatgaccacgaggtgctcaatttggtgtggaactcaggagttcgttcctggaaaaagcgattggctcgcgcaaggaacggcgtacgcaatggcgtctatccggctcacatccagagcctctggttgatctcagcaatagcgctgggtctacactttgcgggctaccaggctccattcaatctgaccaaccgtatactggtgcacctgccttccaacacgataaactggcaggttaccgcctgctttttggccgctctggtggtctggctatcgatctgtttcaccatgagatacactctcaagctgctgctcatgtacaagggctggatgtacgagtccagagctcccggtagtcgtgtctctctgcccaccatgttgtgggtggcagtggtgcgggttctatctagttggaacaaaccgggtctgtacagcttccagggttctctgcccaggctgccactgccctccgttaaagacacgatgaccaggtacttgcgcagtgttcgaccgctgcttgatgatgagaactacacgcgcatggagcgcctggccaaagaattcgaacagaccatcggcaagaagctgcagtggtacctcatcctcaagagctggtggtccaccaactacgtgtcggattggtgggaggagtacgtctaccttcgtggtcgcagtcccctctgcgtgaacagcaacttctacggcacggatgcgatcttcatgaacctcaccgacaaacaggcggcgcgtgcggccaatgtgatttccctgcttctcaacttccgtcgacttatcgagcaccaggaactgcagcctatcatggttcagggcatgattcctctgtgctcctggcagtatgaacgtaccttcaacacagcacgcgtgccaggcctggaaaccgatcgtatcatccactacagggactccaatcacattgtggttctccacaagggctgctactacaagatgctcatctactacaagggtcgcatcctgcgcccatgcgaattgcaagtgcaaattgaggaaatcctgaagggcaaagcaactcccgtggaaggtgaggagcacttggctgccctgaccgcctggaatcgctccaagtgggcggaagctcgcaacacattcttctcgtggggagtcaatcaaacctctctgcgcaccatcgagtcggccgcttttgtgctctccctggatgatgagcccttcgagttcgatttggcgcgaccggaattgctggacaactttggcaagaagctgctgcacggcaatggctacaaccgctggtttgacaagtgtttcactgtctgtgtgggcaccaatggtcgcgttggcttcaatgccgaacacacctggtccgacgctgccatcgcgtcacacatgtgggagaacctgatcgtcgatgatcttgtatcggacggatatgacgaaacgggtaatacaaagggcaccccggcgttccagccacccacgcccactaggctcacttgggatcttaaaccatgcctggcgcagatcgaagaggccaccatcgatgtgacgaagcttatcaacgaggtcaatctgcgcatcctggtgcaccaggattacggcaagggctttatgaagaagtgccgcatctcaccagatgcctacatacaaatggccctgcagttggcctactaccgagatgccggtcgcttctcgttgacatatgaggcttcaatgacccgtctgttccgcgaaggaagaactgagacagtgcgtccgtgcaccattgagtcatccgcctgggtcaaggccatgcagaacccaaatacaaccaacgatgagcgtgtgaagatgatgcaggctgcctgcgatcgtcaccagttgggctaccaggatgccatgtgcggtcgtggcatcgacaggcatctgttctgcctgtatgtggtctccaagtacctggaggtggattcacccttcctcaacgaggtgctcagcgaaccctggcgcctctctactagtcagactccgcacggccagacgcccaagatggacctgaagaagcatccgaactgcatcagcgctggaggcggctttgggcccgtggccgatgatggttacggtgtgtcgtacattattgccggagagaacctgatattcttccatatctcagcgaagactacgtgccagcaaacggatgtgcaccgcttcgctcagaacatatcgcaggctctgtcagacattcgcagcatgttcgagcagcacatgaaggaccatccgaagcccgccaaatcactcacaaacggcaaatccacataatcccgtttagtccatgtagtcgagattcttgttagcatttgtttttacccccctagttggtcgttttaaacacatctgatacatccgtctagttcgaaatgaagtgcaaaagtcgtcgtgagagttatacataaacaatgcaattttttataaacaattgtgacttggctggttttaagatttagtctttagatacttttgcacaatatttgatgtttctcaatcaattagtctgtaatcgaagaaatcgcgtaaccttaagtgctataaatatatttcattttaagcgt

SEQ ID NO: 27618 - protein, 782 aa, DROSOPHILA
MAEAHAAVAFSFAITHEGFDINYDHEVLNLVWNSGVRSWKKRLARARNGVRNGVYPAHIQSLWLISAIALGLHFAGYQAPFNLTNRILVHLPSNTINWQVTACFLAALVVWLSICFTMRYTLKLLLMYKGWMYESRAPGSRVSLPTMLWVAVVRVLSSWNKPGLYSFQGSLPRLPLPSVKDTMTRYLRSVRPLLDDENYTRMERLAKEFEQTIGKKLQWYLILKSWWSTNYVSDWWEEYVYLRGRSPLCVNSNFYGTDAIFMNLTDKQAARAANVISLLLNFRRLIEHQELQPIMVQGMIPLCSWQYERTFNTARVPGLETDRIIHYRDSNHIVVLHKGCYYKMLIYYKGRILRPCELQVQIEEILKGKATPVEGEEHLAALTAWNRSKWAEARNTFFSWGVNQTSLRTIESAAFVLSLDDEPFEFDLARPELLDNFGKKLLHGNGYNRWFDKCFTVCVGTNGRVGFNAEHTWSDAAIASHMWENLIVDDLVSDGYDETGNTKGTPAFQPPTPTRLTWDLKPCLAQIEEATIDVTKLINEVNLRILVHQDYGKGFMKKCRISPDAYIQMALQLAYYRDAGRFSLTYEASMTRLFREGRTETVRPCTIESSAWVKAMQNPNTTNDERVKMMQAACDRHQLGYQDAMCGRGIDRHLFCLYVVSKYLEVDSPFLNEVLSEPWRLSTSQTPHGQTPKMDLKKHPNCISAGGGFGPVADDGYGVSYIIAGENLIFFHISAKTTCQQTDVHRFAQNISQALSDIRSMFEQHMKDHPKPAKSLTNGKST

SEQ ID NO: 27619 - DNA, 2917 bp, DROSOPHILA
ccacgacgccggcaaggttggaggtgatattggaagtgctgctggaaatgtcgctggagatgcatcaaatgctgctggagatgttgcgcatgatgctgcaaatgctgctggaagtgtcgctggaagtgcggcaaatgctgctggagatgttgcaaatgccgctggaaatgtagctggggatgcagcaaatgctgctggagatgttgcgcatgcagctggaaatgcggccggagatgttgcaaatgccgccggaaatgttgctggaaatgcatcaaatgctgctggagatgttgcaagtgctgctggaaatgttgctggaagtgttgctaatgctgctggaaatgtagctggagatgcagcaaatgctgctggtgatgttgcaaatgccgctggaaatgtcgctggagatgttgcaaatgccgctggaaatgtcgctggagatgttgcaaatgctgctggaaatgtcgctggagatgttgcaaatgccgctggaaacgtagctggagatgtagctaatgctgctggaaatgttgcacatgatgcaagcaacattttccattccatattttagagtttctctctacttttctactcatttgtcctaataaatgaacgagcaaattaatgacccatacacttgtcatactttaagcactaaatctctagaaaatccatttacatttctgttttgacttctgaacgcttgcagtcgatttatttttagctttctgtgactaggacctacttgagactgtcgtttatagattaaatcactttatagataccgtaaggaaaaccctgaaactaaatcaaatgagccatcaatcagaatcgaaacttaccgccaaacagttgggaatcaagaaacactcatgtgtgattcgttattattggcggcgtcaaagaagtcgttaactcccacataagccaaacgataagaattgcctataaatgtagtgttgctaatagaagggactcagtaattctctgatattacgaaaagcaataacatgcagtcttttacaattctaacccttttcaccatcgttttgatggtccaaaattcaagagctggaactctcagcattgggtccctgatgggagatgtgtcccaagtggctgttgctggggagaaggtcatccatcaactggaaaacgctgtggccagctctcaatcggattttgtccagccaaccactttgaacattctaagcgacatgggaaacgccttgggtgatctggctgtattctactgtatttatatttgtttgatgtttacctaaaatatttaatattcttgcagaacgcccttactagtttaagagtggataacgattatatgcaacccgaggccaccaatctcttgggcaatgttctgggtggagtgggcactggtcttggagatttggctgtaagtaacagatctggaaagtccgttggaaacttccaagaataagctcattcttttctgctcatagaatgccattaccagtcttagtgttcagatgacgaacgcacctcaggctcgcagtctttcggtatgtgaagttttaaaacttataatattgaattaataaaatattctacatttttttagtccaatggtgcttctattatagccaaaggaggagtaagcttcgacgaatctcatgatttccatatgagttatactaattaaacttgatttgcaggccgtgagtgcgaagactattgccgctgctgcagatgcagctgccccttatataaagcagctaaatgctggcctaggcgatctggctgtaagtggtccttaagaacaattgttaatctgatgtgtaacgaattgtaataccccctcacagaatgccctcaccaacctctgaagaactttggagcagttcaattaacaaataaatattcaatcgcgcaaagagcttagtgagtgcgtcttttgtgctcccattttgggcagagttcatcaacaagttgggcatcaattagtgttgggttgttttgaaatccaagaagagtaaacaaggtcggattccagaatcagaaatgcgtgcatctgcttctagctcgatctccaaagggggttatatactcgtattcagaatggaagaggggtcaaatgatacgaggtgaatcgaagtcggaacacgtgattgccaacaacattaggggctcaagtttccaaaaaaaaaaaaaaatggaataaaatccatcagtagaaggaggaagcgccatgcacacatgccggtttttgaataatttttattatgacaagtatttaggttgcctttgttcctcgaacagaagcgaattaggtcatctcgaggggaatgggaatcatacggaatatggtggtaccccaactccggaagaccctgctccctgctcctcgaggcctgctattaagtcactttatcgagcggcaaatgtctgtttagctgactcctccgctcacacacgatcccaatcgctcccccaaaggaaagtcgtgccagcctgacctgtaattatgaaaattaacaaacattttggtaattaatttcggcaaccctttggtcgcctcttgcggcttgtgtggcaaccataatcccgcatcaattaaaatgcacagcccgtaatccccacccacaaaacctgactaaccgaggttcgtgcgaacactggatacatattacaatagacaaaaattgtgaactgcagctattggcaaacaggaactttaaacaccctttagcatacgatttttacaagtttttattgaaataatcatatggttcgtagcagcaacatgaaaaaatttataagcgattataataattctataataattaacacagcctatgttttgtagagtataaatatgataatagaaatcgttttcattaatttgtgacactctctgtccatcaattggccgtcattgttt

SEQ ID NO: 27620 - DNA, 608 bp, DROSOPHILA
aagcaataacatgcagtcttttacaattctaacccttttcaccatcgttttgatggtccaaaattcaagagctggaactctcagcattgggtccctgatgggagatgtgtcccaagtggctgttgctggggagaaggtcatccatcaactggaaaacgctgtggccagctctcaatcggattttgtccagccaaccactttgaacattctaagcgacatgggaaacgccttgggtgatctggctaacgcccttactagtttaagagtggataacgattatatgcaacccgaggccaccaatctcttgggcaatgttctgggtggagtgggcactggtcttggagatttggctaatgccattaccagtcttagtgttcagatgacgaacgcacctcaggctcgcagtctttcgtccaatggtgcttctattatagccaaaggaggagccgtgagtgcgaagactattgccgctgctgcagatgcagctgccccttatataaagcagctaaatgctggcctaggcgatctggctaatgccctcaccaacctctgaagaactttggagcagttcaattaacaaataaatattcaatcgcgcaaagagctta

SEQ ID NO: 27621 - protein, 180 aa, DROSOPHILA
MQSFTILTLFTIVLMVQNSRAGTLSIGSLMGDVSQVAVAGEKVIHQLENAVASSQSDFVQPTTLNILSDMGNALGDLANALTSLRVDNDYMQPEATNLLGNVLGGVGTGLGDLANAITSLSVQMTNAPQARSLSSNGASIIAKGGAVSAKTIAAAADAAAPYIKQLNAGLGDLANALTNL

SEQ ID NO: 27622 - DNA, 6934 bp, DROSOPHILA
caggggaaaagtgagtgacatttaccgccgttcttctgcttgtgtatcgtctgatacagacgcttgtaccactcatgctgatgcggctccttgacctcctgcatgtggataaggataaggaacaatactcgtatcaattcgtctcacttcgagttcaaaaccccccgttgtgccccagcgagtggggcttcctttaccgatctcaggatgatgggcattccatcgttggtcaccggaccgatgccgtcgtactgccttcgccctaactgtgccattttccggggacgatcgctgcccgtctccggttcgctcatatactcgtgcttgactttgtagactggaaaccgcagatggagtttggttagtttttggaggtctatgggggctcggatcattggtttatatttaaggtttaagggttaaacagggacacaaacatcacagctacattcagtgttgtgcgtcgacatgagctcgcttcacctggtcacttgccctacccacatcggctatacttactgacttcattgggcctgtaggctggacgactggcgtcggacagctggcgccgcacaaacggcctctgcagctccgagttggacgaagagcgttcgaatgcttttcggggcggtaaacgacggaaaaacgttagcgaaatcgagcgaattttggggcggaaaatggagaatttgacataaagacatagtcgtagaagtcaactttttccaacactcaaaggtaatggtacaacaaagtgctattatattctataatttagaatcacactatactactattctactctatccacatggtagctaatggggaacttattatataataatgcgcaccaaaatatcaacaggtaattgatatttacttgtaccaaaatagaaacatgtgatcgttttggaaagcagaagatagtgacgttaagaattatctttcacggtctatctgcaaaagtatcttaaagtttctttccatggtatttataatattaaataattattttcagtttctttgagtattggactaggacccgactaaatactgagaggaataggagcgaactgcatatagtacttctgatcttgtcggagacactggcactgggcgccacgggaccaaagtgtccggagcagtcggtttcggcgtagtccgagttggagttcacggagttgagggaggctggtgcggtgggaggtgggccaccttctccgttctccgcactggaccacggcgggatcgtagtcgtcgtcttctgttgctgctgcgccgtatagcgacggggcagagtgggggactcgaagcggaccggacggaactccttgcgtccgctcaacaccggcgatggctggggtgtccaaacgggcagcgagggtggcggcgggggcggtggcgtggccgaggtggcgcccgattgatttagatcgccgctggaaccgtaaggtgtccacacgcctgtcgaaagtttttgaaagggtgggtgagcgagtgtgggcggcggtctttgcgtctttcatctggctggtgacattttcaggggcgccggcgagttcagagattgagttttccgccccgacatttacacttgtcaacaagtttatgctggctggctatgcttaaactgcagatctgctcgaaaatagctttttgggcagtcaacaagccgagcggagacaaattgacaaacaaacacagcgacgtagaacagccataattaatacgacggcgaccgaggaagccgccatttggcagccattcaaaatttggccaacacacataggcaaactaacacaaacacacacacagagacgcacactgacgctcctctcacacggatggaatgagtcatcgcatttggcgcatgtttagcattcacaaaacacacacacatgcaggaaaataaaataaatttatattcccaaccgttaaagaactgggcgaggtgtgatactacggtttccattacactgaaaacctttcttatagtgccttatcaaaaaggtttaaaatatgtcacaaggctcgaattgcttattaccaacaaaacgaagaaatgcccaaaaaccattataatatattttattcaattcaattcactttaaagcttctaaaaatgtaaattttcccatagaaccctaaatatgataactgtgatttatgttcacaaatttatcccaatttctaatggtcgtacaatgtgaagcctatcatccattttgaccagcgattaaccaatttaatccgcagaagaatgtcttgcataattgaaaccaattgcctacaattgtgatttttcctagccagtattattttgtttcttgtcaactaaccctcgcactgtctgtgcagctttgcatcgggtctagccaaaaactttcattctacagatttatatgccacctgtaaaaaaacaaaaaccacaaacaaacactgcgagatcacagatacccgtacattttccgattcagatacagatagatacatatagcggtgccctaggcgcattgccttcgagacattgacacgtatttggccgaggagcagtggtgctgcctctaaattcgtttagagcggatttcttgggtttcacaggggaggtgggtgttggtagaaactgttaggggaggtggtgaggtggtgctgatgttggtgtttcgtatgtgggcgcgctgacgtctttattcaatcagcacttaattgaattatacaatcgtatcaaaaggaaatttctgcttgcaaatgtcaatcaaactcgcacacaccgagatcctctgagtcactcagattagtcgcctaaatctgagggatttacctgagcagattccacgatgcgactacggatacggatacgaaaacggatggtccaccgatttggatttcaagagcgatttgctgattgagttgctgactccgcgcacggctcgaggcgaactgaattttgcgtgactcgccagcgtcgagcagagctaaaagcccgggaatggggatggattcggaatcggattcagattcggaatgggaatggctatgggcagggagaaacaaaaggcaagagccaaacaacacacccagttttggcaacgggaggagcctccgccccatagtcacagtccccaaatagcagatcaattaccattctggctgctcggtgctcgatcaaccggagacaggggaacctcgaggggaaaacgccaattatgcgtgcaatgcgaaatggaacggaagtgtgtgcggcggagtacagtgaagcagctacaaaagtcacaaacaaaacatcgaagcattaaaacatcaaaacaactcttcggcaaagccagacaaaaagcaaacccaaaacaaaaagcaaagccaaacacaaagccaactcgattggtttggcttgacttggcttggcacttccggtggccactgacgctaacgctactgctgctgctttagaacaaatcagatggaaaattcgaaaattcgcttggaaaaatgttaatagtggcacttgagagcgcgacacacccgctaaggagcgcccgcagtcgagcagaagccgcatttcgctggctttcgttgttcggggcaattcatttcaaatttatcgattagcgcataagaaccaattggaaaacaacacaaatgggactccactgaaacaaaaaaaaaaagaaccctgaaggacagatttaaattctccaaacgatcgaaaaagttttccattacaacatttcatagtattaatcgcataactctgaaatgacaaatgaaatgatcgagataactccaacctcattatatacatggtataatgttaaacagatttatagagggaaataaactttttctgagaaactagttcccgaacctagtcaaagacttttctcagtgtttgcatcattgcaggaatgggggaaccatttaattttaactctggatagtttgtaaaatgcttttcaatagcagaacccatatgttcgctgcggccttgtaaatttcacacaaaaggtgatggagaaaatagttcaggaggagtggccggggggatctgggcaacctgtcacggattggaaacgggagttcggatcgggagttccgagtcagagtgcgacctgtcatgggtatgagaatggacttgggtgcggctggctgtggcaaattaagagcatttcccgagttgatttatgtggaattcacgggagtacgtctgcgtgtggctcgtggatgaggcgggaactcctccactgcggattatttatggagtgcatatctgcggttcattcggaactgattggaatagccctagttggaagccgcataatgggcactgtgatgaagggaagtgattaggataagaatacaatgcctatttaatttgtttttatttaatttgatgtagcaatccgctttagaaaattacaaaatatatagaaaataagattttcctttaaattattattgtatttttataagctatgtgaagtaatatagtcgtagagataaaaatgtagacataattctagccggattccagcaccttgtgcacgatctgtatatttattcatctgcccacctattgactcatatattccattccaatcgctattattaagatctcttttcagcaaattgataatcccaacgatggcaacgtcatcaaacagaattaaatcgccaattcccggcaagcagcgaaggcaaaggaaacgttgtgttcaagttcaactgaatttataccaaactataaattattttcactcactaaaagtcttcaaatttatatttttcattcttcggcatggcaaaataaaaagtctgaaccgaaaaaaaatcgagaatggggaaaatgttaaaaatatcagcatacaaattaatgctttaaataaatgtgtaggagatcgaaatttccaaagcatagataatgccatcaaatgacgccaatcaaggaatgaaagtttgatggatttgcctacgcgcccctttaaatcctcaaaggggttttatggcccacggcggatggaagactctgctgaatggaagattcaacggacctggcaagaaaacatcaaatggatcttgatggcgacatggcagagtactcagctctccgtgttgatcttatttagcaggcatttttattggagactgtaaaaggcggcgtccgcgtgggcggctaacacgaatagcgaacaacaattgggagcattgcaaatattgtaataaatatacaacattttctccctcggattgtacgtcatgccgtatatttagtaatggcgcacctcgttccagtttggattttccaaaatgtttccctaaatcatgtggaaatttttggtgtgtgcacaattaacatgaactaatgtgaaatatttaaaataaacaatcgcaactgccaaaggcaaaatcaagttcagcccaactgagaaaaagaacagaaatgaacgagcgaacacaaaaaatgatctataaatacgagcaataaatttggaaatgaataagtcgaaaggtggaaagttgacggggaaactgggaaatcgcgacgaaagagccactcaactcaactcaactcttcgtcagcttcgccagcgaatcatcaaagacaacccactgaaaacgtcatgttggccatttgtcacacttgtcgtggatgcatctgcgggatgcgaacgcatccgccagatacaatttacctgagcctggtggcgcgcgcgccttgaatttgggtgcaaacatcgcggtgcccgtcgtgctttgtgtgtgctctgcaaaaatcaaattgcaaatggccagaacggcgatttagatcgggatactctttcacttcaagcacttcacttcgtgtgcagctcgtgcatcttggtatctttttgataattttcgatactgaggaagtggcaaaacgtttgcgcggcacacaaacaaattcgaaaacacgaaacactcaactaaccctgccccatttgtgctgtggaaatatagaagcgacttcttttttgaatttcaatttccgacttcggacttttctatattttctattttctgttttctgacgcgccttcgcgttgctcacacgactttaacacgacgacgactacgaaacggttgaattttcgggcaggttgcttggactttcgttagccagatccccagcccaaaaatctcaatttgtgtgcgagcgcaagacaacaaatttgttgaacgttctcgttctcagatgaaaaattcgtatttctttccgtttcgcccagtataaacaactatttttttatgctttcgtaaacagagacagtggcaggagaggaggccaagaagagcgatcttctgggcagtgaatgcgagagatcttcaactcaagtgggtcataaattatgaacgcagtgcagataaagataaatatatagcggtgtgtgtaagtgtgtaggcgagtgtggcaagtgaccaaggagaagccttcacgtcgtatacgcaatgtgctgaaacaaaaaccgaccaaaattcgttgcctactttcaggcagcgcagcgaaatttaaagtgtttttggctaaaaataaacttaacataattgcacagatatcgtgaaggggttaaacaattagacacagaggcggggtggcggggtgcgtggatcgtagccagggggtggtgggaaggagaggcgttctggggttttctgacacaccattcgcgtagaggaagcccttggccagctgcagttcgctgtcgatctccttgagaagatcactttccgaccagctgcgccgctgcctctgctgctgcagctgctgcgcgttaaggaggaagcgcgtctgcttgggtgggcgtggtcgcagccggacacccattcccgttgccgctgagttcgcctcctcggatgcgatggctctgtctgaacgatagcattcggttagatcttcgccatctagcggagtccgatc

SEQ ID NO: 27623 - DNA, 711 bp, DROSOPHILA
ttcgtgttttcgaatttgtttgtgtgccgcgcaaacgttttgccacttcctcagtatcgaaaattatcaaaaagataccaagatgcacgagctgcacacgaagtgaagtgcttgaagtgaaagagtatcccgatctaaatcgccgttctggccatttgcaatttgatttttgcagagcacacacaaagcacgacgggcaccgcgatgtttgcacccaaattcaaggcgcgcgcgccaccaggctcaggcgtgtggacaccttacggttccagcggcgatctaaatcaatcgggcgccacctcggccacgccaccgcccccgccgccaccctcgctgcccgtttggacaccccagccatcgccggtgttgagcggacgcaaggagttccgtccggtccgcttcgagtcccccactctgccccgtcgctatacggcgcagcagcaacagaagacgacgactacgatcccgccgtggtccagtgcggagaacggagaaggtggcccacctcccaccgcaccagcctccctcaactccgtgaactccaactcggactacgccgaaaccgactgctccggacactttggtcccgtggcgcccagtgccagtgtctccgacaagatcagaagtactatatgcagttcgctcctattcctctcagtatttagtcgggtcctagtccaatactcaaagaaactgaaaataattatttaa

SEQ ID NO: 27624 - protein, 168 aa, DROSOPHILA
MFAPKFKARAPPGSGVWTPYGSSGDLNQSGATSATPPPPPPPSLPVWTPQPSPVLSGRKEFRPVRFESPTLPRRYTAQQQQKTTTTIPPWSSAENGEGGPPPTAPASLNSVNSNSDYAETDCSGHFGPVAPSASVSDKIRSTICSSLLFLSVFSRVLVQYSKKLKIII

SEQ ID NO: 27625 - DNA, 2648 bp, DROSOPHILA
aaaagatgagcaactaaacttagcgcaaattctgattggatcgattaaacgtttgtgggacaatttgtagttgtaagtgaccattatatcactaggccataagactacgctaagttttttttatcgaattctacattattaattatggccccacatgctatatataaatacataaatttcgtagttctgtaggttttgaaactgaagtgcttatataaacaaaattgttagaccgtacaccgcatcgaacctttttttttacaccaagttttttttttttattattattattattattatgactattatgtattattacatattgactaagctaaactgtaaaaagattctcataactgtttgatttaagttgacacatacaaaatacaaaaggatttgcaaaaaaaattacacaaaaatcaccaatggaaacgtataagtctaattgaaagaaagaaagaaaagaagaaaaaaaaggaaaaaaccacgaaaaagacagtaaccagccaagtttactatatatataaggacactcgacgatctacgatctaagttgatgaaaagatattttcaaaaaatatgcaacagaaagaaaaaaaacgcacacacttagagaaaactgcaaaatacgaattttctcgttcgatttgcattaattttaatttgaacggtattgctttctttcgtctatattttgtgtgtaagtttttaatgtgtaaattgtaaaattatttgttttcctaacttaaacagccagacagcaaaacgaaactgcaaactttttgacataaataataaatattaaataattattttaaaagccgtgtgtttatttcattaattatatacatatacaacatataaaggcgaatttttcagctctgcgttgttgcagctggaacaaagtttaaataccatatttcatattggaactgcgtggagttaacctttaacctttaactcttgacacacacacacacaaacccgcaggaaaagagcagttttttcgcgtgtcaaagtgtacatttaattgcaagttaattatactttagacgttcttgccgctcttcaagggccacgccccctccccctcctttaccaaacgatcgccgcccaccacgttggatttgtgtccttgtgttgtgtgcgttgtgttttccgctcttatgtcaaaacataacaaaaaaaaaaaaatgtactatgtgttaaattacaatatttggaacatttcgactagatctccttcttggactcgtccacttccgtttccgctgccattgctgttgcattcaatggcggattttcagattcctcggcatcgtcatcactgacgttctccgtcttcttgccgcccggaacgaaggggcaaacgccgcccttgcactcgaatgggaagtcgggtccctttttgatcacattgccatcgtcgtccttcttctcccagggattccagtagcgcaacaggatcggctgcacaaatttgtgccaaatgtacagaagcagtggaatgataatacagggcacgcaaaccattgttcgggctttaaaaatggttagttattggcgttgcaagtgattacaacaattgcggaacgtacctatttaatgttagcttactggctccggaaaaaaagtatttctcgctttgatttccttaattcaactatttatttattgtcaaaaatgtcagtgtagccagttcacttgtgtttggtattgagcctaaaaacgccacgcatatactgttatcttaaaaaaaaaaaatacgtactctctagcaaagaacgcaaccggttggactaatatagtccggactcgaaccaaaccgtttgaaatctattaacccttatgtgcacaccttagctttttttttgcttttttttttagattttttaacaccatgcgcatttacaatacagttgaaattttgtcatatcatatatttatttcatttgcacagtgcttaacccatcaatgggcaacggtagggaacgccagagcgacaacagtactccctgcccgcctgcagattggtattaacccattgattgtgacagttcttgatgaacaaataggcccgttccttgtgacaatcgtgacccagtgcggagcatactatatttgcggaattcggcagatgttgtacgatctaaaatggacgaaatggtgagttatagagcgcttctcctcatcttttcctcctcgtttccccagtactcaccgtctctaggcatttggtttgacactgcttgcgaccgatggcattgcagggaaacatatgatccaattcctggtggataagtggctttgtcggcaagccatttgggatttgcgaggagaggaagacgccgcatgtgcacggcactggctgattatcctgcacaggcagtcccgctgtcggtggcaagggaatggtgctaaccagactgctgctgctcgatgggtttgtgctcatcagcggactcgcggtggttggctccatcgatcgtgtggatccttccgacgatccgatgatgggtgcctcgccaacggtcgtttcggtggtgccattgttaccaatggtttccgtgctggcttccaattcgcttgcgggcgttgtcataatcacaaactcaacggccgtgggccaatcctcttcggctgttgtg

SEQ ID NO: 27626 - DNA, 591 bp, DROSOPHILA
caaagcgagaaatactttttttccggagccagtaagctaacattaaatagcccgaacaatggtttgcgtgccctgtattatcattccactgcttctgtacatttggcacaaatttgtgcagccgatcctgttgcgctactggaatccctgggagaagaaggacgacgatggcaatgtgatcaaaaagggacccgacttcccattcgagtgcaagggcggcgtttgccccttcgttccgggcggcaagaagacggagaacgtcagtgatgacgatgccgaggaatctgaaaatccgccattgaatgcaacagcaatggcagcggaaacggaagtggacgagtccaagaaggagatctagtcgaaatgttccaaatattgtaatttaacacatagtacatttttttttttttgttatgttttgacataagagcggaaaacacaacgcacacaacacaaggacacaaatccaacgtggtgggcggcgatcgtttggtaaaggagggggagggggcgtggcccttgaagagcggcaagaacgtctaaagtataattaacttgcaattaaatgtacactttgacacgcgaaaaaac

SEQ ID NO: 27627 - protein, 99 aa, DROSOPHILA
MVCVPCIIIPLLLYIWHKFVQPILLRYWNPWEKKDDDGNVIKKGPDFPFECKGGVCPFVPGGKKTENVSDDDAEESENPPLNATAMAAETEVDESKKEI

SEQ ID NO: 27628 - DNA, 23914 bp, DROSOPHILA
taaggctcattcacgatcatcacgatcaagtatgaattataatgactcacttctcgtcctgattaaggttgcgcacattgacagccgaggagacggactgaacgcggtgcggattctgggtgcggtacctcaccgtcgagtaatccgaatcgtagttgggctcgggctctgagacgtatccgttgctcttgtacgacggacgggctgatcggagacggagaactgattagtcgaggtaagtattcagttgtacaagcacaaagcggttcctcaagctctactttcacataatcattacttcgtcttggtggtgtactggcggacatgatgttagcgttgttttgtggttttgcgttcggtgagttaggccttagattaggttagtcgtgaaatttagtagaagcttccaaattttcaatgatctacacacgggaacatgagagaaatcataggtaaaccaaataatacaacatgcatgtaaacaaaataaaaccaaaatagaatgaagcgctctatttgttagaggttagaggtcactagaccctgtctatatatacaggcgaaagcgagctactaaaggggaggagctactaggggatagcatagtttatagatcaaagaacaaagaatcacctctaggacacttgtagcgaatcacgaaatcatcttggggcgaaagcgaatggggtaatgagaaacgagagtttttttttaaagacaccgaaacgataagtcggagatcagatcaggctgaagcattagaaggattggggaatggacattttcggggagtgggaatgagctgggatgggaatggggtgtggtgtggtgtactaggaaatttgaatgcttcagaccaggggaaaagtgagtgacatttaccgccgttcttctgcttgtgtatcgtctgatacagacgcttgtaccactcatgctgatgcggctccttgacctcctgcatgtggataaggataaggaacaatactcgtatcaattcgtctcacttcgagttcaaaaccccccgttgtgccccagcgagtggggcttcctttaccgatctcaggatgatgggcattccatcgttggtcaccggaccgatgccgtcgtactgccttcgccctaactgtgccattttccggggacgatcgctgcccgtctccggttcgctcatatactcgtgcttgactttgtagactggaaaccgcagatggagtttggttagtttttggaggtctatgggggctcggatcattggtttatatttaaggtttaagggttaaacagggacacaaacatcacagctacattcagtgttgtgcgtcgacatgagctcgcttcacctggtcacttgccctacccacatcggctatacttactgacttcattgggcctgtaggctggacgactggcgtcggacagctggcgccgcacaaacggcctctgcagctccgagttggacgaagagcgttcgaatgcttttcggggcggtaaacgacggaaaaacgttagcgaaatcgagcgaattttggggcggaaaatggagaatttgacataaagacatagtcgtagaagtcaactttttccaacactcaaaggtaatggtacaacaaagtgctattatattctataatttagaatcacactatactactattctactctatccacatggtagctaatggggaacttattatataataatgcgcaccaaaatatcaacaggtaattgatatttacttgtaccaaaatagaaacatgtgatcgttttggaaagcagaagatagtgacgttaagaattatctttcacggtctatctgcaaaagtatcttaaagtttctttccatggtatttataatattaaataattattttcagtttctttgagtattggactaggacccgactaaatactgagaggaataggagcgaactgcatatagtacttctgatcttgtcggagacactggcactgggcgccacgggaccaaagtgtccggagcagtcggtttcggcgtagtccgagttggagttcacggagttgagggaggctggtgcggtgggaggtgggccaccttctccgttctccgcactggaccacggcgggatcgtagtcgtcgtcttctgttgctgctgcgccgtatagcgacggggcagagtgggggactcgaagcggaccggacggaactccttgcgtccgctcaacaccggcgatggctggggtgtccaaacgggcagcgagggtggcggcgggggcggtggcgtggccgaggtggcgcccgattgatttagatcgccgctggaaccgtaaggtgtccacacgcctgtcgaaagtttttgaaagggtgggtgagcgagtgtgggcggcggtctttgcgtctttcatctggctggtgacattttcaggggcgccggcgagttcagagattgagttttccgccccgacatttacacttgtcaacaagtttatgctggctggctatgcttaaactgcagatctgctcgaaaatagctttttgggcagtcaacaagccgagcggagacaaattgacaaacaaacacagcgacgtagaacagccataattaatacgacggcgaccgaggaagccgccatttggcagccattcaaaatttggccaacacacataggcaaactaacacaaacacacacacagagacgcacactgacgctcctctcacacggatggaatgagtcatcgcatttggcgcatgtttagcattcacaaaacacacacacatgcaggaaaataaaataaatttatattcccaaccgttaaagaactgggcgaggtgtgatactacggtttccattacactgaaaacctttcttatagtgccttatcaaaaaggtttaaaatatgtcacaaggctcgaattgcttattaccaacaaaacgaagaaatgcccaaaaaccattataatatattttattcaattcaattcactttaaagcttctaaaaatgtaaattttcccatagaaccctaaatatgataactgtgatttatgttcacaaatttatcccaatttctaatggtcgtacaatgtgaagcctatcatccattttgaccagcgattaaccaatttaatccgcagaagaatgtcttgcataattgaaaccaattgcctacaattgtgatttttcctagccagtattattttgtttcttgtcaactaaccctcgcactgtctgtgcagctttgcatcgggtctagccaaaaactttcattctacagatttatatgccacctgtaaaaaaacaaaaaccacaaacaaacactgcgagatcacagatacccgtacattttccgattcagatacagatagatacatatagcggtgccctaggcgcattgccttcgagacattgacacgtatttggccgaggagcagtggtgctgcctctaaattcgtttagagcggatttcttgggtttcacaggggaggtgggtgttggtagaaactgttaggggaggtggtgaggtggtgctgatgttggtgtttcgtatgtgggcgcgctgacgtctttattcaatcagcacttaattgaattatacaatcgtatcaaaaggaaatttctgcttgcaaatgtcaatcaaactcgcacacaccgagatcctctgagtcactcagattagtcgcctaaatctgagggatttacctgagcagattccacgatgcgactacggatacggatacgaaaacggatggtccaccgatttggatttcaagagcgatttgctgattgagttgctgactccgcgcacggctcgaggcgaactgaattttgcgtgactcgccagcgtcgagcagagctaaaagcccgggaatggggatggattcggaatcggattcagattcggaatgggaatggctatgggcagggagaaacaaaaggcaagagccaaacaacacacccagttttggcaacgggaggagcctccgccccatagtcacagtccccaaatagcagatcaattaccattctggctgctcggtgctcgatcaaccggagacaggggaacctcgaggggaaaacgccaattatgcgtgcaatgcgaaatggaacggaagtgtgtgcggcggagtacagtgaagcagctacaaaagtcacaaacaaaacatcgaagcattaaaacatcaaaacaactcttcggcaaagccagacaaaaagcaaacccaaaacaaaaagcaaagccaaacacaaagccaactcgattggtttggcttgacttggcttggcacttccggtggccactgacgctaacgctactgctgctgctttagaacaaatcagatggaaaattcgaaaattcgcttggaaaaatgttaatagtggcacttgagagcgcgacacacccgctaaggagcgcccgcagtcgagcagaagccgcatttcgctggctttcgttgttcggggcaattcatttcaaatttatcgattagcgcataagaaccaattggaaaacaacacaaatgggactccactgaaacaaaaaaaaaaagaaccctgaaggacagatttaaattctccaaacgatcgaaaaagttttccattacaacatttcatagtattaatcgcataactctgaaatgacaaatgaaatgatcgagataactccaacctcattatatacatggtataatgttaaacagatttatagagggaaataaactttttctgagaaactagttcccgaacctagtcaaagacttttctcagtgtttgcatcattgcaggaatgggggaaccatttaattttaactctggatagtttgtaaaatgcttttcaatagcagaacccatatgttcgctgcggccttgtaaatttcacacaaaaggtgatggagaaaatagttcaggaggagtggccggggggatctgggcaacctgtcacggattggaaacgggagttcggatcgggagttccgagtcagagtgcgacctgtcatgggtatgagaatggacttgggtgcggctggctgtggcaaattaagagcatttcccgagttgatttatgtggaattcacgggagtacgtctgcgtgtggctcgtggatgaggcgggaactcctccactgcggattatttatggagtgcatatctgcggttcattcggaactgattggaatagccctagttggaagccgcataatgggcactgtgatgaagggaagtgattaggataagaatacaatgcctatttaatttgtttttatttaatttgatgtagcaatccgctttagaaaattacaaaatatatagaaaataagattttcctttaaattattattgtatttttataagctatgtgaagtaatatagtcgtagagataaaaatgtagacataattctagccggattccagcaccttgtgcacgatctgtatatttattcatctgcccacctattgactcatatattccattccaatcgctattattaagatctcttttcagcaaattgataatcccaacgatggcaacgtcatcaaacagaattaaatcgccaattcccggcaagcagcgaaggcaaaggaaacgttgtgttcaagttcaactgaatttataccaaactataaattattttcactcactaaaagtcttcaaatttatatttttcattcttcggcatggcaaaataaaaagtctgaaccgaaaaaaaatcgagaatggggaaaatgttaaaaatatcagcatacaaattaatgctttaaataaatgtgtaggagatcgaaatttccaaagcatagataatgccatcaaatgacgccaatcaaggaatgaaagtttgatggatttgcctacgcgcccctttaaatcctcaaaggggttttatggcccacggcggatggaagactctgctgaatggaagattcaacggacctggcaagaaaacatcaaatggatcttgatggcgacatggcagagtactcagctctccgtgttgatcttatttagcaggcatttttattggagactgtaaaaggcggcgtccgcgtgggcggctaacacgaatagcgaacaacaattgggagcattgcaaatattgtaataaatatacaacattttctccctcggattgtacgtcatgccgtatatttagtaatggcgcacctcgttccagtttggattttccaaaatgtttccctaaatcatgtggaaatttttggtgtgtgcacaattaacatgaactaatgtgaaatatttaaaataaacaatcgcaactgccaaaggcaaaatcaagttcagcccaactgagaaaaagaacagaaatgaacgagcgaacacaaaaaatgatctataaatacgagcaataaatttggaaatgaataagtcgaaaggtggaaagttgacggggaaactgggaaatcgcgacgaaagagccactcaactcaactcaactcttcgtcagcttcgccagcgaatcatcaaagacaacccactgaaaacgtcatgttggccatttgtcacacttgtcgtggatgcatctgcgggatgcgaacgcatccgccagatacaatttacctgagcctggtggcgcgcgcgccttgaatttgggtgcaaacatcgcggtgcccgtcgtgctttgtgtgtgctctgcaaaaatcaaattgcaaatggccagaacggcgatttagatcgggatactctttcacttcaagcacttcacttcgtgtgcagctcgtgcatcttggtatctttttgataattttcgatactgaggaagtggcaaaacgtttgcgcggcacacaaacaaattcgaaaacacgaaacactcaactaaccctgccccatttgtgctgtggaaatatagaagcgacttcttttttgaatttcaatttccgacttcggacttttctatattttctattttctgttttctgacgcgccttcgcgttgctcacacgactttaacacgacgacgactacgaaacggttgaattttcgggcaggttgcttggactttcgttagccagatccccagcccaaaaatctcaatttgtgtgcgagcgcaagacaacaaatttgttgaacgttctcgttctcagatgaaaaattcgtatttctttccgtttcgcccagtataaacaactatttttttatgctttcgtaaacagagacagtggcaggagaggaggccaagaagagcgatcttctgggcagtgaatgcgagagatcttcaactcaagtgggtcataaattatgaacgcagtgcagataaagataaatatatagcggtgtgtgtaagtgtgtaggcgagtgtggcaagtgaccaaggagaagccttcacgtcgtatacgcaatgtgctgaaacaaaaaccgaccaaaattcgttgcctactttcaggcagcgcagcgaaatttaaagtgtttttggctaaaaataaacttaacataattgcacagatatcgtgaaggggttaaacaattagacacagaggcggggtggcggggtgcgtggatcgtagccagggggtggtgggaaggagaggcgttctggggttttctgacacaccattcgcgtagaggaagcccttggccagctgcagttcgctgtcgatctccttgagaagatcactttccgaccagctgcgccgctgcctctgctgctgcagctgctgcgcgttaaggaggaagcgcgtctgcttgggtgggcgtggtcgcagccggacacccattcccgttgccgctgagttcgcctcctcggatgcgatggctctgtctgaacgatagcattcggttagatcttcgccatctagcggagtccgatcatcgcccccgtccccgttccaatttcagcatgcacattagcttgtacacagagaaaaaaaaatggcaacctatctttgtgcttggttagattgtcaataatttatcaaagaactagtcatttttaaatgcaatataagtaaagaaattgtagcaaatattcaataaaaattgtaagtcacaggaataaaatatttctatatggatgatcatatcttggataaaagcggaataactatagaatggaactagtttagaatataaccacttttatatgaatttatcccgataaagagcttctaaattgtatgtatatatactatacgtaattttctctgtgtagacgcccaattgcccccgattccgtaattctcttttaaacaaacggatcgtctgtcggactgcacttcgtgtccatgcaattgaatggaattaatttaaaatttccgcttaatcgcaatttcgcttttctttccttactttgttctcgtttcttgagcttgattgcaattcttgagggacagataagtcatcacgaggggtggaatgggtggtcttgcaaagccgctaaagggataagccggttttagcccgcgggcatttgagcttccggtcttaagcgaatgtttgcggattacaaagcaaaaatgatttattatatagacttaagcttaagattagacatttatattacattattttatgtggctatttgcggaaatatcagacagttgaaattaaaaagaacttattaagtctgaacctaattgaaaaggttatgaaaatatgtatgtaaatgaagagaataagctgaataaatattgagataaagcattttagttcttgattaacagcttgtttggtattttcaaattcgaaatgtttcccaaaacgatgagtcgatcgtttacagatctggcatatatttcccaaacattttgtttacgcatgtctgatatttctcaaccacatcgtccgcaaatatctgtacactacaaacaaatatggattagttgtttttttttttcaagcacatcgtctctctctttcgggacacatcacacaactaaaaggaattgcatgcggaatatatacaacgaatatcgaatgaatgcaacgaaaatactcaaattaagtaaacaatttgtggttaatcatataatttcgtttattaaacattaaacaacactaaatataattttcggtttcgttttattgctatggtattagaattattttcaatgttttcaacatttaacaaagtttcacaaacgcaatttggacaaaactgtaacttgtttatatttgattatataacatgagctgagaggtgggatgctgcatgcagctgctggggaagggggctggaaaggggccgggtcaagggttaggggtcaaagcattcggtttgtggttcaggatggccctagaaggtgttcgaggcggagtgctcgaagtttcgccagtacttgtcgaactcttcgtagattttcgctcggaagggcgagcctgcgaaaaactcgttcaaactggcaccgatttttcccggctggggatcgctggagcgatttatctggtggattgtcgtgctcctggattcggaatctgtggcctcgtctgtgtggaggaagtaggagcaattcgcgcacaatgaacaatcagaagagagagatagagatatacaaaagagagagatagcacaacaccaagtagctacggtatatgagtttatgagcgagatggccaaaaaccagacaaggattactttcaacttgatattaacagatggaattttggtatagccttgtgagtgacttcatgtcgataccttttaagatcaagtttgatttaaatgtgtggatcaacttgtgagtgtgtggggaagatgaactaactgaacttgttccaggcggtcagcagggataagcccagcaacaaagccgtgcccaagatgccgccagcggtgctggatgagggattcaatggttcaatgggtggcggtggtgctggtgtaggagattgtacgagggatgggatagaggattgggtggaggaacctggtgctggggacgaaccacaaccgggattgaagtcggagtcaggcgatgagctgtggttactggttagttccagggggatgttatgactcacgagccgcgccgtttgcgagcgttcgcgatagagtcggccgcgatttcccccggaaaattggccgggaaactcaccctggacggaaggcggtagcctggaaaccttgtacgtcttcacgatgctcgtcttcttggtggcactgctgtgcgcattgtcggtagcctcctccctgcgctcctgttcctcgtgacgctccatttgggcgccatccggcaactgttcgctggtagagaacttggcgaactcccgcaggtgccgtggcagctggcggagattggcctccgcctggccctccagtatgcgtactggtggcgcctctacatccgattcgggctgggattgggcggctggctggggttgtgattccgccccactttcccaatcgctgtccgccggcatggacaacttgtgacggcgttccttcacccgatccaagaattcatcgcttatggtcgccttgtctacggcggagtgatcgtgctcatcctcgatcttcgatatgcgtatgatcttgtgctgacgacgctcttcccgctcagccaccttgttcatccactcctcggccatttgctgccggaatacctcatcctcgctcagagtgggcagcttggcggcgggcctgtagctctccctcctctgaggagcaggcaagaccggagccctctgcatttcctccattagacgacggcgctcctgctgcaatcgctccacttcaaacttgagctcctcctccttggatagtatgtacttcagctgctgttcatgcagttccctcggcaacgaggatctcctttgctggcgatcataggcaggtggtggcacctgttgctgttgcggagttgcaactggtggtggtgctggactcacgccccttcgcgaggtggtacttatgtacctggggttgggatccctctcgatcatggagtaacaactgccgtaatgaggacgctgttgctgttgcgcctggttcagcatgggggcatgggtccttctgccgccgtaagcattgaaggtatcgtagctatattgactagagctgctcagatcattagtgctggcggagaggcggggagccctaatgcaatgtggtgttctctgattctgtcgctgatagcaaatctccacctccctggcaaagggtcgtgctatattctccgagtatcccaaatcgttggcatacctagaccaatcgtcctgcaccaccggatggttatagtgacccacggtggtatgcggacgtggtggtggctcattcagattgcacagagactcggcgcgtcgggaacgtggctccagctcaatgggaatctcatgagttcgcggtggtgtggcctccatttgtcgcggtaccgaggacattcgctcctgtcgcgactttgccgaccgctctatttccctctccaactcctgcatgtgggcatgtcttctctgctgcagctcatctagtctcggatgaccactcgcgggtcgggtgaagccactgagatcgtacatggaagcggacttctcccgcttttcccgagtgctttgcagctcggcgtgcatctgctgcgatagcctatcgaagtccttgaacacgcggtcttgatccagcccgttttgctgctcccgctgctctccaaaagcatccgcggcggccttggcacgctgccgaaattcctcatacgtaccgttgccgctgccgctaccgctctctcgcgacggctggctatttttgggcgccacgtctccatcaatgaaagtgttaccgtttaatttcgttgctgacataattggcggcgggggaacgggtggtacgggctggtccttgggtggatcaccctgttccttcttctcgtgacttgaagtgctcacatcgtagactacctgaccattttccattcgcttcttggactcgtaactgctcgtctcgatattggagtaccgcttagtttgactgacgggctggtggctggggaactcaatgttggagaagcgcttgcgctgctcctcgaaaatgtcgcccttgtgctgggggaacatcctggccaactcactctccatgctgtccagcgtgggaaacttggcggtgtcactggacatggtctctgtggtcgctttatggctggaggtggtggtgctgctgctctggcgttgctctgccgactgctgagcaccaagatcagctgctcgccttggtttattttcaagcgatgacgattcgcatgctgcgatcttctgcttttgttcgcttgcgtcatctctcttggcgttttcgtgagcggtcgccttggccgccgtttcggcgctcttcaccggtaccggcggcggagggacaggaggcgctgggggcgagaggctcttgcgcaactcgcgcatcatggccgccgtcttgagcatctcactctgctgctgctggtggtcttgctcgagaacctgggccttggacaactcatggtatccccgacgctccacgaacttctggtgagcatcgagcaggtcatccggttgggtttggttatttaccaaatctctctgtccgggcgacaggcagaccaatagcttgggatcggactgggtcggcagacccagccaggcggaggaggacttgctctcattggcgtttaactgcagctccttgatgtgcggcaattggggcatgggatagggcatcttgttctgggattggtcgcttatattctgggccacactggctaactcctcgagcacctgttcgccatagggcatggaagccaactgctcggtgcacagcaggcgcagcttctttattgcttccgtatcagtgtcggcatctgcatctacatccgcatttgcattcgcaaccgaatctgcaactgaaagctctggctctgattggggagtgggtggtgcgggtggtgatacgggttgcggtacgggtggtggtgcaggcttttgtctgagtggcggtgtaggtggctgagcagtgggtggcggtgggggactggccaggttgatggccgtgcattggctgtgggtggtgctgtcagagcagtgggagtcgttcgactcctgccgcttcagctgcaaggaagctaggtggaacgaggaagactcgggactgtagggtggcacggaagcgggaggtgggggaacgggcggcggcgacggcgatcgcggtagttcaccttgctcctgttcgcgccgcgtcatctcgatcaactcgcgcactttgtccatattgcgaacgaactcctcgcgcgtggccgctagcggcgatgctgccccgaaactaacagtcgatccaccagatacatttgtatcttttgctaattgttctcgatcggcgggagtgggcgtcggcgtcggcgtcggcgttgcggcgctcagcagcgaagactgcgaactggcgagcgtcgggttggcgttaacaggtgtgctctcgcgactctgctcgccctctctctccgtctccgtttccgtttccgcttccgtctcgctcctgtctgcagtagtggtactagtgctgctcatctcatcatccggccgagcaatcaaccgactggcatccgtatccaagtctacgagggctctctccgccaaggcggcagcctgctctagttctagttccatgaggtcagagacgctgctggaggccgaggagcttaggtaaactagctccgcatcttcagactgtggagacagggcgctctgcagtcgggtgcagctctccagatcggttgactcctccagcagcttggtttcgagcttaagaggcgacggtgcctcctccctacgcttgtgtctgcgactaaagtccaactgactcctgggaaaggtctcgtttagcttgggagtgcggatccccgtctgatcgcttccgccagaggaggcggtggagtttctccattcattctcctccaggatgctgtccagatagcggggattgagcaactgcggcatgaagtgcgattccaaagcgttccgatactgggcacgtttctggcgcacctgctcatgctgctctactcggctgctggacggcacctgctgatccgacggcgatcgctccggtcccaagactaccgatccctctgattccgagtctacttcgcataccagcggcgactgcagggaattgaattccccggagctgaagtcgctgttcagttccatttcctggatttgcacattgcgcgagaagttcgaaaactggccacttgacacgttcttcggcgactccaccaaataacgaggtggtggagatagggttccggccagagaaccggtagtgctgctaacctcctcgaaagtgggcttggcattttgctcttcgtcggtggtttccacgtgtatctggtggataatcaccttggaggtgggcttctgtggaggaggctgctgggaataaggatcttctgtttgaaactgaacttttattgttacttcctttggggatttcggtgcagtgtcatcattttgctgttgggcgttattcaaaatgggttcctctttcacatcatgatgcagttgctgtgcgaggccctcttctctcttcttcggatctacaaggatttgtggaactgcaatattttgctgatgcgctttagttgattcctgtaggtgctgtgcttcattttgctcctgctgctgtgcattttgctcagtgtctctctgtttttgataactttgcacggcagcaacgtgttgctgatgtgcattttccacaaattccattgccttttcgagttgcaacacatattgctccggttcctttgaatcgtgttgctcttgctgtggattattgtcagtggtctcatcctttgagtagtccacttcatcataaacttgttgattctcttcaacttcgacatgtttctgctgtgcgtcctccgaaagatgactagattcaggaagttcctttggactcggttcattttcccgttcttccttagtttcaatctcctgctgagcttcaggtttctccttctttgaatcctcgacctccatgtgctgctccttagattccacggctttgggtggctctggagattgagctttgccattggccgtgtcctcttccctcacaattcgatgaactatgaccttggcttgccgggggctaccgggtggccttcttataatggtgggaggtggacgcacctgctcttcagattttccattagacgcctgcttatcggacttttccttgcgatgttttgagtttttggcacccatttctgcgtctgaatctgcttctttttggatgactgttgctggttgctcgaatatttcttcttttttttcggttttctcaagagtgttcgtcacctcttcgctgttttccgttggcccatttgaaacgctgccagaatttccattatcatctacgaaggaagaagattgcgctactgcgatctgagtttggaaatcctgctgctcctcccgatcctccgccccttctgcctgctgctgatggttttcgttttggttttggctcggattctgattttgattttggtttcgattgcgtttgttgcgattgcgattgcgattacgattgcggttattgggcatcgtctacggcactttcgctcgatctgaactaatgcagttttccttgtgtgtgagatatatatgtgtttttgtgtgtaagtgagtacttcgtgtttcgtgtttcttaatcagccagaatctacagtacaactaagtgttgtttcgtttttcggtgtcgtttatttctagttccctctgtgtgtgtcactcgtcgccagaaactcaaacagaactgaactgagaaccagaaccgagagccggcggcattctgctcgcgacgacagccggcaaaatcgaaaaaaaaaagaaaataaaaaaataaaacagcgacgtcgctgccgctgccggcgtctacgccgccccgcccaccgcccaccgcctggcacgcgtccgaaatcgttatgtttttaggtttatttttcgccgccgagatcgcgcctttgtctccgattgcctcgatattttttcgccaaattaaattgcgttttgaatactaaactttcgctctcgttttgggggtatgttcgatttgagcaacggggacacggggtgaaaagttttttaaatattttttaagatcgcgcttcccgttcctcgtggcgctggcgaccgacggacaaggaatgggccgtgggctttccacgatctcagccgggagctagctccccagtctcccactcacacacatttttacagacagcccgattcggatgcacagtggcaagtatttgaaaatatacacacaaaaaggaaaatcggggaattcataacgatgctcatgttcacaatacatacatgtacgtagaaaacagaaagtcgtacgggagagcgggagagaaatgtgcaaaaccaaaacagaatcagaatcagaatgcagggtattccaaagacatcaaaataccaaagagaccgaaaaaaaaaacaacaatatgacttctaggtcaatgcaattttcacaagccaaacaaactcataaaatccgagatgagcagaaaagaaacgcacggctcgaaaatatattcggcacattcataaatattagaaaatgtttttggaacacgtacataatttgtttgtggaatttaagctaacgaatatatgctttcgaaaataaatttttttaaatgtcacaaacacatttttgtcttgaatttcggttgataaatgctcaggaatgaaagatgtaagacattaagagaaaataaagaatttagaggtcaaatgaaatcagataaaccgttttccaaccacttaaattgtttaattttttaagtggttgatctaaaaaactttcgtgcaatatacccaaaatggctcaatgcagggcattaagaagagaactcaatacggaaatagtttgccacagttcgagtttgcttatatgtatcttctggccgatgtgtgtgcttgtgtatctgatgagtctgcgctggctgtgtatctatatacaacttatggcattttaaagatatttttcgtgcgtaatttctttgctttttgtggtcacaagtctctgttttcggtgtactcttgaataattgaagcaacatatatccacgcgcatatatgtatgtatagctctcccatgtatcatcccagtgggccatgcggttagtagtattccgcttttatttttaaaggtacttaatggctttcaatttctcttgttctgtctggcccacagccccatcatctccattaacttcctccgaccagaaccaatccgaactgaagtatcttcgcgggtctgtcaggtgccagacgaaccagacacgtgatgtggtggttttggcccgggcattatgcaatttctgcacagtgtgacagacacgggtataccaattagggaatactaaacgatcgctttcccctcctcagaaacccactcacttaatgtgtattctcaattggtttcggtttccgtttggatttcgtttgggccccaccaagttgcctgaatcactgacgtacgacgaacatccaagtagccgctatctatatctgtggatccattgtagcggcttctattttcagttttcttgccccgtaatatcaacaaatttgaaattgatttctacgcctcgcccaatttgctgtagaacagcacacattttagttatcttttctgggctatcgctgataaattttgcatttttgataaagaacgtgagttgtgtgcgaaaagttttgctttcaatgaaagtggtttttgtggaatcaaatgcagctagcaagataacttcttgggaaattactaaagattgaactgtgatatctaaagatggatagaggggtcatcaaaagaagcctttcatgaagatttgattcgacaaatgcgcttggcagaagatctgtgattcatttctcgcttgggaatttctttacagagtttttatcttcccttagataaaacaataaagcggattgagatataaatttaagggatatctagagcatagagttgaagcgatctctatctttgtcgtaaagtttcaaagcaagtgatttctagtgttttcaactaatctaattatttattttgaattggtataattacattatgacttggagtgactttcaaagattttctctccaacttttccgtttactgtgatctttcgaatgtttgcttttagccacacttcccattcactgaacattcacattttgtgattatttgtattccgagtgtttggctgcctgccgatttgttggctttgcacttatgatgttgggggtatttgcgtatgggtatgggttcgagatacattctctcggctacatagatacactcttctttctttgttgttattgctgctaattagcatagatttttgagagtctcggtgctgtcatgtttacgctttgcttatttatttgggcagcgccgagcgttttgttctcccataacgagctgagcacatgtctgttttccgctctcctcctacttattgtttgtttgccttttacacaacaaacacacagatacacacgcacacacgcacacgtagcgtattaacacaaacaatgtgcttagtaaatgagtttatgaatcgccccacaagaacatcgaacccgctctgacgtcacgtccttacaatttaattcccaattaattgcaaatcgtcggcatcggcgaaaaggcgttgcatcaaaggccgcgtacgtgagccaactaaactgcaagtgcataaaaagagaccgccgccagaagtccgccgacccactgtctccggcgcacagtgggccccattctgttatctcgccggcacattctaaaaccgaataatgatctcagtgccgcgtcgcatccaagtgccaaagttgtcgcgtaattgccaacgtttacgccaataacactggtagcactgctactacaccagcagcttcgacctattgcgtcagttttcgcaggttttcccggccacatttccccccgccgactttccctagccgaagttacacacacagaggccgagaagttgagacggcaagccaaacaaaaagcacacacaaacacagggagtctattttcaaagggcgaagtcaatgggctagtcgaaaaccacaactgaggtaagaatcactacacttccggaaccgagtttgtagtgcagtgtaatttccgatagctacaattaaatggctctctcgctcgatcgacacaacgtcaaagtcgaagttctagtgcccaactgaagccgaagctccaaaagctcaccgtaacacctggaaacacgacacatctaggtagcagataagtatctgacgaagccttcaacttttcgctgattggcggccgtctcgctctcgagccagccctctccctcgcactggaatcgattgcaaatcggcttccgacagctactaatttgctgcgagcttggtatcggacattagaaatgttttggcactgcgccaatctgctgacagctggaagcagcttttctggatttctggaataaacagccgagaagtcggtgctcttgacttgtggtacaattaggggagtgctatttcgtgcgattgccatgaaatcacaggcaaaatataaacttgattagatggcaaagttggggttaagcgggtttactgcttgccaacctcactagaggttatgcaaattttaaagcaatgctcaaatgttaaatgttaatcgtatagtacacgagggttctatgtttattttgggtttccggcaagttcttttaattttacatttgtttacgcatctttattggcttgctgtgcttgattttttttttagcacaactattttaaataaatatttggaatttcaaagttgtgtaaacagaacactcgagcaaagtgtgccatgattttcttaaagcactccatttctcaatttatattcgaataaaaaaaccatttcgcaactaacatgggataaaaattttaaaacgtttgcatacttttttacgtggcacagcgttgtcttaaaaatgctgatataattgattttaccaaatccaccatttttttaccatttgtgagtattttatcactgtttttcactagtatgtaacaacttattttcggaaatttacgagttaatcttcgctgtaatcaacgatttgcctttgttttggcacgatgttaacttatcgtacaacataagtcgacacaaatcaaagtcagataagaatgaaattttgcacagcaaaatcaacaatttttatcaaaatattattcgagcatttgttttatgatttatttgggagcttgaaccgaggagcaacgaaacgaattatataaccgaaccgcatgcaaaacgaaattctgaagtcatttcttagcgaaataacaaaatcacgttaattgcattgttaaaaattccgtttgtgcgctgctctttttcagatgctgaatcacatttcaatactgaaactcagttttgtttgccatttgcacagcaacttatggccaaaaagccagtcggtcggctgcgtcagctgagcggcggcaaaacgactttatagatagccacaaacaggctgctaaaattatcataatggaataatggccagcgacacacagtggtcaacgattttggaaaggttcggtgggggtcgaactgcgggggcgctctaccagaatggtaaatctgacgccattagcacgccgcactaagtcgagctttttggggaaaaacattagactaaattggccagaaatggaagcagaggcggcttttagtagctttgtgtttctagcacgtattttaagatgagccccacatatgcaacctacttaacaaaatcgttcgcagattatacattactaagttatattatgaaatttcaaaagaaagaataatattcataagctttttggattacaggcacagttttttttcctttataataatttttggagcatttgtcacaggacacaagtcatttgcctattgtattgtaatttgtttgctgagtaattttccaaatatttaaaaatattcataattattcacttaagattagaaaaacagttcttatcaattttctaaataaatcaatttgtatattcacctaaaagtatgcaacaaaatttcaattaaagagaacaggaacagcaatagaactaagctgtactgaacctaaactgtgtacgcggatacaagattcttttgtttatagagaagccggaaatattatttaaattaatttatagccattcaaagcgcaattcgaagccggttcccaacaagcaaagagccttcttatcgatcgcaatcactcatttttgcttcatgcctaattaatgtgacaaatgccattaatattgatgcccggcaagcaaattgagtagccagcgaggtgagaccctagcaaataacttcccccaggtaaccagaaaccgcaatactgccgcccaaaaatatcggtggttagagagctggctcatagggccgacaattgattgaggagtgttccccgggccaatgaccacacttgattgagtcaccgccgatgataatttgttgataatttcgtttcgttaaattgggtacaaatcacaagtgtcagtcttgggacaaagaacagctgctggttaaaaatttaggcgaggatttaaactaggtcgcctttcgcctataatcgattgtagtaaacaaagagcttgtcacttgaagaggttctaggtaatacatattgatttcagttcgtatactcacagggaaaactgctcaagaaggcatttacgagtttatggggcacataatttcggtgtaaagtggtggtaaagctatttaaactttttaatagcctagcgtagcgtaagggtattcttcgccagggcaaataatattttttaaacatattttctggcacagccagactcattacctctcgctcttttagtgtctttttatcgctgccagcaattgacaataactttttgtttgtgtgttttatttgccaagccaaaacgcagaaaaaaagcacacatagggtaataacaaaaattttgacttttcgccagctggggcttatcaaaaaaaactgtatgtcgtcgaggggtaaacaaaagcagaataaataatagtacatagacagtgttcgctatttgccttggctttctttcggttcagcgatagaagaatgccgaatgtggaattataattaatcgggaacgagctcggggagtgccggttgccaattgaattagttattcaactcgggctgacccagtggggtgaaattatgagtttaattttcgaaaatataatttcactattaaatcaaacccaaattccgggacacactgccggcttcatttgcatgcagcacagcactcgaaaagcacgggtacaaaaagcacagctctaacatccggtcattagtgacttaattgaactatgaccaacggtggagaagggttgcactgtataatttaaatcaaattaaaacacaaacgtatgtatgcacaggtagatccataaacggcgatatactcgcatttagaccagcaatgccgtttttggggtatcattatcaccagacgcacaggccatgattaacccgaattcggtctgcatttgcctatcagctgaatttaaaatgggaaccgataatcaaatactatacgattgattagaatacgttactaagccgagaggtatgacacttttcaactgccgaatcttggtcaatatcgacttggcccattggcccgaaaaaagggcgccaaactcaagctctgaacggctggcttgaatgctgaggcttaggaatacgggtagtaattcgggtaactcactttgcttggcctgaattttatggcgttcttttagcaccaacggtagtccgtttgcgagtacacttaacgcgcccgttggaaaggtttacggtatatcgtttttgccactgaacttgactgatcgcccgtaaaaagctagccaaatatatagatttcgctcgcgacaacttgacttggcaaaacttctgtagtaactaaatcgctgagggaatacggtatcgtatcgtataacaccaacacaccgaacgcaaaaagcacgacagacagcagcgctcagcacagcaaaagcagacgaaaagcagcgccgcagcagcagagcagagagcaaaagtcgcctgttgattagtgacttgttgctgtccctgcctctgccgcagtcgccgtttctgcctgtgcctctgctggcgtcgacgtcggcgtcgagtggtgggtgaggaatggtcgctgtttgcactgctagttgttgttgtagttgtagccggcttagagccgtgacttgttgatgttttgccatggcgatacccagcaatcgaaggtccaaggggtctgttcgacgagaacatcagcatgggaagtggtcgaaatagttagttttatttataatgtgggtgaaaggtatatcgtggtaaatccactgaaggatagcgatgtcaaataatgacaataaacacaagaaatacatttaagtgaaaagaacaattatatgctttattcttcttgccttatctctcaattactacactccagggaatcacaagttcggtacacccactcctcccatattctcggtgactttgtcgtcgttctcccccgatttgcgttctgcgttcggcgggcacgaaccacagatccgatatttttcaaatttgtatgcataaattcaaacacaaatgcacagcgagggtcggggggtcagcttgcgtggggacaggggaccgggaggcctggccagcaaacagaacaaaagaatccaatcattgtcagtgcattgtgccgcagcatgtgcgcatctggcttagggcagcagtagaggctgggcctaccactggaatcggaactgggactagctgtgtatggggctatattactcacactacagtgtggtgtaggcactggtcgacaggcacagacatatgtctatatgtccgaagtggagacagtcgatgaatgacgatgacg

SEQ ID NO: 27629 - DNA, 850 bp, DROSOPHILA
tgccaagtcaagttgtcgcgagcgaaatctatatatttggctagctttttacgggcgatcagtcaagttcagtggcaaaaacgatataccgtaaacctttccaacgggcgcgttaagtgtactcgcaaacggactaccgttggtgctaaaagaacgccataaaattcaggccaagcaaagcgtgtggacaccttacggttccagcggcgatctaaatcaatcgggcgccacctcggccacgccaccgcccccgccgccaccctcgctgcccgtttggacaccccagccatcgccggtgttgagcggacgcaaggagttccgtccggtccgcttcgagtcccccactctgccccgtcgctatacggcgcagcagcaacagaagacgacgactacgatcccgccgtggtccagtgcggagaacggagaaggtggcccacctcccaccgcaccagcctccctcaactccgtgaactccaactcggactacgccgaaaccgactgctccggacactttggtcccgtggcgcccagtgccagtgtctccgacaagatcagaacattcgaacgctcttcgtccaactcggagctgcagaggccgtttgtgcggcgccagctgtccgacgccagtcgtccagcctacaggcccaatgaagtcatctacaaagtcaagcacgagtatatgagcgaaccggagacgggcagcgatcgtccccggaaaatggcacagttagggcgaaggcagtacgacggcatcggtccggtgaccaacgatggaatgcccatcatcctgagatcggtaaaggaagccccactcgctggggcacaacggggggttttgaactcgaagtga

SEQ ID NO: 27630 - protein, 56 aa, DROSOPHILA
MSEPETGSDRPRKMAQLGRRQYDGIGPVTNDGMPIILRSVKEAPLAGAQRGVLNSK

SEQ ID NO: 27631 - DNA, 2221 bp, DROSOPHILA
gatcgacacctggagaagaacacgactcgctagcatcatcaatgtccgccggcagttgtggctgtgcccgattttcctccgaggtcgtctgcaaggttatcatgctgctgtattcgtccccgaggaacgccttcctgggctttattccgagagatcaagctaatttcgtcaagcgattgcgggaagtattagacgaacatcgccaaaaggcgagaaacaaagagtaaacaagtatctcaagatgatctcaaagtatatttaaaatatttatttgaactctaggtatatcaaatttatagtcatcgaagaaagtattgttttataattagatattttttttttttttgtttaattattataaatatagaccaaagaatatttaaacaagatacgctcgcacgtccccagtgggaaaacataccaaggctaaaatatgtaatcagataaataatcataaaactgcgaactcctgaatgcatttacgcaagtttgtattacgaatgtctgtcatacgttgccatattaaaacttaaccgatcttataaataaacatttttgatgtgcatctattatgtttatgttctacaactaggtcaaggacaactgtgttatcgcatgtcagatgctgcagcattaatagacattaaaaaaaaaaccccgactgtaaaataagtaatctaatgaatgcttctatttaggaagtttgaaataaaaataatcttccgaatgcaaaatcctttccttttcgtattagttgtgaattgatcgaataagtattttcatatgttgggttcatcatcttcgtcttaaggattacattttcaaaggtcaattagtctttttcattgcgtaagccttgtaaaaaatgttaacgaatttgattcagttttaaattttgaaacgaacccattcgatgcggccttgaataccagtcatatatatattggagatcttttacacatttttagtatagttttcgatttctttagcggatatcaacatggcctcagtaaaattggtgtgttggtactaatcatatctgcgttccaaaatctaatattttttaaaattttcgcacagttctttattgctattttggttgtagctctatcccttaacacctcagctgcagtgttgaaccctagttcgactgccaaacccagatttgagacgaaagaccgaaaactaagtgctggcgctctgcagtcactcgctggttaattactatagaaagctatagataaaattgtcattataaaaatggaccaaaaataaattattttcaacgaatttctcttaagtttctttcgtttgggatacagttcgaaatctttacaaagatattttatttggggttttattagatagacactacaagctagggaacccgggcggaaccagctgtatttagcattagccctaagctctaaatggacgaggtggcatagtcggccgggaacttgaacaggtgctttccagtggcctgaacggagggaaggagtcccgcgttcggaatgatgttccacgagaggtatagcgatacgttgcggttgtccttcaggccattcccgtcgtcccagaagtagtacttggtgttcatgttcttgaagtccaatacggcattgtcgccgcgcaggataatcttgtcccacagtaccacctggttgagttgattggccggtgtctggtactcggcggtgagatacaggaacagctgcttcacgttccagttgaagatgcctgtgagattcgtttgcagatcgaaggtcacgaagcccaagtcgtgcttctcccgggacgctccgtaatccgggacattcttcaccagcactctgaccgtgttgatgtttgcatcggtacggtagtcaagaaagacggtggacaggaagcagctgaaggtgaggcaagctagaacgctcagcgtgtatgccaccgtggcgtttcctcgggttaacaccgtgtgcattttaatatcgttttattcctgcgattccggcaaatgacacgtcgtgttgttagtttggaaaaaaattagagctgggacgataatcggatgaacgcgatactatcgatgactttcccggttcggcccgaaagaacaacgcgaataacccgatttccttttgatggttaaaaatcaaaatatttcgcgttaaatcatttctatagtcgtaatcgtaaatatcaggtcatcatttcaaaaactattcgaataataatt

SEQ ID NO: 27632 - DNA, 159 bp, DROSOPHILA
atggcctcagtaaaattgttctttattgctattttggttgtagctctatcccttaacacctcagctgcagtgttgaaccctagttcgactgccaaacccagatttgagacgaaagaccgaaaactaagtgctggcgctctgcagtcactcgctggttaa

SEQ ID NO: 27633 - protein, 52 aa, DROSOPHILA
MASVKLFFIAILVVALSLNTSAAVLNPSSTAKPRFETKDRKLSAGALQSLAG

SEQ ID NO: 27634 - DNA, 7796 bp, DROSOPHILA
aacgatgagtcgatcgtttacagatctggcatatatttcccaaacattttgtttacgcatgtctgatatttctcaaccacatcgtccgcaaatatctgtacactacaaacaaatatggattagttgtttttttttttcaagcacatcgtctctctctttcgggacacatcacacaactaaaaggaattgcatgcggaatatatacaacgaatatcgaatgaatgcaacgaaaatactcaaattaagtaaacaatttgtggttaatcatataatttcgtttattaaacattaaacaacactaaatataattttcggtttcgttttattgctatggtattagaattattttcaatgttttcaacatttaacaaagtttcacaaacgcaatttggacaaaactgtaacttgtttatatttgattatataacatgagctgagaggtgggatgctgcatgcagctgctggggaagggggctggaaaggggccgggtcaagggttaggggtcaaagcattcggtttgtggttcaggatggccctagaaggtgttcgaggcggagtgctcgaagtttcgccagtacttgtcgaactcttcgtagattttcgctcggaagggcgagcctgcgaaaaactcgttcaaactggcaccgatttttcccggctggggatcgctggagcgatttatctggtggattgtcgtgctcctggattcggaatctgtggcctcgtctgtgtggaggaagtaggagcaattcgcgcacaatgaacaatcagaagagagagatagagatatacaaaagagagagatagcacaacaccaagtagctacggtatatgagtttatgagcgagatggccaaaaaccagacaaggattactttcaacttgatattaacagatggaattttggtatagccttgtgagtgacttcatgtcgataccttttaagatcaagtttgatttaaatgtgtggatcaacttgtgagtgtgtggggaagatgaactaactgaacttgttccaggcggtcagcagggataagcccagcaacaaagccgtgcccaagatgccgccagcggtgctggatgagggattcaatggttcaatgggtggcggtggtgctggtgtaggagattgtacgagggatgggatagaggattgggtggaggaacctggtgctggggacgaaccacaaccgggattgaagtcggagtcaggcgatgagctgtggttactggttagttccagggggatgttatgactcacgagccgcgccgtttgcgagcgttcgcgatagagtcggccgcgatttcccccggaaaattggccgggaaactcaccctggacggaaggcggtagcctggaaaccttgtacgtcttcacgatgctcgtcttcttggtggcactgctgtgcgcattgtcggtagcctcctccctgcgctcctgttcctcgtgacgctccatttgggcgccatccggcaactgttcgctggtagagaacttggcgaactcccgcaggtgccgtggcagctggcggagattggcctccgcctggccctccagtatgcgtactggtggcgcctctacatccgattcgggctgggattgggcggctggctggggttgtgattccgccccactttcccaatcgctgtccgccggcatggacaacttgtgacggcgttccttcacccgatccaagaattcatcgcttatggtcgccttgtctacggcggagtgatcgtgctcatcctcgatcttcgatatgcgtatgatcttgtgctgacgacgctcttcccgctcagccaccttgttcatccactcctcggccatttgctgccggaatacctcatcctcgctcagagtgggcagcttggcggcgggcctgtagctctccctcctctgaggagcaggcaagaccggagccctctgcatttcctccattagacgacggcgctcctgctgcaatcgctccacttcaaacttgagctcctcctccttggatagtatgtacttcagctgctgttcatgcagttccctcggcaacgaggatctcctttgctggcgatcataggcaggtggtggcacctgttgctgttgcggagttgcaactggtggtggtgctggactcacgccccttcgcgaggtggtacttatgtacctggggttgggatccctctcgatcatggagtaacaactgccgtaatgaggacgctgttgctgttgcgcctggttcagcatgggggcatgggtccttctgccgccgtaagcattgaaggtatcgtagctatattgactagagctgctcagatcattagtgctggcggagaggcggggagccctaatgcaatgtggtgttctctgattctgtcgctgatagcaaatctccacctccctggcaaagggtcgtgctatattctccgagtatcccaaatcgttggcatacctagaccaatcgtcctgcaccaccggatggttatagtgacccacggtggtatgcggacgtggtggtggctcattcagattgcacagagactcggcgcgtcgggaacgtggctccagctcaatgggaatctcatgagttcgcggtggtgtggcctccatttgtcgcggtaccgaggacattcgctcctgtcgcgactttgccgaccgctctatttccctctccaactcctgcatgtgggcatgtcttctctgctgcagctcatctagtctcggatgaccactcgcgggtcgggtgaagccactgagatcgtacatggaagcggacttctcccgcttttcccgagtgctttgcagctcggcgtgcatctgctgcgatagcctatcgaagtccttgaacacgcggtcttgatccagcccgttttgctgctcccgctgctctccaaaagcatccgcggcggccttggcacgctgccgaaattcctcatacgtaccgttgccgctgccgctaccgctctctcgcgacggctggctatttttgggcgccacgtctccatcaatgaaagtgttaccgtttaatttcgttgctgacataattggcggcgggggaacgggtggtacgggctggtccttgggtggatcaccctgttccttcttctcgtgacttgaagtgctcacatcgtagactacctgaccattttccattcgcttcttggactcgtaactgctcgtctcgatattggagtaccgcttagtttgactgacgggctggtggctggggaactcaatgttggagaagcgcttgcgctgctcctcgaaaatgtcgcccttgtgctgggggaacatcctggccaactcactctccatgctgtccagcgtgggaaacttggcggtgtcactggacatggtctctgtggtcgctttatggctggaggtggtggtgctgctgctctggcgttgctctgccgactgctgagcaccaagatcagctgctcgccttggtttattttcaagcgatgacgattcgcatgctgcgatcttctgcttttgttcgcttgcgtcatctctcttggcgttttcgtgagcggtcgccttggccgccgtttcggcgctcttcaccggtaccggcggcggagggacaggaggcgctgggggcgagaggctcttgcgcaactcgcgcatcatggccgccgtcttgagcatctcactctgctgctgctggtggtcttgctcgagaacctgggccttggacaactcatggtatccccgacgctccacgaacttctggtgagcatcgagcaggtcatccggttgggtttggttatttaccaaatctctctgtccgggcgacaggcagaccaatagcttgggatcggactgggtcggcagacccagccaggcggaggaggacttgctctcattggcgtttaactgcagctccttgatgtgcggcaattggggcatgggatagggcatcttgttctgggattggtcgcttatattctgggccacactggctaactcctcgagcacctgttcgccatagggcatggaagccaactgctcggtgcacagcaggcgcagcttctttattgcttccgtatcagtgtcggcatctgcatctacatccgcatttgcattcgcaaccgaatctgcaactgaaagctctggctctgattggggagtgggtggtgcgggtggtgatacgggttgcggtacgggtggtggtgcaggcttttgtctgagtggcggtgtaggtggctgagcagtgggtggcggtgggggactggccaggttgatggccgtgcattggctgtgggtggtgctgtcagagcagtgggagtcgttcgactcctgccgcttcagctgcaaggaagctaggtggaacgaggaagactcgggactgtagggtggcacggaagcgggaggtgggggaacgggcggcggcgacggcgatcgcggtagttcaccttgctcctgttcgcgccgcgtcatctcgatcaactcgcgcactttgtccatattgcgaacgaactcctcgcgcgtggccgctagcggcgatgctgccccgaaactaacagtcgatccaccagatacatttgtatcttttgctaattgttctcgatcggcgggagtgggcgtcggcgtcggcgtcggcgttgcggcgctcagcagcgaagactgcgaactggcgagcgtcgggttggcgttaacaggtgtgctctcgcgactctgctcgccctctctctccgtctccgtttccgtttccgcttccgtctcgctcctgtctgcagtagtggtactagtgctgctcatctcatcatccggccgagcaatcaaccgactggcatccgtatccaagtctacgagggctctctccgccaaggcggcagcctgctctagttctagttccatgaggtcagagacgctgctggaggccgaggagcttaggtaaactagctccgcatcttcagactgtggagacagggcgctctgcagtcgggtgcagctctccagatcggttgactcctccagcagcttggtttcgagcttaagaggcgacggtgcctcctccctacgcttgtgtctgcgactaaagtccaactgactcctgggaaaggtctcgtttagcttgggagtgcggatccccgtctgatcgcttccgccagaggaggcggtggagtttctccattcattctcctccaggatgctgtccagatagcggggattgagcaactgcggcatgaagtgcgattccaaagcgttccgatactgggcacgtttctggcgcacctgctcatgctgctctactcggctgctggacggcacctgctgatccgacggcgatcgctccggtcccaagactaccgatccctctgattccgagtctacttcgcataccagcggcgactgcagggaattgaattccccggagctgaagtcgctgttcagttccatttcctggatttgcacattgcgcgagaagttcgaaaactggccacttgacacgttcttcggcgactccaccaaataacgaggtggtggagatagggttccggccagagaaccggtagtgctgctaacctcctcgaaagtgggcttggcattttgctcttcgtcggtggtttccacgtgtatctggtggataatcaccttggaggtgggcttctgtggaggaggctgctgggaataaggatcttctgtttgaaactgaacttttattgttacttcctttggggatttcggtgcagtgtcatcattttgctgttgggcgttattcaaaatgggttcctctttcacatcatgatgcagttgctgtgcgaggccctcttctctcttcttcggatctacaaggatttgtggaactgcaatattttgctgatgcgctttagttgattcctgtaggtgctgtgcttcattttgctcctgctgctgtgcattttgctcagtgtctctctgtttttgataactttgcacggcagcaacgtgttgctgatgtgcattttccacaaattccattgccttttcgagttgcaacacatattgctccggttcctttgaatcgtgttgctcttgctgtggattattgtcagtggtctcatcctttgagtagtccacttcatcataaacttgttgattctcttcaacttcgacatgtttctgctgtgcgtcctccgaaagatgactagattcaggaagttcctttggactcggttcattttcccgttcttccttagtttcaatctcctgctgagcttcaggtttctccttctttgaatcctcgacctccatgtgctgctccttagattccacggctttgggtggctctggagattgagctttgccattggccgtgtcctcttccctcacaattcgatgaactatgaccttggcttgccgggggctaccgggtggccttcttataatggtgggaggtggacgcacctgctcttcagattttccattagacgcctgcttatcggacttttccttgcgatgttttgagtttttggcacccatttctgcgtctgaatctgcttctttttggatgactgttgctggttgctcgaatatttcttcttttttttcggttttctcaagagtgttcgtcacctcttcgctgttttccgttggcccatttgaaacgctgccagaatttccattatcatctacgaaggaagaagattgcgctactgcgatctgagtttggaaatcctgctgctcctcccgatcctccgccccttctgcctgctgctgatggttttcgttttggttttggctcggattctgattttgattttggtttcgattgcgtttgttgcgattgcgattgcgattacgattgcggttattgggcatcgtctacggcactttcgctcgatctgaactaatgcagttttccttgtgtgtgagatatatatgtgtttttgtgtgtaagtgagtacttcgtgtttcgtgtttcttaatcagccagaatctacagtacaactaagtgttgtttcgtttttcggtgtcgtttatttctagttccctctgtgtgtgtcactcgtcgccagaaactcaaacagaactgaactgagaaccagaaccgagagccggcggcattctgctcgcgacgacagccggcaaaatcgaaaaaaaaaagaaaataaaaaaataaaacagcgacgtcgctgccgctgccggcgtctacgccgccccgcccaccgcccaccgcctggcacgcgtccgaaatcgttatgtttttaggtttatttttcgccgccgagatcgcgcctttgtctccgattgcctcgatattttttcgccaaattaaattgcgttttgaatactaaactttcgctctcgttttgggggtatgttcgatttgagcaacggggacacggggtgaaaagttttttaaatattttttaagatcgcgcttcccgttcctcgtggcgctggcgaccgacggacaaggaatgggccgtgggctttccacgatctcagccgggagctagctccccagtctcccactcacacacatttttacagacagcccgattcggatgcacagtggcaagtatttgaaaatatacacacaaaaaggaaaatcggggaattcataacgatgctcatgttcacaatacatacatgtacgtagaaaacagaaagtcgtacgggagagcgggagagaaatgtgcaaaaccaaaacagaatcagaatcagaatgcagggtattccaaagacatcaaaataccaaagagaccgaaaaaaaaaacaacaatatgacttctaggtcaatgcaattttcacaagccaaacaaactcataaaatccgagatgagcagaaaagaaacgcacggctcgaaaatatatt

SEQ ID NO: 27635 - DNA, 5796 bp, DROSOPHILA
atgcccaataaccgcaatcgtaatcgcaatcgcaatcgcaacaaacgcaatcgaaaccaaaatcaaaatcagaatccgagccaaaaccaaaacgaaaaccatcagcagcaggcagaaggggcggaggatcgggaggagcagcaggatttccaaactcagatcgcagtagcgcaatcttcttccttcgtagatgataatggaaattctggcagcgtttcaaatgggccaacggaaaacagcgaagaggtgacgaacactcttgagaaaaccgaaaaaaaagaagaaatattcgagcaaccagcaacagtcatccaaaaagaagcagattcagacgcagaaatgggtgccaaaaactcaaaacatcgcaaggaaaagtccgataagcaggcgtctaatggaaaatctgaagagcaggtgcgtccacctcccaccattataagaaggccacccggtagcccccggcaagccaaggtcatagttcatcgaattgtgagggaagaggacacggccaatggcaaagctcaatctccagagccacccaaagccgtggaatctaaggagcagcacatggaggtcgaggattcaaagaaggagaaacctgaagctcagcaggagattgaaactaaggaagaacgggaaaatgaaccgagtccaaaggaacttcctgaatctagtcatctttcggaggacgcacagcagaaacatgtcgaagttgaagagaatcaacaagtttatgatgaagtggactactcaaaggatgagaccactgacaataatccacagcaagagcaacacgattcaaaggaaccggagcaatatgtgttgcaactcgaaaaggcaatggaatttgtggaaaatgcacatcagcaacacgttgctgccgtgcaaagttatcaaaaacagagagacactgagcaaaatgcacagcagcaggagcaaaatgaagcacagcacctacaggaatcaactaaagcgcatcagcaaaatattgcagttccacaaatccttgtagatccgaagaagagagaagagggcctcgcacagcaactgcatcatgatgtgaaagaggaacccattttgaataacgcccaacagcaaaatgatgacactgcaccgaaatccccaaaggaagtaacaataaaagttcagtttcaaacagaagatccttattcccagcagcctcctccacagaagcccacctccaaggtgattatccaccagatacacgtggaaaccaccgacgaagagcaaaatgccaagcccactttcgaggaggttagcagcactaccggttctctggccggaaccctatctccaccacctcgttatttggtggagtcgccgaagaacgtgtcaagtggccagttttcgaacttctcgcgcaatgtgcaaatccaggaaatggaactgaacagcgacttcagctccggggaattcaattccctgcagtcgccgctggtatgcgaagtagactcggaatcagagggatcggtagtcttgggaccggagcgatcgccgtcggatcagcaggtgccgtccagcagccgagtagagcagcatgagcaggtgcgccagaaacgtgcccagtatcggaacgctttggaatcgcacttcatgccgcagttgctcaatccccgctatctggacagcatcctggaggagaatgaatggagaaactccaccgcctcctctggcggaagcgatcagacggggatccgcactcccaagctaaacgagacctttcccaggagtcagttggactttagtcgcagacacaagcgtagggaggaggcaccgtcgcctcttaagctcgaaaccaagctgctggaggagtcaaccgatctggagagctgcacccgactgcagagcgccctgtctccacagtctgaagatgcggagctagtttacctaagctcctcggcctccagcagcgtctctgacctcatggaactagaactagagcaggctgccgccttggcggagagagccctcgtagacttggatacggatgccagtcggttgattgctcggccggatgatgagatgagcagcactagtaccactactgcagacaggagcgagacggaagcggaaacggaaacggagacggagagagagggcgagcagagtcgcgagagcacacctgttaacgccaacccgacgctcgccagttcgcagtcttcgctgctgagcgccgcaacgccgacgccgacgccgacgcccactcccgccgatcgagaacaattagcaaaagatacaaatgtatctggtggatcgactgttagtttcggggcagcatcgccgctagcggccacgcgcgaggagttcgttcgcaatatggacaaagtgcgcgagttgatcgagatgacgcggcgcgaacaggagcaaggtgaactaccgcgatcgccgtcgccgccgcccgttcccccacctcccgcttccgtgccaccctacagtcccgagtcttcctcgttccacctagcttccttgcagctgaagcggcaggagtcgaacgactcccactgctctgacagcaccacccacagccaatgcacggccatcaacctggccagtcccccaccgccacccactgctcagccacctacaccgccactcagacaaaagcctgcaccaccacccgtaccgcaacccgtatcaccacccgcaccacccactccccaatcagagccagagctttcagttgcagattcggttgcgaatgcaaatgcggatgtagatgcagatgccgacactgatacggaagcaataaagaagctgcgcctgctgtgcaccgagcagttggcttccatgccctatggcgaacaggtgctcgaggagttagccagtgtggcccagaatataagcgaccaatcccagaacaagatgccctatcccatgccccaattgccgcacatcaaggagctgcagttaaacgccaatgagagcaagtcctcctccgcctggctgggtctgccgacccagtccgatcccaagctattggtctgcctgtcgcccggacagagagatttggtaaataaccaaacccaaccggatgacctgctcgatgctcaccagaagttcgtggagcgtcggggataccatgagttgtccaaggcccaggttctcgagcaagaccaccagcagcagcagagtgagatgctcaagacggcggccatgatgcgcgagttgcgcaagagcctctcgcccccagcgcctcctgtccctccgccgccggtaccggtgaagagcgccgaaacggcggccaaggcgaccgctcacgaaaacgccaagagagatgacgcaagcgaacaaaagcagaagatcgcagcatgcgaatcgtcatcgcttgaaaataaaccaaggcgagcagctgatcttggtgctcagcagtcggcagagcaacgccagagcagcagcaccaccacctccagccataaagcgaccacagagaccatgtccagtgacaccgccaagtttcccacgctggacagcatggagagtgagttggccaggatgttcccccagcacaagggcgacattttcgaggagcagcgcaagcgcttctccaacattgagttccccagccaccagcccgtcagtcaaactaagcggtactccaatatcgagacgagcagttacgagtccaagaagcgaatggaaaatggtcaggtagtctacgatgtgagcacttcaagtcacgagaagaaggaacagggtgatccacccaaggaccagcccgtaccacccgttcccccgccgccaattatgtcagcaacgaaattaaacggtaacactttcattgatggagacgtggcgcccaaaaatagccagccgtcgcgagagagcggtagcggcagcggcaacggtacgtatgaggaatttcggcagcgtgccaaggccgccgcggatgcttttggagagcagcgggagcagcaaaacgggctggatcaagaccgcgtgttcaaggacttcgataggctatcgcagcagatgcacgccgagctgcaaagcactcgggaaaagcgggagaagtccgcttccatgtacgatctcagtggcttcacccgacccgcgagtggtcatccgagactagatgagctgcagcagagaagacatgcccacatgcaggagttggagagggaaatagagcggtcggcaaagtcgcgacaggagcgaatgtcctcggtaccgcgacaaatggaggccacaccaccgcgaactcatgagattcccattgagctggagccacgttcccgacgcgccgagtctctgtgcaatctgaatgagccaccaccacgtccgcataccaccgtgggtcactataaccatccggtggtgcaggacgattggtctaggtatgccaacgatttgggatactcggagaatatagcacgaccctttgccagggaggtggagatttgctatcagcgacagaatcagagaacaccacattgcattagggctccccgcctctccgccagcactaatgatctgagcagctctagtcaatatagctacgataccttcaatgcttacggcggcagaaggacccatgcccccatgctgaaccaggcgcaacagcaacagcgtcctcattacggcagttgttactccatgatcgagagggatcccaaccccaggtacataagtaccacctcgcgaaggggcgtgagtccagcaccaccaccagttgcaactccgcaacagcaacaggtgccaccacctgcctatgatcgccagcaaaggagatcctcgttgccgagggaactgcatgaacagcagctgaagtacatactatccaaggaggaggagctcaagtttgaagtggagcgattgcagcaggagcgccgtcgtctaatggaggaaatgcagagggctccggtcttgcctgctcctcagaggagggagagctacaggcccgccgccaagctgcccactctgagcgaggatgaggtattccggcagcaaatggccgaggagtggatgaacaaggtggctgagcgggaagagcgtcgtcagcacaagatcatacgcatatcgaagatcgaggatgagcacgatcactccgccgtagacaaggcgaccataagcgatgaattcttggatcgggtgaaggaacgccgtcacaagttgtccatgccggcggacagcgattgggaaagtggggcggaatcacaaccccagccagccgcccaatcccagcccgaatcggatgtagaggcgccaccagtacgcatactggagggccaggcggaggccaatctccgccagctgccacggcacctgcgggagttcgccaagttctctaccagcgaacagttgccggatggcgcccaaatggagcgtcacgaggaacaggagcgcagggaggaggctaccgacaatgcgcacagcagtgccaccaagaagacgagcatcgtgaagacgtacaaggtttccaggctaccgccttccgtccagggtgagtttcccggccaattttccgggggaaatcgcggccgactctatcgcgaacgctcgcaaacggcgcggctcgtgagtcataacatccccctggaactaaccagtaaccacagctcatcgcctgactccgacttcaatcccggttgtggttcgtccccagcaccaggttcctccacccaatcctctatcccatccctcgtacaatctcctacaccagcaccaccgccacccattgaaccattgaatccctcatccagcaccgctggcggcatcttgggcacggctttgttgctgggcttatccctgctgaccgcctggaacaagttcagttag

SEQ ID NO: 27636 - protein, 1931 aa, DROSOPHILA
MPNNRNRNRNRNRNKRNRNQNQNQNPSQNQNENHQQQAEGAEDREEQQDFQTQIAVAQSSSFVDDNGNSGSVSNGPTENSEEVTNTLEKTEKKEEIFEQPATVIQKEADSDAEMGAKNSKHRKEKSDKQASNGKSEEQVRPPPTIIRRPPGSPRQAKVIVHRIVREEDTANGKAQSPEPPKAVESKEQHMEVEDSKKEKPEAQQEIETKEERENEPSPKELPESSHLSEDAQQKHVEVEENQQVYDEVDYSKDETTDNNPQQEQHDSKEPEQYVLQLEKAMEFVENAHQQHVAAVQSYQKQRDTEQNAQQQEQNEAQHLQESTKAHQQNIAVPQILVDPKKREEGLAQQLHHDVKEEPILNNAQQQNDDTAPKSPKEVTIKVQFQTEDPYSQQPPPQKPTSKVIIHQIHVETTDEEQNAKPTFEEVSSTTGSLAGTLSPPPRYLVESPKNVSSGQFSNFSRNVQIQEMELNSDFSSGEFNSLQSPLVCEVDSESEGSVVLGPERSPSDQQVPSSSRVEQHEQVRQKRAQYRNALESHFMPQLLNPRYLDSILEENEWRNSTASSGGSDQTGIRTPKLNETFPRSQLDFSRRHKRREEAPSPLKLETKLLEESTDLESCTRLQSALSPQSEDAELVYLSSSASSSVSDLMELELEQAAALAERALVDLDTDASRLIARPDDEMSSTSTTTADRSETEAETETETEREGEQSRESTPVNANPTLASSQSSLLSAATPTPTPTPTPADREQLAKDTNVSGGSTVSFGAASPLAATREEFVRNMDKVRELIEMTRREQEQGELPRSPSPPPVPPPPASVPPYSPESSSFHLASLQLKRQESNDSHCSDSTTHSQCTAINLASPPPPPTAQPPTPPLRQKPAPPPVPQPVSPPAPPTPQSEPELSVADSVANANADVDADADTDTEAIKKLRLLCTEQLASMPYGEQVLEELASVAQNISDQSQNKMPYPMPQLPHIKELQLNANESKSSSAWLGLPTQSDPKLLVCLSPGQRDLVNNQTQPDDLLDAHQKFVERRGYHELSKAQVLEQDHQQQQSEMLKTAAMMRELRKSLSPPAPPVPPPPVPVKSAETAAKATAHENAKRDDASEQKQKIAACESSSLENKPRRAADLGAQQSAEQRQSSSTTTSSHKATTETMSSDTAKFPTLDSMESELARMFPQHKGDIFEEQRKRFSNIEFPSHQPVSQTKRYSNIETSSYESKKRMENGQVVYDVSTSSHEKKEQGDPPKDQPVPPVPPPPIMSATKLNGNTFIDGDVAPKNSQPSRESGSGSGNGTYEEFRQRAKAAADAFGEQREQQNGLDQDRVFKDFDRLSQQMHAELQSTREKREKSASMYDLSGFTRPASGHPRLDELQQRRHAHMQELEREIERSAKSRQERMSSVPRQMEATPPRTHEIPIELEPRSRRAESLCNLNEPPPRPHTTVGHYNHPVVQDDWSRYANDLGYSENIARPFAREVEICYQRQNQRTPHCIRAPRLSASTNDLSSSSQYSYDTFNAYGGRRTHAPMLNQAQQQQRPHYGSCYSMIERDPNPRYISTTSRRGVSPAPPPVATPQQQQVPPPAYDRQQRRSSLPRELHEQQLKYILSKEEELKFEVERLQQERRRLMEEMQRAPVLPAPQRRESYRPAAKLPTLSEDEVFRQQMAEEWMNKVAEREERRQHKIIRISKIEDEHDHSAVDKATISDEFLDRVKERRHKLSMPADSDWESGAESQPQPAAQSQPESDVEAPPVRILEGQAEANLRQLPRHLREFAKFSTSEQLPDGAQMERHEEQERREEATDNAHSSATKKTSIVKTYKVSRLPPSVQGEFPGQFSGGNRGRLYRERSQTARLVSHNIPLELTSNHSSSPDSDFNPGCGSSPAPGSSTQSSIPSLVQSPTPAPPPPIEPLNPSSSTAGGILGTALLLGLSLLTAWNKFS

SEQ ID NO: 27637 - DNA, 5247 bp, DROSOPHILA
ggtgttggtattaggggggtcatgcggtatctatgtgtgtgagcgcgtcgatgtgtgtgtgtaaatcagtgggtgagtgagtgggtgttcggttggatggggatgactgtactgtatgtttttgttggtttcattaattttcgtctacttctttgggagttggggttccggtaacttctttccttaagtagggatcttcttgccggccactactttgggaatcttcgcgcgtttgactggcgcttcgggctatggaatttatacagggtttttatttgcgttgtcgtttacataaatgctgatcgttatttgtgttctttattatttggaagtactatgttgcttatatcgttgttttctctactttaaattagtttctttttacctatcgctctacttctaactctctctctctctctctctcacacactctctttttctgtctaattcgagtatcctttttgtttgttttatttccttctttttatctttttttggtcaagtgttgcactgcctgtgtcttaaaatgttacacaaaacatacatacatacataaaatgtgaggaaacgaacatataaaaacacatacataattggttaattgactgaagaaaataatatatatatatataagcgtgtgtgtgtaggcgtttgtgggtgtgtgtgtatttgagagttatgcttgtagtccttgaacttaaacttcaatgcgaaggatattctgctcagcggtaacattcaaatttaacataaatacatgtttctgaatgaagtttagattaataagaagttgcagtgttttaaataaaaatcaacatcgcatgaagtttctcatgttttgaatgtttatgggctctaaataaatatgcgtgttgctgtgtgtccttttaactattttgttttgttatacaatttcttctgtttctgtttcttttcattttgaaatacaaacgcagttggtttttgttttttgtgttgtttttttagtttttatatttatataaatgaaactttgcgcccagcgtttaaaaacctcaatacaattgtctctccgtctctcagtgtggctgttgttgttgttgttgttgtgtgttgctgtctatcggtcttcccgttgtaaactatcatttcaatttatgtttttgtttcgtttacatgcagttaaatggattgtttgttgttgtattcgtgcgtatgtgtttgtgttgtagtatttgttgttgttggtggtgtatttattttattagtttttctacacccaattttaagaatcgatcgattggaacgatcgataatatatcgatattttggttttatgtttggttttattcagacaggcagagacatgattgtattcataatcatattcaggttcaggttgtcgatcggattttatggatgtttgatttgatttggtttggtttttttttgtggtggtggtggtggttggtttggtggttttgtatgtgtggggagagaaaacaaataaaaaagatataatatatttatatgcttagtagttgaatgatcccttggtggcgttgtgttttttttagtcaatatatagaattttagattccaaaataaaatacaacaaaaaaagatgagagagtggggtaaatggtggaaaggatactaatagctagttattaagttttaaatttaccgctcgtagtggcattttaaaattggctgctgcctgcagctgaatttgataagctaagctgtgtattttaaatccatatagcctatgtatgtgatgatcaagttgacgtcgtatcgggcacataaaacaaaagagcatattaacaatgtgcatatacagtaatgggtataaatcttaccttggaacaaactgattagtaggacgcttgggacgatattcgggatgcaccatgaagagcatgtgtggaaatccagtgccgaaataggcgccatcggtatggtggtgacgcgacgattttggtgtgtacacgtcaatgcacttggggcaataggtcttaaccattgcctcgccggggatgtccgacagacctgaggataataatcaaaggattagaccactggcagagcaactagcaactagaaaaagtcagaattcatcggtgaaatctggtacaaacatatttaacctgatttaactcaacatgatatccatcatgatcatttatcattaatagcagaaatgtttacaaggctcgtctagccactttggcctagttaattttcacagaaattgagggaccttgtttagtgaaaccctatcttgcatttgtgcatgcatttgattcagcattgctttatttgatcgttaacaacgtttagggaagtttcggtaagaatttattggagatcgggaagcgttgcgaaggttttaactagggcaagccaagccagacaattaaggtagaatttctattaagaatgcgttgtttttttcttggtgtaagatttcatgggaaagccccaatgatatgctattcaggaaactcaattagaagttgtgccaataatcgcgttgatagtttctggctatgtaattactaggcagaaaagcacgaggttcctcgtagatatgttgttttttttttttttttttagattacaatcaattacgcgcagaaagattcgcaactatgtttgttagctataggtaagagcgattgatcaaggatctggttacgcacccaatggcagcatgggctgactttcacagtagacacgtggacaatgtccgaaatcgccagtttgatatttctcgatcatttgagcgatgccgcgatttgttagtatatatctggcgtgtatgaggccgtagagcatctcggcggcctgctcggtcatgtcggactgcagtggattgtcctcgagctcgtcctctgtggatggtaaggcgcattagctatatacattacaattttggatatgggtaacagcccattctaaacttacccggttccaagtccaagatcatgtccaacgcttgccgatagttgggtacctgctcatttaaaccagttaaattgaatttatcctgtatgtagtcctcatccacctggaatcaaaagcgtatgcaattaggatctgtactggaatatactgtcatatatccactatatcgtgtgttatctggacatgtgtgtacagttgggctcggtattgccccaccttgcggcacacacgcacacacacacacacacacgcgcgcgcaaaggcagagattgagggctgcactttgcaattgttgcacttatagcgcgcgcttagataacgcgattacagcgaagaacgcgggtaattcgtcgttgatgctgatatgatgatgatatctcacctcgcagaagaactcattgccacgaagtccacagaaccaggtgacccaggagacttcctcggagctgctcattttgctgcaaagataagcgaatggagttgctaattcatattttcatcgttttttttttgctgacaaattatcctgcacacgcataccacacatgcacaccgcactctcacacacacaggcaatcatggcacacacactgggacaaacgctcacgcactattacatacattaaggggattattttgcgtaatttgggctggcgtgcgaaatttattgttaaaatatcttggaacggaatcttggcactttcttgtctaccccaccccccctgctttcttcacgtttccttttggttccgcttcttgttgctcgcacaaaccacactctctttttccgcttttttcttctttcctcctctttttttttggttggattggccttttggggtttttgttttcggttttccgtttaattcgcgttgcttgtacaatgttactagttttcggtgatcgcaccgttgaaattcgtgtggtcggggggcataaaaataaatttttatactcgtattgtgacaattgacaagcgctcatacaaaatgtgccgagcagcaagaagaagcacacactgttggaaattgagaaaaaaagagacacatatacaggggccaccacacgcacacaagcaaacacgcacaccgcgaagcgcacatagggacgtgcacacacgcacgcctttacaccgatgagcgcaatccaacgcacaccaacttgctattctgtatttttcccgctgcggctatcttccagtggccagcactcacccaaattgttaataattactcaaattgatcgacttttgtactgcagctgaaccggtaaaggcaaatattgtagcgaagacgatgatatcaggtatgcaatctcgactatcgattaccgctgtcctgcgctgtccgcaggcgattgccaatcgatgtggcgccgtgtcatcgctaagcgatgtatcggctaatcgggattgcgcgtttcgcaacactggttcggaaaagcaattaaccaaacaaaacgcggaattatttgttaaataagcaaatcaagccaaatattaaaatattgtttattaccagcatttagttggctgttttgccatttgtcaaataatttaccgattgcagctagcaatattttcttacaactactttaaggtattatttcgtttagttgtatggtaacactatgttgaaagtttgaaatgtttgaaagtgcttatttaaatttgtattattgacaaaataaatcgggttttcgtataatattttctcttagttgattgattagactaataatacaagaacgagcgataaacccactgcatgcattttaagcgcaatcgctcgaaagatgtcagagtgagagcgaagcgagttgcgagcttaagcgaaaaagcgagagcaaggccttatcgcttcaactcgctcagggcgtacgattgttttgttatattctgcgctatattaccgtttattttcaaaacacacgttattttgttttgtcttgttccattctgtaaataaccttttatataaattattgaattcgcctttttcatttctatttcagttaagagggtggacgacagttttaacagaaagttaatagttgcgcttgatgcaaaaaattcctcgtccgaatccatcacgttcacattaataactaaaagagagcaatgtagctcgtttctcgcttagctcttactctgccatcgactcgctttgctcacagcttctcgctttgctcatagcttctcgcttcgctactagcgcgcactctgccgtcaggcttattgataattttgaagatttccttggctctcttgcgtccattcacaacataggccagtgg

SEQ ID NO: 27638 - DNA, 972 bp, DROSOPHILA
cgtcttcgctacaatatttgcctttaccggttcagctgcagtacaaaagtcgatcaatttgagtaattattaacaatttggatgagcagctccgaggaagtctcctgggtcacctggttctgtggacttcgtggcaatgagttcttctgcgaggtggatgaggactacatacaggataaattcaatttaactggtttaaatgagcaggtacccaactatcggcaagcgttggacatgatcttggacttggaaccggaggacgagctcgaggacaatccactgcagtccgacatgaccgagcaggccgccgagatgctctacggcctcatacacgccagatatatactaacaaatcgcggcatcgctcaaatgatcgagaaatatcaaactggcgatttcggacattgtccacgtgtctactgtgaaagtcagcccatgctgccattgggtctgtcggacatccccggcgaggcaatggttaagacctattgccccaagtgcattgacgtgtacacaccaaaatcgtcgcgtcaccaccataccgatggcgcctatttcggcactggatttccacacatgctcttcatggtgcatcccgaatatcgtcccaagcgtcctactaatcagtttgttccaaggctatatggatttaaaatacacagcttagcttatcaaattcagctgcaggcagcagccaattttaaaatgccactacgagcgaaaaactaataaaataaatacaccaccaacaacaacaaatactacaacacaaacacatacgcacgaatacaacaacaaacaatccatttaactgcatgtaaacgaaacaaaaacataaattgaaatgatagtttacaacgggaagaccgatagacagcaacacacaacaacaacaacaacaacagccacactgagagacggagagacaattgtattgaggtttttaaacgctgggcgcaaagtttcatttat

SEQ ID NO: 27639 - protein, 215 aa, DROSOPHILA
MSSSEEVSWVTWFCGLRGNEFFCEVDEDYIQDKFNLTGLNEQVPNYRQALDMILDLEPEDELEDNPLQSDMTEQAAEMLYGLIHARYILTNRGIAQMIEKYQTGDFGHCPRVYCESQPMLPLGLSDIPGEAMVKTYCPKCIDVYTPKSSRHHHTDGAYFGTGFPHMLFMVHPEYRPKRPTNQFVPRLYGFKIHSLAYQIQLQAAANFKMPLRAKN

SEQ ID NO: 27640 - DNA, 4933 bp, DROSOPHILA
tatgggtgggtgttggtattaggggggtcatgcggtatctatgtgtgtgagcgcgtcgatgtgtgtgtgtaaatcagtgggtgagtgagtgggtgttcggttggatggggatgactgtactgtatgtttttgttggtttcattaattttcgtctacttctttgggagttggggttccggtaacttctttccttaagtagggatcttcttgccggccactactttgggaatcttcgcgcgtttgactggcgcttcgggctatggaatttatacagggtttttatttgcgttgtcgtttacataaatgctgatcgttatttgtgttctttattatttggaagtactatgttgcttatatcgttgttttctctactttaaattagtttctttttacctatcgctctacttctaactctctctctctctctctctcacacactctctttttctgtctaattcgagtatcctttttgtttgttttatttccttctttttatctttttttggtcaagtgttgcactgcctgtgtcttaaaatgttacacaaaacatacatacatacataaaatgtgaggaaacgaacatataaaaacacatacataattggttaattgactgaagaaaataatatatatatatataagcgtgtgtgtgtaggcgtttgtgggtgtgtgtgtatttgagagttatgcttgtagtccttgaacttaaacttcaatgcgaaggatattctgctcagcggtaacattcaaatttaacataaatacatgtttctgaatgaagtttagattaataagaagttgcagtgttttaaataaaaatcaacatcgcatgaagtttctcatgttttgaatgtttatgggctctaaataaatatgcgtgttgctgtgtgtccttttaactattttgttttgttatacaatttcttctgtttctgtttcttttcattttgaaatacaaacgcagttggtttttgttttttgtgttgtttttttagtttttatatttatataaatgaaactttgcgcccagcgtttaaaaacctcaatacaattgtctctccgtctctcagtgtggctgttgttgttgttgttgttgtgtgttgctgtctatcggtcttcccgttgtaaactatcatttcaatttatgtttttgtttcgtttacatgcagttaaatggattgtttgttgttgtattcgtgcgtatgtgtttgtgttgtagtatttgttgttgttggtggtgtatttattttattagtttttctacacccaattttaagaatcgatcgattggaacgatcgataatatatcgatattttggttttatgtttggttttattcagacaggcagagacatgattgtattcataatcatattcaggttcaggttgtcgatcggattttatggatgtttgatttgatttggtttggtttttttttgtggtggtggtggtggttggtttggtggttttgtatgtgtggggagagaaaacaaataaaaaagatataatatatttatatgcttagtagttgaatgatcccttggtggcgttgtgttttttttagtcaatatatagaattttagattccaaaataaaatacaacaaaaaaagatgagagagtggggtaaatggtggaaaggatactaatagctagttattaagttttaaatttaccgctcgtagtggcattttaaaattggctgctgcctgcagctgaatttgataagctaagctgtgtattttaaatccatatagcctatgtatgtgatgatcaagttgacgtcgtatcgggcacataaaacaaaagagcatattaacaatgtgcatatacagtaatgggtataaatcttaccttggaacaaactgattagtaggacgcttgggacgatattcgggatgcaccatgaagagcatgtgtggaaatccagtgccgaaataggcgccatcggtatggtggtgacgcgacgattttggtgtgtacacgtcaatgcacttggggcaataggtcttaaccattgcctcgccggggatgtccgacagacctgaggataataatcaaaggattagaccactggcagagcaactagcaactagaaaaagtcagaattcatcggtgaaatctggtacaaacatatttaacctgatttaactcaacatgatatccatcatgatcatttatcattaatagcagaaatgtttacaaggctcgtctagccactttggcctagttaattttcacagaaattgagggaccttgtttagtgaaaccctatcttgcatttgtgcatgcatttgattcagcattgctttatttgatcgttaacaacgtttagggaagtttcggtaagaatttattggagatcgggaagcgttgcgaaggttttaactagggcaagccaagccagacaattaaggtagaatttctattaagaatgcgttgtttttttcttggtgtaagatttcatgggaaagccccaatgatatgctattcaggaaactcaattagaagttgtgccaataatcgcgttgatagtttctggctatgtaattactaggcagaaaagcacgaggttcctcgtagatatgttgttttttttttttttttttagattacaatcaattacgcgcagaaagattcgcaactatgtttgttagctataggtaagagcgattgatcaaggatctggttacgcacccaatggcagcatgggctgactttcacagtagacacgtggacaatgtccgaaatcgccagtttgatatttctcgatcatttgagcgatgccgcgatttgttagtatatatctggcgtgtatgaggccgtagagcatctcggcggcctgctcggtcatgtcggactgcagtggattgtcctcgagctcgtcctctgtggatggtaaggcgcattagctatatacattacaattttggatatgggtaacagcccattctaaacttacccggttccaagtccaagatcatgtccaacgcttgccgatagttgggtacctgctcatttaaaccagttaaattgaatttatcctgtatgtagtcctcatccacctggaatcaaaagcgtatgcaattaggatctgtactggaatatactgtcatatatccactatatcgtgtgttatctggacatgtgtgtacagttgggctcggtattgccccaccttgcggcacacacgcacacacacacacacacacgcgcgcgcaaaggcagagattgagggctgcactttgcaattgttgcacttatagcgcgcgcttagataacgcgattacagcgaagaacgcgggtaattcgtcgttgatgctgatatgatgatgatatctcacctcgcagaagaactcattgccacgaagtccacagaaccaggtgacccaggagacttcctcggagctgctcattttgctgcaaagataagcgaatggagttgctaattcatattttcatcgttttttttttgctgacaaattatcctgcacacgcataccacacatgcacaccgcactctcacacacacaggcaatcatggcacacacactgggacaaacgctcacgcactattacatacattaaggggattattttgcgtaatttgggctggcgtgcgaaatttattgttaaaatatcttggaacggaatcttggcactttcttgtctaccccaccccccctgctttcttcacgtttccttttggttccgcttcttgttgctcgcacaaaccacactctctttttccgcttttttcttctttcctcctctttttttttggttggattggccttttggggtttttgttttcggttttccgtttaattcgcgttgcttgtacaatgttactagttttcggtgatcgcaccgttgaaattcgtgtggtcggggggcataaaaataaatttttatactcgtattgtgacaattgacaagcgctcatacaaaatgtgccgagcagcaagaagaagcacacactgttggaaattgagaaaaaaagagacacatatacaggggccaccacacgcacacaagcaaacacgcacaccgcgaagcgcacatagggacgtgcacacacgcacgcctttacaccgatgagcgcaatccaacgcacaccaacttgctattctgtatttttcccgctgcggctatcttccagtggccagcactcacccaaattgttaataattactcaaattgatcgacttttgtactgcagctgaaccggtaaaggcaaatattgtagcgaagacgatgatatcaggtatgcaatctcgactatcgattaccgctgtcctgcgctgtccgcaggcgattgccaatcgatgtggcgccgtgtcatcgctaagcgatgtatcggctaatcgggattgcgcgtttcgcaacactggttcggaaaagcaattaaccaaacaaaacgcggaattatttgttaaataagcaaatcaagccaaatattaaaatattgtttattaccagcatttagttggctgttttgccatttgtcaaataatttaccgattgcagctagcaatattttcttacaactactttaaggtattatttcgtttagttgtatggtaacactatgttgaaagtttgaaatgtttgaaagtgcttatttaaatttgtattattgacaaaataaatcgggttttcgtataatattttctcttagttgattgattagactaataatacaagaacgagcgataaacccactgcatgcattttaagcgcaatcgctcgaaagatgtcagagtgagagcgaagcgagttgcgagcttaagcgaaaaagcgagagcaaggccttatcgcttcaactcgctcagggcgtacgattgttttgttatattctgcgctatattaccgtttattttcaaaacacacgttattttgttttgtcttgttccattctgtaaataacctttt

SEQ ID NO: 27641 - DNA, 921 bp, DROSOPHILA
tcaattgtcacaatacgacaaaatgagcagctccgaggaagtctcctgggtcacctggttctgtggacttcgtggcaatgagttcttctgcgaggtggatgaggactacatacaggataaattcaatttaactggtttaaatgagcaggtacccaactatcggcaagcgttggacatgatcttggacttggaaccggaggacgagctcgaggacaatccactgcagtccgacatgaccgagcaggccgccgagatgctctacggcctcatacacgccagatatatactaacaaatcgcggcatcgctcaaatgatcgagaaatatcaaactggcgatttcggacattgtccacgtgtctactgtgaaagtcagcccatgctgccattgggtctgtcggacatccccggcgaggcaatggttaagacctattgccccaagtgcattgacgtgtacacaccaaaatcgtcgcgtcaccaccataccgatggcgcctatttcggcactggatttccacacatgctcttcatggtgcatcccgaatatcgtcccaagcgtcctactaatcagtttgttccaaggctatatggatttaaaatacacagcttagcttatcaaattcagctgcaggcagcagccaattttaaaatgccactacgagcgaaaaactaataaaataaatacaccaccaacaacaacaaatactacaacacaaacacatacgcacgaatacaacaacaaacaatccatttaactgcatgtaaacgaaacaaaaacataaattgaaatgatagtttacaacgggaagaccgatagacagcaacacacaacaacaacaacaacaacagccacactgagagacggagagacaattgtattgaggtttttaaacgctgggcgcaaagtttcatttatataaatat

SEQ ID NO: 27642 - protein, 215 aa, DROSOPHILA; identical to SEQ ID NO: 27639

SEQ ID NO: 27643 - DNA, 4639 bp, DROSOPHILA
aatgacgcagtagtgaactctggcaattacgcaaaaagccgttccatccgtgccgtggagtactcactgtattcaccaggtgggtctgcaccgccctgcagctaaccgaattcaagatctcgacgaagctcaacatctgaccactgcgggccgctaggtgaaggttgtttagctgggagaaacgtagacgcggctcgtggggaaacttggcccggatctcctcggagatctccaccagcattccgtgggccatgttgaagtagccgaaatcgggcggatagccgtcgtatatggacgtatgtgcctcgtctagaggcgcctcttctgcgggatcgacgtccattctggccgggaaatggacgatgctgcactgatcggtgatcactgatcaccaggtatgggtatggaagcaatccacacaggcccactctttccaggccaggcggcaatacggtcacacctagcggtgcacctgcgagagtgaaaacagtgactcggcgcgataggctgaccgttagtttatcgttcgtttattcgcgccctttgcagatattacatatgtttgttgattcgttagtttatcgttcgtttattcgcgccctttgcagatattacatatgtttgttgattgtaaatatgaaacatatatgaaatacagcttgaaatactggatatgttcacaagtgttgggttagattaagtgtgcgaattgaatatgctttctgtgtgcgtgcgtgtgcgtgcgtaaggttaactgtattagattggtgtatttttatatcgtgctttctttagcttcaatgtgaaagttttctacattggaccaggcctggatcttgggttttattcatagagttttgatagtgtgcgtcgacaggcccgtccaatggaaaattttcatcgaggcgtttcgttttggatcatattttcccaatctcccatttgagtgcggcgatgtgcatcggttcgccgggaaaactatgcctaaacgcagcgagttcttaattgtacatcatatttgttgttccttcttctccatcattatttctagcatacgctgctttaaagtgtggatatatagtctcttgagtttacagtgggctcagcatcctccctatgctggacaatatagttttcaaacgtctcgattaacaattcactcgtttcaaaaatgtcgcttgaagcttgtgtcatcactattcaacagtcactgtttacgtcacagtcacggtttactcacactatcgatacaccaacgtgctcgtgagttgtgcgcggatgtgtttgttgtgttcacgggaaatttgcttccactggaatttaaagcttgtctgcactagatcttctaaaaggaagaaagttcgtatgtggtttaaatctccattctctgcccttgtcttcttgtgttttgatcatccattttttgatatactgaaatggcaaaatgtcggttaggaaactcaatcccgaaaatcccaaagtgatttgaatgattagcttaagcgttgtgagtttatattgaaaatatgtaataaaaccttttacatttagctaaaaaaggctacatttttatcaatatatttgatgcataaaattcattaaaaatacaagcaagtgtacgcaattcataaaattaatcaacaatctacatgaaggcttacccctcgttaactacgttatctacaaagcaaatggcagaagtatctcaatataagatatttactttacggatccaccagaactggattttagttggaggccgtgatggccaccggtgtcggtgagggttgtgccacgactgggcttatggttacggcaggtggagcgctattgttgagctcagacacgcctgaggaggatatttcagcagcaaccttgagtccattgggggttgcacccaagctttgacgcgagttgcgcttacggtgcatacgcggcttgtttggcgagggagtcttggtagtagagtcgggcaacgaggaaacgctgcgcgacttgtcacctcctgctccaaactcggtgctagccgatggggagctggatggcctagcgtccttcaccgattggcggccgccgcgtcgattgcgacgacgataattgttattattgttgctgttacccttgacaaccggcttcaccgtggtcttcttgggatcgaaatagctgtccagaagctcgagcagctccgccttgtccttgctctttagccggccaattgactgcagggctatgtccaggccctcgatgtttttctctgcccagatggcacttagcgtgttcaaatcgaacccattctcggccagcacaatgcggaactttacggcacgcacacgatggtacagagtggtcttgaagtagttcaggaacaccggacggaaggagttttgacgctccaaattttcgatctggatatccagctccaggacatcggacaccaccaacttggcaaacggacgtatggcattaaacatattctccaatgcctccgagctttttggttccggcttgccgtcggagttgctcagctgaagggccacatcaaaggccaatttggcacgaacactggcattgccatcaaacagttcccgcttaccctgaacggcgttcttgctagattgcttatcgtcaccattggtcacggtactgtccctgggggatatcgataccgaatcggacaccatactagatccagatcccaagccagatccagatccagatgtggacgcagagcaagccgcgtcttcctccttggtcgtggacaagatcttggaaagctttcgcagactgtagttctttatgttggcatcgccaatggaagccttggccagattgatgctgtttgcaaacgacttcaccgacgcggtgaagcgctccaacaggccgtacttcttcaacgactccaggatcatgtagggaatgaacttgcgctcttcatgatagataagcacaatcccgtccgagctgggacccgccttggtcttcagttgctcaagccagttgaggaagtccttgagggcagcgatctcagacttggatttaatgatctgagaggatattgtatgttgaattgtggatgcttcaatacttgactgccactattaaatggactggactgcactggactcaccttataagtctgcatcgacttcagcatacgataaaagccaatcgaaataacacgaacttgatgacgctggcgagcagctggattcagattcatatatggcatgatgtactgctcgaagtggtcggtgggtgtataagcggccagctggacaatctgtgggtttatcgcaagtggggttaggaccgaacgacgaacgatctaacggcagtcagggggtattacctcatccattagacgacgtccagtggtgtcgatatccacgcccaccaggatataattaccggccggcagctcaactttatcgcccacgggcgacgaggattgatcggcgacggcaatggccactccggcatcgatgttatcggcaaccattttcttatatgatctgcgaaaagcaatctagaaaattcggataacgaaattagctgagtcactagaattttttttttttaaggaaccgatttcctttgcaaaacgcgaaccgctttcactagattttcgatatgaagtgacgggctacgaattttcaagagtctattaaacccaaagctacaactaacggttttcttccagtggcgccatcttttacacagatgtttttatgtgtatgtatgtatgttcactttcaccacactttagcacttttcttttgggctcacctttattgaactcctttttcgtgttggtttcgatgggctctttcgctttttacgaactttttcctttatttttcaaaaggttaaagcgaaatttgcttctgttcgacgagctttcacaaataagaaacaattcgtacgactaactaaaacgtaatgaataatttcctgatgcacccgacggcctaggaaaagtgcgcgaatttgacatatgcaaagcctgctaatcgaggtttttgacttaagtacgatgggttagacagctgcaactcgtccacatcttgccacaacgcccactgtgcaggtgaaaactttttgcagaatatttttaccgctgctataataaaatatagtctttcagcttgtaaataaatttttttccaattattagccggcaaaattggtgggtaaacaacaaatatttggacaaaagcgcagacaagaactgataagaggatcagggatgacgaatttcaaatggttgcgccagagatgacagggtatcgatatcactatcgatagacttatcgaagacggcttagcacttatacctactctgcagccctggtcggcagaaaaacaataatcagctgatgccatcgcttatttccaacaatttgcaccgcaaaagtgaagaattaccaagcaaatagatcgcctgccgaccgaattatgctgctgtaatcacccaagcacacaacggtaaagataaaaccaggcgagataacaccacgcacaggtgccacaacatgctgtcctacataaagcgcaagctctccgaatccgacagcggcgtcagttcggtcgcaactgtgacgtcgtcgtgcggcggcgatagtgggagagcgggcggaac

SEQ ID NO: 27644 - DNA, 2380 bp, DROSOPHILA
tcacttcatatcgaaaatctagtgaaagcggttcgcgttttgcaaaggaaatcggttccttaaaaaaaaaaaattctagtgactcagctaatttcgttatccgaattttctagattgcttttcgcagatcatataagaaaatggttgccgataacatcgatgccggagtggccattgccgtcgccgatcaatcctcgtcgcccgtgggcgataaagttgagctgccggccggtaattatatcctggtgggcgtggatatcgacaccactggacgtcgtctaatggatgagattgtccagctggccgcttatacacccaccgaccacttcgagcagtacatcatgccatatatgaatctgaatccagctgctcgccagcgtcatcaagttcgtgttatttcgattggcttttatcgtatgctgaagtcgatgcagacttataagatcattaaatccaagtctgagatcgctgccctcaaggacttcctcaactggcttgagcaactgaagaccaaggcgggtcccagctcggacgggattgtgcttatctatcatgaagagcgcaagttcattccctacatgatcctggagtcgttgaagaagtacggcctgttggagcgcttcaccgcgtcggtgaagtcgtttgcaaacagcatcaatctggccaaggcttccattggcgatgccaacataaagaactacagtctgcgaaagctttccaagatcttgtccacgaccaaggaggaagacgcggcttgctctgcgtccacatctggatctggatctggcttgggatctggatctagtatggtgtccgattcggtatcgatatcccccagggacagtaccgtgaccaatggtgacgataagcaatctagcaagaacgccgttcagggtaagcgggaactgtttgatggcaatgccagtgttcgtgccaaattggcctttgatgtggcccttcagctgagcaactccgacggcaagccggaaccaaaaagctcggaggcattggagaatatgtttaatgccatacgtccgtttgccaagttggtggtgtccgatgtcctggagctggatatccagatcgaaaatttggagcgtcaaaactccttccgtccggtgttcctgaactacttcaagaccactctgtaccatcgtgtgcgtgccgtaaagttccgcattgtgctggccgagaatgggttcgatttgaacacgctaagtgccatctgggcagagaaaaacatcgagggcctggacatagccctgcagtcaattggccggctaaagagcaaggacaaggcggagctgctcgagcttctggacagctatttcgatcccaagaagaccacggtgaagccggttgtcaagggtaacagcaacaataataacaattatcgtcgtcgcaatcgacgcggcggccgccaatcggtgaaggacgctaggccatccagctccccatcggctagcaccgagtttggagcaggaggtgacaagtcgcgcagcgtttcctcgttgcccgactctactaccaagactccctcgccaaacaagccgcgtatgcaccgtaagcgcaactcgcgtcaaagcttgggtgcaacccccaatggactcaaggttgctgctgaaatatcctcctcaggcgtgtctgagctcaacaatagcgctccacctgccgtaaccataagcccagtcgtggcacaaccctcaccgacaccggtggccatcacggcctccaactaaaatccagttctggtggatccgtaaagtaaatatcttatattgagatacttctgccatttgctttgtagataacgtagttaacgaggggtaagccttcatgtagattgttgattaattttatgaattgcgtacacttgcttgtatttttaatgaattttatgcatcaaatatattgataaaaatgtagccttttttagctaaatgtaaaagtatatcaaaaaatggatgatcaaaacacaagaagacaagggcagagaatggagatttaaaccacatacgaactttcttccttttagaagatctagtgcagacaagctttaaattccagtggaagcaaatttcccgtgaacacaacaaacacatccgcgcacaactcacgagcacgttggtgtatcgatagtgtgagtaaaccgtgactgtgacgtaaacagtgactgttgaatagtgatgacacaagcttcaagcgacatttttgaaacgagtgaattgttaatcgagacgtttgaaaactatattgtccagcatagggaggatgctgagcccactgtaaactcaagagactatatatccacactttaaagcagcgtatgctagaaataatgatggagaagaaggaacaacaaatatgatgtacaattaag

SEQ ID NO: 27645 - protein, 532 aa, DROSOPHILA; identical to SEQ ID NO: 19200

SEQ ID NO: 27646 - DNA, 4074 bp, DROSOPHILA
catctcatccacctatccctccgcgctgcggcccaatgtggtggactccaccacgtccagcgatgcggaactgcgcctggatcagttctacgccagcaatggcatctccaccagcagcaacggccaggcgatcagccagcgcaggggttcgctgcagctctggcagtttctggtggccctcctggatgagcccacgaccaggtgggtacgaaacggcggcaccaaatctcccatacattaacactctatgattctcctttcagtgccagttgcatcgcctggaccggtcgtggcatggagttcaagctgatcgagccagaggaggtggcccggcgttggggtctccagaagaatcgacccgccatgaactacgacaagttatctcgcagtttgcgctactactacgagaagggtatcatgcagaaagtgaacggagagcgctacgtctatcggttcgtctgcgatccggatgcgctgttcaacatggcctacggtcacctgaccaccggttccggcaagggtgaccagcaccagttgacgctgtcgctggccaagacgcccccgacatccggcgactcccagacgcaatccccacgagtcgccaagtcggagtattacgataccgccgcattgcataaatactaaccatatagtcgccatatgtgggcggagcgttcgaatgcggccgcgtgggcgtggccgtgtcccgtgtacattgtgtaatctagttgcgtgtggggttacgaatttcaaatgaaggtttcgttacgatgagctgcgttgggaatagcttagaggggcacgaaggctgtttttcagtaatattggggtcagcatctcctgaaaattacatacaatatggtttcaaaattgtaattctgtttttattataaagttgttcgacatttttatgcaacgtgcccctccatagactaccatatatcgagctattgattccaaagactaggctgatcagaacgacatacacaaaatgtactttacaatattaacatatagaatatatacttgagcgcttatgtatacatatatatgtatctatctgtgtacatagagggggttacagaggaaagcagccatgtgtccaccaaatatcgtagttctgcattgaggttgagttacttaaataaactatttagccagttttcgatttcgaagaccgtgcaatctggcagattaggaaaccatgaaacttcagttcaataaggtaatatttaaaaaaaaaattgttaaatctaaagtccaccaaattgcatcggttggagaaaccggaaacagagctgtttgaaccgtttctgttcgttaataaatggcaacagagtgtttttgattgtttagacctcactcctccctcttcttcttccttttgggcttatcctcgccatcggaatcctggctggtggcactggaatcgctggcactgctgctgctctcctgcttgcgcttttcgggcgtcttcttggccagcttttcgatgtactgcttcagcttgtccggctgcggactgtatgcccagtggatcaactgcaggtgcaggtcggtgggtgctccggtctctgcatcgaagagcttggcctcctcactcttaatctgctccagcaacttggacagctgacgattgcgcacaatatcccagctggtcttttcatccgttttggggaacattgtgcgcaggtgcttgtagttacccttggccttggagccgccataggcttcgagaaactccttagccaactcatctttgggatcgggcagtttggtgaccacggcgagtggcaagtatgctcgattgtccttgatacgattctcggcctcgaacttttcgaggaaatcctcaagtacctggactccctcctttatggccgtgatcttgtcctcgttcttggtgcctgacaggacacgcttggagctgccaatcaatcccttgatggccaacctctggtagtccggatctcgttccgccaaaatgctgcaatacgagatgcatatagaaatagtttggatacaggcaatctgtggaatgtggccataaactcattcatatattggggtggatcatattcatgaaaatgctatcactagtattacgattttatcaaaataaactgcttatagaatagaaaatatatgtataatattaattaattaatatatatgactttcgaagcaatacatataaaactattttaaggttttcacttattgagatatatatatgatgatttaaacatgcgtaagtggaatgctatgttggatatacaaaagttaaatatccgaaaaagtttaagcaatacgatttatcaaatcgatccaccctaatatgtatgcatcccatacggagaggagcgaatgggaagagcgtagtggccgctctaccaatttaatgagacttccgagttcgacgcagcaaaagtgtgccatgacatcattggacgtcgtcgctggtggcctgggccgaaggtctccggcggctcattagcatgccagagtagagggcctagtcaagtgacttacctcagcgttgcctccgcagcagccttgtccttgaatcccaatcccggcaccgtctccaccttgtcctcgctctctgtcttggcattcttgctggacgcccctccgccattctcctccagccacttttcaaagactccaatggccgcattgatgttcttcagcttctcctccgccttggtcactagaatggtaggtttagtgctggattcaacgcatcccttgggcacaagcactcacttgtcaggactcttttggcccggccaagcaaaccgcgcaccgtcagcttgcgatactgcatgtcgtgactctccagcagcttcaacgtctctaacgccttctccatgtccttgaagccaaatttcgaatctccctctgccattgctgctcctttggttgctaatacttgggtgagtatctgtctgcttcctgtcagcgctagaatacgactgattttgcgtagccgtctccaactcgacggcatatggcacttaatcatgggaggaagacgcaaaatgagcaccactgagaggcactgatcagagctgagcgtggccaattagataagcaccacaaaataactgggtgactctatgtttggaaaccggtttgttgtcgtagcaccggagcaaaacaaaacccacgagaaaataatcgatacttagccatgacgtcagcgccacgagaaactgataacattgagaggaaataaacgatcttaagtattaattacctaattaaacgccgctctgcatattaaagcatgtaatatgacattgctgtcgttatatttgcaatcatatttattatgatatattttccccaatcaatacgaaaattgttataatttgtttgtgttgtttattaacatggaactcaaaaagctttgggcttagcggtgaacgatgggctagttgcaactgcgccgtatttgaagtatatcgtcgaccatgaagttgcgcaggtggcacagtgcctgcaccacgttgccctggtcgcgcagattcggtccgatccacttctcgggtagcgccgtcttggccaccacctgtgcgggtgtgatgtgggtcagtgcacgccgccaattgttgttgcaggtgaccacgttcagatggctgcccgtctgcaggctctcgatgtacttaatgtaggcctccgagtggatgacgcgagtggtgcgcggcggcactgtgacgaagagcggctctggtggcggacccaagacgatcgtttgctgttgctgcagttggtgcatgttctgctgcggatgctgctgctgctggagctgcactgcctcgagattgcttggagcgcgcggcgattgcgcaaggctgggcgggatgggcacagtagtggccagttgcgcatgcttctgccgacgcggcacgaaattcttgctgcggtctgccgccgaaatcgtcttgccacacttgctcagatggacctcgcgcacatgcttgatgaggcgcagaacgttaggaaaggcctgaacagacttcttgacccgcgggcagttgcgccacaggcagacatactccgtctcca

SEQ ID NO: 27647 - DNA, 1473 bp, DROSOPHILA
ctctgatcagtgcctctcagtggtgctcattttgcgtcttcctcccatgattaagtgccatatgccgtcgagttggagacggctacgcaaaatcagtcgtattctagcgctgacaggaagcagacagatactcacccaagtattagcaaccaaaggagcagcaatggcagagggagattcgaaatttggcttcaaggacatggagaaggcgttagagacgttgaagctgctggagagtcacgacatgcagtatcgcaagctgacggtgcgcggtttgcttggccgggccaaaagagtcctgacaatgaccaaggcggaggagaagctgaagaacatcaatgcggccattggagtctttgaaaagtggctggaggagaatggcggaggggcgtccagcaagaatgccaagacagagagcgaggacaaggtggagacggtgccgggattgggattcaaggacaaggctgctgcggaggcaacgctgagcattttggcggaacgagatccggactaccagaggttggccatcaagggattgattggcagctccaagcgtgtcctgtcaggcaccaagaacgaggacaagatcacggccataaaggagggagtccaggtacttgaggatttcctcgaaaagttcgaggccgagaatcgtatcaaggacaatcgagcatacttgccactcgccgtggtcaccaaactgcccgatcccaaagatgagttggctaaggagtttctcgaagcctatggcggctccaaggccaagggtaactacaagcacctgcgcacaatgttccccaaaacggatgaaaagaccagctgggatattgtgcgcaatcgtcagctgtccaagttgctggagcagattaagagtgaggaggccaagctcttcgatgcagagaccggagcacccaccgacctgcacctgcagttgatccactgggcatacagtccgcagccggacaagctgaagcagtacatcgaaaagctggccaagaagacgcccgaaaagcgcaagcaggagagcagcagcagtgccagcgattccagtgccaccagccaggattccgatggcgaggataagcccaaaaggaagaagaagagggaggagtgaggtctaaacaatcaaaaacactctgttgccatttattaacgaacagaaacggttcaaacagctctgtttccggtttctccaaccgatgcaatttggtggactttagatttaacaattttttttttaaatattaccttattgaactgaagtttcatggtttcctaatctgccagattgcacggtcttcgaaatcgaaaactggctaaatagtttatttaagtaactcaacctcaatgcagaactacgatatttggtggacacatggctgctttcctctgtaaccccctctatgtacacagatagatacatatatatgtatacataagcgctcaagtatatattctatatgttaatattgt

SEQ ID NO: 27648 - protein, 316 aa, DROSOPHILA
MAEGDSKFGFKDMEKALETLKLLESHDMQYRKLTVRGLLGRAKRVLTMTKAEEKLKNINAAIGVFEKWLEENGGGASSKNAKTESEDKVETVPGLGFKDKAAAEATLSILAERDPDYQRLAIKGLIGSSKRVLSGTKNEDKITAIKEGVQVLEDFLEKFEAENRIKDNRAYLPLAVVTKLPDPKDELAKEFLEAYGGSKAKGNYKHLRTMFPKTDEKTSWDIVRNRQLSKLLEQIKSEEAKLFDAETGAPTDLHLQLIHWAYSPQPDKLKQYIEKLAKKTPEKRKQESSSSASDSSATSQDSDGEDKPKRKKKREE

SEQ ID NO: 27649 - DNA, 6027 bp, DROSOPHILA
tggccgaggtggtcaccgaccagagcttcatcagccaggtgctggccataaacgatgacatcggcaacatgtccgtggagaattgacagttaaaggagcctaaggatgtcgctgctacggaaacggaaacgaagatggaggaacaggcgataaaagacattgacaacgcagctgcaacttagagttccgaacctatttgaatactttgaatactttgtcctttccacagtaatattctttttagtagcatataggcacctcttacaccagcacacacgattcaagtatatattcaatttagtctagtatatatttcaaaatatttattcacctataaacacgacaacacgctctatatggtaatcccaactgaattatttaatcgaaagcgaaacgaaattttattcaaaatatttaaaagaaatgcgcaaagtttagacttcaatgtttcgcttaggttcttctaatttcaaactatatatatacttatgcgcaactatataatggcaaaattagttataactggtatcaaggcaaaacataaattgtaattgttgtacgaacatatttccgtttaaacacttaaatgcactgtactatttcggttcaataaataaatcagctagcaaaagaaagaaggtattttgttgggagacttaaaacataattttacttgaactttaactaacatgaaaagattaaaggtgtattattgccttaaatttgaatttcgatatttttatggcagtgatatcgattagtttggtaacagtagcttaacatagaatagacatgttactgttaataagcttagctcaacatttaggtattttttgcacacgcaaactctgtttctctgtaataaaaacatttgtttaaaaacctcaggtttcttatgatttacaaatgaataaggacaaaataaagaaaaatgcatactgacggcagatatcgatgattacatcaacaatcgatattttgaaacagagaaagtgcagccctggtgccatcgatgtatatccaccttggattttcgcttgtctgcagttatttcaattaagttgtttcaaatcagcgtttttgtgagtgcacactaaggtaacaacacgccgaccgacccgcttaaccattgcataaccacgtaattgtacaatatcagctgtttttctgcgtgatcagccggcaagtgggtaaaattcacctgttgaccagcggcaataagccaaaacaaaacaacaacaatcgtggatcaagttcttggcggaaaggcgcgcaattaaaacctaacgttcagttcgcttttgaatttctcgccgagcggttgtggcgaaaataagggcccgctggaaaaaccggttttcaaacaccagcgattgatcctcttcgaaaacgtgaaagaaaacaaaaagacgaggaagcgccgccgcagcctttaattgaaaaaaagggtgtcaatattagcatagaaatcgaggcacaggtgcattttcgtctgcgtcagccaaattgaaggtaaaattgaaaagccctctgcaagggcaacaacaatagaaaaagaaagttaaccatatgcagccaaattaaaaacgaccgcggcaacaacagtaaaactgctaagcttttgcgttttgttgacggaagtcgaaactcttgacagcacgttcgtggtgtcatgcgtacacacagaaaaaatggaattactttatgtgaaaaatgaaaaattcatacaaaacctatttctaatttgtagtgaagttcttatcttttaagtgcaatctattataaaagataaagcaattaagagaatttcaaacaaccttcactcaagaaaaataattctatttccttaactttcttaaaatggaaaaccattctgcgcagtacaatttgtaaatatttttatattttacaccaatactaaagagtttttcgcagtgtactatgctaggtcgtccgtacagatatttccccgctgcccccgcaagaagagcccaaagaaaccgaccctagttgttgctgtttagcgcctcagtcattttcagctctggccccaaattcactattttggccccgtttattggctttggctcgaagctcggctcttcaactttcattccgccgctgtttgggtttttaattagcattttacgagcacacctaagccagttctctcgctgtctcccaataaacgcgctcaactatcttctgtctaattaatttaattgtttccccgcccgattaaaaattaagattccagtgcagcgctcaaagtgcaggtggcaaatatgcactgcaaatatcggtggccaaacaatcgcgttagctttataagcccggctaaccaacgctggaaattgctgggcaaataagaaaaaactgagggaaagaggcaacaactcaagctattcgacggccaatggggtcaagtcgatttcagaacacgctctctgataaatatcattaaaaagtttattaattattagacttctatccccaaaaatggggtttcctggtgaaaattctgagatttcaaacatcattcttgttactctgtcgaattaggattagtgcgttaaaacagcacttttgtaaaagcctttttaattgatagcaaagatcattctacaaaaagttcgagctttataattaaaccacatttttaagtgattagttactctctactgttacgccaacttgatagtataaaggcatgataattgtagaagctcgactattcgcagctgaatcgtgacacgaatcaatctctggcaagtatatatggccaacacacctagaattccaaacgaatatggccaacagatgtacccgctggcactcggatcgcgaaatcttgctgactcagttgaagagtttcgcaaagtgcactcgaggcgaatttacccgccaatattgataatgttgccggctaatggctaatgtctgtgacgaaccaggatcggttttcgttatcagccggcgcactttgcccgatttcttatcaaaacccgtattccctttgcagagttccggagagacggcgatccgatccgataagagcgtataatgttgggaactttgctgtggattttcttcgtcggcctgctgctgtgtgcgttcctcttttcgaagaccaccaaggagttcccgaagtcctggttcgagtggaagactgagtttcggtatcagtacctgggaatcgttgggctcgtccacgatgcccagtataaggcacgggatcgagtgggtaagtcaatttgctagccgatgcttattccacgatcactaattgttgccattatccattaagcactttataaacaaccggaccgcattgctgtcatcaccggaggcaatcgcggcatcggactgcggatcgtggagaagctgctggcctgcgacatgactgtcgtcatgggtgagttgaccaatctccgcccaacaacttgtttcaggcctattcctatccataagtcggcgatctgcttatgaattccacaaacatttaaccgtgctgcaagtgcacgtgctcggcaagctaaaatcgaacatcgaataaacgatcgtcgaaatgcagatccattcccacccttgtcaatgcgatacagaaatcatgacccattctcctgatttcattatctaaccaagtcgcgtaaaagtctcgattttcgggaaagacaagcgataagagttcattgactggtcggagaaaagaattctaaatttcaatgaaaagggtcacagttatcaataattattttgtattttctcgttaacatttttgaaaatggcattttttgttgcttttccaatttcttgctttaatacgtttacttacaatttcactgcatattttagtctctaagaaaattcatttattaagaaatcatttttttttttaaatatatttaattttattgttagtgctagttaaaataataaacattttaatcatttaacagtcaactgttattttctacattgaacttatgtaaaatgtatagatgtaaaaaccagagcttgaagtgcgctatacaggcgctaggtgtcgcttatattgcttatattttgtgtaaaatagggtagattagaaaacactcataaaaaagtgttttaaaggatatttattaattaagttctgtcctctcagcaatttttgtcagtggctcactttaatttatgcatttattgcaggcgttcgtgatcccaaaattgccgaaaccgcagttgcatcgatagtcgacttgaatgctaccaagggcaagctcatctgcgagcaactggatgttggggatctgaaatccgtaaaggcatttgctcagctcatcaaggagcggtattcaaaagtggatttgttgctgaacaatgctggcatcatgtttgcgcccttcaaactaaccgccgatggctacgagtcgcactttgccatcaacttcctgggacactttctgctcacccacctgcttctgcctcaattgagggcggcaggcaaggagggaaggaactccaggatcgtgaacgtcagctcctgcgtgaatctcattggacgcatcaactataaggacattaacggaacgtacgtttgagtaattgtcgcctaagttccttatttactaggttttactgcttgcagaaaacactattacccgggaaccgcctacagtcagtcaaagcttgctcagatcttgttcacccgccatctgcagacactgctggatgcagaaaagtcgcacgtgcaggtcaatgtggtgcatccgggcattgtggacacggatctgttcgagcactcggccaccacatcggtgcccattttcaagaagctattcttcaagactccggaaaggggatcccgcacggtggtcttcgcggccattgatccctccatcgagggtcagggtggtacttacctctccaacggcggaaagggtcctttccatccggatgccaagaagccggcaaagtgcgagcagcttttccagttctcctgcgacctgttgaaaatccagcagtacggaaatggcgaatactaaatgaactccacactcagtctatctcacattcctcctactggtgcaacgtacttttctagataccgtcagcttttttgtaaatcgatttcttttgtataaaaacatttttatatagaactgcagctggtgttttgtgttcaggatctgctgatgctaatctggtcaaattgctgtgctaggttttaattaacttgtctgcgcttgattgccatcgtggggctagggaatgcaattaaaagagctgcaagaaacatttatttgaaaatgcactcagcagttggcggcggcagcttgaaaggtgacaacaacaacaacaaccacgtcatatctgctgtatgtcaaattttcgaaaaagcaaacaatttaattttgtgcgcctcctcaaacaatgagcgattaacattcaacattttggaggaattttaatcgacttcagttaaggggacaggagtatgggggttccaggagagcggtacggagacggaggaactcaggtaggtaggtgtatcatctcgaaaaacaactgcgaagcaactacaactcgactgtcacttaagcgaactgaacgcttaaaagcgaacgacatgatggctgcaaaaaaaaaaacaatctcatatttaatgcatatccaaaaaagactctatcgctatatgaagagatagacccggcgataactcaatgtgtgaagctgccgatgcggtgggcgctgtcatcaatcaaagctccagtggacgaagacggcccagattcccaggctgtcttcgatgcggagtggagtaccgaatgaacccatcttctgcggcttctttcatcggttgcatgcctcgcgagtattagccgcttgattggattttgggagtagggataagcaaatcgcagaaatgaaaaaagtttctcaatttaagaccaacgatctcttttataaaattagatgttctctaattaaaattataattaaatttttaaatactctcacagattaaggaatctccattttaat

SEQ ID NO: 27650 - DNA, 1560 bp, DROSOPHILA
ctggtgccatcgatgtatatccaccttggattttcgcttgtctgcagttatttcaattaagttgtttcaaatcagcgtttttgtgagtgcacactaagctgtttttctgcgtgatcagccggcaagtgggtaaaattcacctgttgaccagcggcaataagccaaaacaaaacaacaacaatcgtggatcaagttcttggcggaaaggcgcgcaattaaaacctaacgttcagttcgcttttgaatttctcgccgagcggttgtggcgaaaataagggcccgctggaaaaaccggttttcaaacaccagcgattgatcctcttcgaaaacgtgaaagaaaacaaaaagacgaggaagcgccgccgcagcctttaattgaaaaaaagggtgtcaatattagcatagaaatcgaggcacaggtgcattttcgtctgcgtcagccaaattgaagagttccggagagacggcgatccgatccgataagagcgtataatgttgggaactttgctgtggattttcttcgtcggcctgctgctgtgtgcgttcctcttttcgaagaccaccaaggagttcccgaagtcctggttcgagtggaagactgagtttcggtatcagtacctgggaatcgttgggctcgtccacgatgcccagtataaggcacgggatcgagtggcactttataaacaaccggaccgcattgctgtcatcaccggaggcaatcgcggcatcggactgcggatcgtggagaagctgctggcctgcgacatgactgtcgtcatgggcgttcgtgatcccaaaattgccgaaaccgcagttgcatcgatagtcgacttgaatgctaccaagggcaagctcatctgcgagcaactggatgttggggatctgaaatccgtaaaggcatttgctcagctcatcaaggagcggtattcaaaagtggatttgttgctgaacaatgctggcatcatgtttgcgcccttcaaactaaccgccgatggctacgagtcgcactttgccatcaacttcctgggacactttctgctcacccacctgcttctgcctcaattgagggcggcaggcaaggagggaaggaactccaggatcgtgaacgtcagctcctgcgtgaatctcattggacgcatcaactataaggacattaacggaacaaaacactattacccgggaaccgcctacagtcagtcaaagcttgctcagatcttgttcacccgccatctgcagacactgctggatgcagaaaagtcgcacgtgcaggtcaatgtggtgcatccgggcattgtggacacggatctgttcgagcactcggccaccacatcggtgcccattttcaagaagctattcttcaagactccggaaaggggatcccgcacggtggtcttcgcggccattgatccctccatcgagggtcagggtggtacttacctctccaacggcggaaagggtcctttccatccggatgccaagaagccggcaaagtgcgagcagcttttccagttctcctgcgacctgttgaaaatccagcagtacggaaatggcgaatactaa

SEQ ID NO: 27651 - protein, 355 aa, DROSOPHILA; identical to SEQ ID NO: 23406

SEQ ID NO: 27652 - DNA, 3742 bp, DROSOPHILA
aatcttttaaaatatgccaggttttctttgattgcaaaaagttaatataaatgttacttgaaatttttaacacttaaaaaataatattttaaatttgatgaaaagaaatatttcttattaaactgttcaacgttattattgtacattagatacattgttttaccattcagctgctaatatgttttaaattttgtatataatctataatttctctctgtgtagaaacaccgtgccaccaaccgtgggaacgctgcgctcggtggctctgagggccgccaaccagatcggcaggtaccgtggaacgcgctacaccaccggcacctccgcctccattttgtacgaggcctccggcagcttggacgacttcgcctatggcaatctgggaatcccgctgtcctacacgctcgagctgcccggtgacgagttccatgtgcccgcccacgacatcatccacgtctgcaaggagacattcgccggcttcatcgagttcatccggcacgtcagcctttactagaaggcgccactgtatttcctaagccctaaagcaattgaatttattgtttgttaaaaactaaaattataagtcacctcgttgttaagcattaaagagatgaatagtgaataaatattgtcgtttaaatatttttttatcacccgaaaggaatgcatatttatttatgcgcatatattcgttgattttatatgcatttgctgaatgaattgcagattgctgttaattaaaattagtgtagccaaaaaatgaaaagaatgttaattgaatatatgaaagtgaacaacagttattgcggacttgattttgaaacaaaatttgatttttcttcacttatattcaacgactaataaaatacggaggtattttcgctattttatttctgttttatagctttaaatttcgatttaaatttaagtttaaatgaactggaactagtgggttctctcgagccctgaatataagagggggaactacttacttggtctgtgtatcataaaagcgatccgtcattttggtatcgtaagcataccgcctgaggaagctaataggtttattgaaactatgagaaactatcacttggagtataaggttctgatcgaggatctggctcctttggtgcatgcccaacgagctgaaaatcttagaaagaagctgctcatccaatggccacacattgatgtactatcagcattttatacacattcagaaattaatgattatctggatagtttactcgaaagatttccgaaacgagttcaggtgaagcaatttggctggagttacgagagacgccccctcaaagttttgactataacaaatggagatggtaggcggaataagccggtgatcctaattgatggcactgtccatgcccgggaatggatatcaccatcgatggcgctttatatcatccagcagctgttggacaactatggggataaccaggagctcttacaggactacgactgggtgattatgccagtggtcaatgcggatggatatgagtacacacacacggattctcgttactggcgtaaatcccgtcgacccaccagcaatccggaatgcattggcacggatatcaatcggaattttggctacgaatggggtcacgatgagggatcttcctcggatccgtgcgaaaatatttaccgaggagagcgaccattcgaccaatccgagtcgcaggtcctgcgcgatgtgatgctccattataaaggacgactcaacttttatctctcattacactcctatggaaactattttctattaccatggggttatacaaggtatgtttgttatcatttataatttttaattcattgatggtaactgcttgatagaaaagtaattcgtttttaagtgaccactgagatagcagttaatttttaagatagctgctatttactatgatatttatcaacttgattaaagaaatctcaagatatggcaagaatgactagctcctttgggttatcaatatgctctatatttttagatttaaattatcacttacaaatattttaaattcaatagatattgtattcaaaattgaaataactgattataaattttggttttttatggaacaatattttccagatattatgtaagcttttgttgatagtaaattagatttttcttttaattgataacgatataatttattggtggcttagatagcaaaatgcgactttatctcaatcaaaaagttatttctttgtgcttacataacaagtacaattaaggcagtttctaagtaaaccatctaaatattattaggcctatcaaaactattagaaattaaacaattgtttttttacttgcctagtttctaaagcaatatttctcttcttaatctttatatgtaataaaataataattattgttatttaattcacccagcgactttccggatacctatcaggacatgatgtccgttgcggatgcgggtgccaaggcgatcatttactcaacgaatggaatatatagctacggaagtacatattatgtgctatatccaacatccggcgatacgacagactttgcgtttggagtggtgaatgccacagttgccatgaccatggagctgccggctgcaggtttccagggattcgatccctggatttcccaaatcgagcgattggtcacggaaagttgggtgggagtgcgagccatggccgcagaggtgataagacgctatccgtcgtaatcgggctgtaaataaatagacattagcgtcgagttgcgccagctctgatttgcgggtcactcgtgcgggagttttggagtggtttattatttatggatccatttgtcgattagatatgtggccagttgaatgtgtctagctatttaagtggcccggcacatccacgcggttgctcagttcgtgcgaagatgaagttctctctgggtttgttagtcctctttttgggcgccactcttgtggctgccgaacaggattacgaggggtaagtattggatctacctggacctatcaaggatatccgccagggtttagatataaaattgtatatttaaaatattcgctttcagttaccgcatctatgaggtgattccatcgactgccgaccaggctgaccttttgcaccaactaagtctgcagggatacgatttcatcagtgagactcgtctattgggtcatccttctcgtgtgattgtgagtcccgctcagttgaagcacttccagcagctggttgaggcagagaaaatgacacttactctggtgaactccaacctgggcgcctccatagccgaggagtttgcccagcgacagatgcagcgccttttggcgcccatcacgggaaagggtcgcttgagcacggagcgctactatacgcacgaggagattatcaactatatcgatgacctggcccagcgttttcccagccgagtcttcgttaagaccgttggctggtcctatgaacagcgagtcctgaaaaccatcaccatcaccaatggcgatggcaaggctaacaagaaagtgatcttcatggatggtggtttccatgctagggaatggatttctccagcagcagtcctctacgtcatcgatcaattggtggagcagttcgaggagaacgctcatctgctgaaggactacgactgggtcatcctgccactggtcaatgccgatggctatgagcacacccagaccggaacacttgctcgaatgtggcgcaaaacccgtcagccatacacgta

SEQ ID NO: 27653 - DNA, 1081 bp, DROSOPHILA
tgtatcataaaagcgatccgtcattttggtatcgtaagcaatgagaaactatcacttggagtataaggttctgatcgaggatctggctcctttggtgcatgcccaacgagctgaaaatcttagaaagaagctgctcatccaatggccacacattgatgtactatcagcattttatacacattcagaaattaatgattatctggatagtttactcgaaagatttccgaaacgagttcaggtgaagcaatttggctggagttacgagagacgccccctcaaagttttgactataacaaatggagatggtaggcggaataagccggtgatcctaattgatggcactgtccatgcccgggaatggatatcaccatcgatggcgctttatatcatccagcagctgttggacaactatggggataaccaggagctcttacaggactacgactgggtgattatgccagtggtcaatgcggatggatatgagtacacacacacggattctcgttactggcgtaaatcccgtcgacccaccagcaatccggaatgcattggcacggatatcaatcggaattttggctacgaatggggtcacgatgagggatcttcctcggatccgtgcgaaaatatttaccgaggagagcgaccattcgaccaatccgagtcgcaggtcctgcgcgatgtgatgctccattataaaggacgactcaacttttatctctcattacactcctatggaaactattttctattaccatggggttatacaagcgactttccggatacctatcaggacatgatgtccgttgcggatgcgggtgccaaggcgatcatttactcaacgaatggaatatatagctacggaagtacatattatgtgctatatccaacatccggcgatacgacagactttgcgtttggagtggtgaatgccacagttgccatgaccatggagctgccggctgcaggtttccagggattcgatccctggatttcccaaatcgagcgattggtcacggaaagttgggtgggagtgcgagccatggccgcagaggtgataagacgctatccgtcgtaaaataaa

SEQ ID NO: 27654 - protein, 344 aa, DROSOPHILA
MRNYHLEYKVLIEDLAPLVHAQRAENLRKKLLIQWPHIDVLSAFYTHSEINDYLDSLLERFPKRVQVKQFGWSYERRPLKVLTITNGDGRRNKPVILIDGTVHAREWISPSMALYIIQQLLDNYGDNQELLQDYDWVIMPVVNADGYEYTHTDSRYWRKSRRPTSNPECIGTDINRNFGYEWGHDEGSSSDPCENIYRGERPFDQSESQVLRDVMLHYKGRLNFYLSLHSYGNYFLLPWGYTSDFPDTYQDMMSVADAGAKAIIYSTNGIYSYGSTYYVLYPTSGDTTDFAFGVVNATVAMTMELPAAGFQGFDPWISQIERLVTESWVGVRAMAAEVIRRYPS

SEQ ID NO: 27655 - DNA, 3271 bp, DROSOPHILA
gctggaccgacggccttttccgaaccggagacgattaccgtccgggatctgatgcactcactggccgatcggggaattatgtacctcaccctccactcctacggcaactatctgctgtatccatggggatggacgtcgtaagacatagctatcgtattttaaatgatatactttaacaaataactaataattcacagcgatctgcccgagaattgggaggatctggatgcggtagcccgcactggagctgaggccattgagaacgccactggtacggtgtacacctatggatcctccacaaatgtcctgtatattgctgctggagccagtgatgactatggctactatgccggcttcaatgtgtccatcaccatggagttgcccggtgctggctccattggattcaatcctccagtcacccgaatcgatgagtttgtcaccgaaacctggattggcatccgtgccatggccgagaaagtgatcgagatgtattaaataaataaattaatctataaaacacacaatatacacaatatacccactgatgatagagacgtaaacgttacaatatttcaaatatttttcagtggattgtttataagctttctttgttatggaaaatagtattcaattaaaatcgaattagattcacttgactttcagagaaaacgtaattgggaaccaaattgataatggctctttattattgttgttagcaatcttactcttcgatcgatttctcttgattttaccaccatccatatacacagtgcgatttactgataacgaattaagaatgtcgccaacaaaagtttcttcgatagcttggaattgctagtgctcagatagggatcgaatttgaaagatgacagttgtttgggtcattctggcactaagctgcctgagcttgtcagctggactgcagagaaccaataaatacgaagggtataaaaaaaaaaaaaaattaaaattgtaatttaaactaacgtttttttcttagttataaaatctatgaggtctctagtgaagcgcgttctgtagccttttcagaagctctgtccgaactggtcaagaatgcgtcatattatgaggtgttctcggaattgaatgctggtaatccaggcaagattatggtgcatcctcacgaacaggtgaactttgtgcagctgatggaggagaataatgtgaagtatgatattatcaaccgaaatgtgggtcttactctgagccgtcaattcgaaacgaaccggatgttacgacattggtttccctacaatggaagattgggcactgagagatactacaaccatgaggagatcaaccagttcattgaggatttggctggggaacatccgcgtagggttttcctaaaaaccgtaggcagaagttacgaaggtcgctggctgaaaaccatcacaatcaccaatggcgatgccaggcgcaataagaatgtgatcctcgtagatggtggcttccatgcacgagaatggatctcaccggcagctgctacttatctgattaaccagctggtgtataatctcgaagataatgcggatcttctgctggacttcgattgggtgatcctccctgtggtcaatcccgatggctatgagtacacccagttatcggaggatactcgcatgtggcgcaaaaccaggaaacccagcagttcggattgcattggcaccgatcccaaccgtaactttgacttccactggaacgaggagggtgcctcggatgatccctgtgataacatatatgctggtgcaaagcctttttcagaaccagaggctctggtcgttggggatctcatccatagctatgtggaccgcggacagatgtatttgactttgcattcgtatggatcacttattctgtatccttggggttggacggcgtaagtatcttaagtgccatattttttgtaattttttttatatattataaaattttctaattaccagagctgttcccgacacagaagaggatctgcatgaggttgctgcagcaggtcaaagtgccattcaggaggccactggcactatctataagattggaccctctgccacaaccattaattatgcggcatccggagctagcgatgattatgccttcaatgctggcttccccatatcattcaccatggaactgcccttcggtggtacaggattcgatcctccggcatcggatatagatagcatagtcaaggagacctgggtgggcattgcggccatggcccggaaagtaatacaaaagtatccgcttgcataatcgtgaatactatgccaacaaagtgtttcgattattcagtttattgatttccggaccattataaactaaaccgggagaacgtcggttcgatagcatgtttgtgctatctaaacgataaagtctttggttatttttgcaaataaatgaagagcattaaactgtatttttgttaaacatcgaactgcaaagttatgttatagtaactcaagctaactgggttgacaaatcgttttgtaatccatttcgcataacaatgatatgttttcagcggtttatgaatgattttatggtagaggggtttcgatctcaagtgagtgggtcacccaaatggaattcagcaaaaataaaaatagcgagattaagttccgtatggaatagaaaaagtgggtgtcaaaaatatttatataagaagaaagccccggaggcctaaggatctttctgagcaaatgaaaattattttgtatttatttacattttaaataatattgacgagtcaaatgcctcatttgttttgaatcattttggagttcgtacttattcagacgaaaaaaaaaaaaaaatactacaatataaagctaaaaggcagttaatgtccgagtaaccgtgataatcgcgaccgccacttgagatccgttccactcgaggaacccaattagcgataagtccgtagtatcccggactcgagtgccccgcccaattagaatactgtgtcaatggcaaagctcgagtgatatgggcgccatgcccgatgggacgcccgcctatctggccatgcgtgcaaatgaaaggaacgggaatagaatgcccaattagtaagaagactgtgcgattagaaaatatcaatgacatttattgtacgcgcctagtacttatcggcaaccttctgggccatggccttgatgcccacccaggtctcggaaacgaagccctcgatctggctggtgctgggattgaagccagtaccgccggccggcagttccatggtaatcgacaccgggaa

SEQ ID NO: 27656 - DNA, 1204 bp, DROSOPHILA
ttataaaatctatgaggtctctagtgaagcgcgttctgtagccttttcagaagctctgtccgaactggtcaagaatgcgtcatattatgaggtgttctcggaattgaatgctggtaatccaggcaagattatggtgcatcctcacgaacaggtgaactttgtgcagctgatggaggagaataatgtgaagtatgatattatcaaccgaaatgtgggtcttactctgagccgtcaattcgaaacgaaccggatgttacgacattggtttccctacaatggaagattgggcactgagagatactacaaccatgaggagatcaaccagttcattgaggatttggctggggaacatccgcgtagggttttcctaaaaaccgtaggcagaagttacgaaggtcgctggctgaaaaccatcacaatcaccaatggcgatgccaggcgcaataagaatgtgatcctcgtagatggtggcttccatgcacgagaatggatctcaccggcagctgctacttatctgattaaccagctggtgtataatctcgaagataatgcggatcttctgctggacttcgattgggtgatcctccctgtggtcaatcccgatggctatgagtacacccagttatcggaggatactcgcatgtggcgcaaaaccaggaaacccagcagttcggattgcattggcaccgatcccaaccgtaactttgacttccactggaacgaggagggtgcctcggatgatccctgtgataacatatatgctggtgcaaagcctttttcagaaccagaggctctggtcgttggggatctcatccatagctatgtggaccgcggacagatgtatttgactttgcattcgtatggatcacttattctgtatccttggggttggacggcagctgttcccgacacagaagaggatctgcatgaggttgctgcagcaggtcaaagtgccattcaggaggccactggcactatctataagattggaccctctgccacaaccattaattatgcggcatccggagctagcgatgattatgccttcaatgctggcttccccatatcattcaccatggaactgcccttcggtggtacaggattcgatcctccggcatcggatatagatagcatagtcaaggagacctgggtgggcattgcggccatggcccggaaagtaatacaaaagtatccgcttgcataa

SEQ ID NO: 27657 - protein, 400 aa, DROSOPHILA
YKIYEVSSEARSVAFSEALSELVKNASYYEVFSELNAGNPGKIMVHPHEQVNFVQLMEENNVKYDIINRNVGLTLSRQFETNRMLRHWFPYNGRLGTERYYNHEEINQFIEDLAGEHPRRVFLKTVGRSYEGRWLKTITITNGDARRNKNVILVDGGFHAREWISPAAATYLINQLVYNLEDNADLLLDFDWVILPVVNPDGYEYTQLSEDTRMWRKTRKPSSSDCIGTDPNRNFDFHWNEEGASDDPCDNIYAGAKPFSEPEALVVGDLIHSYVDRGQMYLTLHSYGSLILYPWGWTAAVPDTEEDLHEVAAAGQSAIQEATGTIYKIGPSATTINYAASGASDDYAFNAGFPISFTMELPFGGTGFDPPASDIDSIVKETWVGIAAMARKVIQKYPLA

SEQ ID NO: 27658 - DNA, 5162 bp, DROSOPHILA
tcgactcgacattaatgagctgagaattttttttatggctgcggaatgaaatttaccgtctggctgcctgcgtccactagtgagtcagcctcaataaatcttggccgctgattgattgagcctaatgagagatgataatataaatgattaaagcacatttattcattgcggatatttattgaacgaccagcaagataaatttctgtttactcaagtgattaaaagtggctcgacgccaaagttttctttttcttcttaattcccgtctcgacttgggctcaatctcggccagaataaacagctgtggtccgctaacgttgtggttcaattcaaagattttctgaccagccattggaagtgctggcgatcgggtggttgtactttccactgtctgtacaagtggcacactgaatgcgtggccctcgtagaggtgcagttgccagtcgcaaagattcgggatgagattgcacttcacagtggagttggacgcaataagattcgcctgggtcacgtttagcttcctgatttgctgcagtgcctcatctggatacactggagcaccttcgcacctccgaaacaaaacgcataattggaataaaataatccacgggtatgctcgaaaggtctggacggagctcatttcaatttcacctaccacttcttcaggaagccgaacttggactggtggtcttacaaaaattgaccaggtggagtggggcaactgaaaccagtttgcttgaataggttcgcttggagtgctgtcatctttgtcatgtgaaatgaattatcaataaagtttcaatgctcttcatctttgaggctttggactttagaccgaggaatgagatattatatttgttgatgtttttttttccgtagaatgtagtttcttatgtttaagtaaagctttttattctttagaaaattctaaaaataagtaaaatcgtttttatatttaaaaaacatattttattttaaagtatgttattcaaagtcattgttattgcttgtttttttccagtttatttgttggtggtttttcctctactggacttattaagagcaagggtcttccattttcatccgacaatcttacgaattgagcttcttcgggcttcatacacaggcacggatagtagaaacacagagaggtgaccgagtgaggcatggtctcaaccgatagcttcttttccggatataacacgttactgtacttattgtttactaagtgtactgatttgactatttgacattttggaagatgaggatacaatacgcataggtcactggctgttgttgcctctgttgttccgtccgtagttgcgtctgttgtcgcctccgttgttgcgtctgttgtcgcctccgtagttgcatctgttgttaccaccgtagttgcatctgttgttaccaccgtagttgcatctgttgttaccaccgtagtggtctcagttgttgcctccgtggttggctttgttggtgggtttgtcggtggttctgttggtagttctgttggaggttctgttggtggttctgttggtggttctgttggaggttctgttggtggttctgtcggtggctccgtcggtggctttgttggtggcttagttggaggaattgttggagtaattgttggaggaattgttggaggaattgttgaaggaattgttggaggatttgttgatggcttcgttggtggactagtcgggggaagtgtgggtggataagtaggtggatgtgttggtggcacataaggtgggtatgggtaataaggtgggggtggataagccaacggatcgtagtatccaaataacggtggccagtattcttcaggaacaggacgaattttctttttcggagtactgacatggcccgtggtgaaacctgcgaattttcttacgagtcctgcaacatcccatattggaattcgcacttggacttgaaagccaagtgcaaacgtagtataccaattgggtcctgctgcggccagacagacccaggttataaaacctccaagcagcttcattctgaatactgaatactgaagtggagcgtttcttagagtctttatatattccatgtttttccgtagaagtagtggattaataattactggtcgcttttaaatacaagttgatcaaatcgagctttttatggtacttttggaactgataaactcgagatgtatcagatggctccactaacgacattaattatttaccacatacttgtcttggatgtaatcttcgaatctatctagtaatggatttgttctctgtcattacttattcttatcagatttgctctctttaacggcttgaacgtgttcttcttggtatggatggtgctgataacataaactatagcgtgttaatcgttctagataagaatcccatttgaaatatatgctattattgaaaaaacaaaaataaatatatgtaatatcctaaaaatcccagtagaagaataatatagctcttgtcaatttaatttaaaataaattttatattgttgttacagaacatttaaagtctttgattattccttttcttaattaacttgtaaatatatttacttctggagggtttcttttgtcgttgcggcaccgatttccagggtcctgactttgacctatagggccgttctgcttctatcgtaaaaagagggggatatgaaacgcctccaggcgatataagaagcatgggcttgccaaatccgtcttctaagcgtacatattgggcttcctctggatgagcacataggcgagggtagctatggcacagcgtcgtcacagactgtggcgccgattgcactctaagttgaagatcaggacgcataaagccagaagacgatggcattccctcaagactgagcaccgtcggagttgatatggggctactctggatctgactatgatggaaatgtattggagtggcggttgttgcttgtaagcttcctttttttcctctgactcgggatgatgaaattgcggtcccagttgtaaatgagccggttgtggaagagcctcccgaagtaaaagaccctcctgttgtggaagatccagtggtcgatgagcctccagttgtcgatgagcctcctgttgtcgatgagcctcctgttgtcgatgagcctccagttgtcgatgagcctccagttgtcgatgagcctccagttgtcgatgagcctcctgttgtcgatgactgttcagttgttgaattggttgtaggtgcgattgtactcgaggtagtttctggcgattccgttgtagtggacgtggaagttttttgtgttgttgttgtttgcctggtggtcgtatctggagttttggttgtggtgcttctccttgtaggttttcgtgttggcctgggtctaggtcgatttgggatcggtggtctgagaggccgcagtgggcgcagtggacgctgcggtcgcggtggccgtggttgagggattggtaccggtacaggcacgggcacaggctctacggctaacagctcgctcccaggaaatattccctgttttttattataaagttcctgcatgatcgcgccgtaataggcgtcccaaggagagggtgtaatcggtttttctggcgctacctgtggtggacgtgtggtgcttgtggtaccaaatacattagatatgcgcgagtaaagatcattcacatcccaaagtgggacattcaacctaaatgctccctctgaactatcactccgtactgtggttgtgcacaataatattaaaaagacgtgcaacgaaatcattgtcgcgggtcgaatagttcactctaatgcctagatccaaactaaacctgcaaccaagctaaaaatttgtttttatagacatatggataataaaccactgattgtgccctgaagctatagacgacccaagagttttaaaagattaaacaattgaaaatccagtaagttttctgtgggtcagtgaatgaaatcaacaaagatctgcgttctttcttggtcgtgaagctttccatgtcactttccatgttagagtgcctatttttgtttttccaaaagacagtcgagatgcatcacaaactgcttaattaattaaattgttgactctatctcaattatgaaaaacgatttagaattactgtgtataatttatattccctgatatttaaattgccaatgttcatatttttaaatatgggtaccatacaataaatgatatgaactaccactcttacactctttgttttgtaaaacaaagcaaattatatccgcgattacttaaaaattttacttattcctatgggttctccttatagcgcgccacaaagcaggaagcttttgagcgtagacggatcgtccctcgattgacgaaatcaacaataagggttttccatattcatcagccaggcgtacaaattgggcttcttccggtttcaagcatagacggggataaaagtggcacagcgaagtcacggactggggcatcgacgttattgtgagtttctgctcgggcttaaatacactaacttctggattcgtttcaaacatattagattcaatttttttgagattcactgccttttcagattgacagttaggaagcattgggtactcattgcaaattgaatctgtggattttgtttgtggaatagctgtggatgtcgatatacctccagttgttgtagacgtcggaatagctgtggaggttgtcgctgaatctgatgaacttgcggtagacgtagtagtagagtccgatgttgaggatgttcggattgcagtggatgttgaagtactttcggttgttgtggacgtcgaactttcagtggaagttgtcgtagaatctgatggacttgcagtggacgtagtagtagagtccgatgttgaggatgttgggattgcagtggatgttgaagtactttcggttgttgtggacgtcgaactttcagtggaagttgtcgtagaatctgatggacttgcagtggacgtagtagtagagtccgatgttgaggatgttgggattgcagtggatgttgaagtactttcggttgttatggacgtcgaactttcagtggtagttgtcgtagaatctgatggattcgcagtggacgtagtagtggagtccgatgttgaggatgttgggattgcagtggatgttgaagtactttcggttgttgtggacgtcga

SEQ ID NO: 27659 - DNA, 1509 bp, DROSOPHILA
ttcgacgtccacaacaaccgaaagtacttcaacatccactgcaatccgaacatcctcaacatcggactctactactacgtctaccgcaagttcatcagattcagcgacaacctccacagctattccgacgtctacaacaactggaggaggctcatcgacaactggaggctcatcgacaactggaggctcatcgacaactggaggctcatcgacaacaggaggctcatcgacaacaggaggctcatcgacaactggaggctcatcgaccactggatcttccacaacaggagggtcttttacttcgggaggctcttccacaaccggctcatttacaactgggaccgcaatttcatcatcccgaaggaagcccaatatgtacgcttagaagacggatttggcaagcccatgcttcttatatcgcctggaggcgtttcatatccccctctttttacgatagaagcagaacggccctataggtcaaagtcaggaccctggaaatcggtgccgcaacgacaaaagaaaccctccagaacaggacccaattggtatactacgtttgcacttggctttcaagtccaagtgcgaattccaatatgggatgttgcaggactcgtaagaaaattcgcaggtttcaccacgggccatgtcagtactccgaaaaagaaaattcgtcctgttcctgaagaatactggccaccgttatttggatactacgatccgttggcttatccacccccaccttattacccatacccaccttatgtgccaccaacacatccacctacttatccacccacacttcccccgactagtccaccaacgaagccatcaacaaatcctccaacaattccttcaacaattcctccaacaattcctccaacaattactccaacaattcctccaactaagccaccaacaaagccaccgacggagccaccgacagaaccaccaacagaacctccaacagaaccaccaacagaaccaccaacagaacctccaacagaactaccaacagaaccaccgacaaacccaccaacaaagccaaccacggaggcaacaactgagaccactacggtggtaacaacagatgcaactacggtggtaacaacagatgcaactacggtggtaacaacagatgcaactacggaggcgacaacagacgcaacaacggaggcgacaacagacgcaactacggacggaacaacagaggcaacaacagccagtgacctatgcgtattgtatcctcatcttccaaaatgtcaaatagtcaaatcagtacacttagtaaacaataagtacagtaacgtgttatatccggaaaagaagctatcggttgagaccatgcctcactcggtcacctctctgtgtttctactatccgtgcctgtgtatgaagcccgaagaagctcaattcgtaagattgtcggatgaaaatggaagacccttgctcttaataagtccagtagaggaaaaaccaccaacaaataaactggaaaaaaacaagcaataa

SEQ ID NO: 27660 - protein, 502 aa, DROSOPHILA
FDVHNNRKYFNIHCNPNILNIGLYYYVYRKFIRFSDNLHSYSDVYNNWRRLIDNWRLIDNWRLIDNWRLIDNRRLIDNRRLIDNWRLIDHWIFHNRRVFYFGRLFHNRLIYNWDRNFIIPKEAQYVRLEDGFGKPMLLISPGGVSYPPLFTIEAERPYRSKSGPWKSVPQRQKKPSRTGPNWYTTFALGFQVQVRIPIWDVAGLVRKFAGFTTGHVSTPKKKIRPVPEEYWPPLFGYYDPLAYPPPPYYPYPPYVPPTHPPTYPPTLPPTSPPTKPSTNPPTIPSTIPPTIPPTITPTIPPTKPPTKPPTEPPTEPPTEPPTEPPTEPPTEPPTELPTEPPTNPPTKPTTEATTETTTVVTTDATTVVTTDATTVVTTDATTEATTDATTEATTDATTDGTTEATTASDLCVLYPHLPKCQIVKSVHLVNNKYSNVLYPEKKLSVETMPHSVTSLCFYYPCLCMKPEEAQFVRLSDENGRPLLLISPVEEKPPTNKLEKNKQ

SEQ ID NO: 27661 - DNA, 4116 bp, DROSOPHILA
cagaacgaagatgaaactagttggattgcactctaaatatgtttttttcttatttggtataagattgtcgagacaatgtttgtatagatcagtgtggtaattattttcttaatgctacattgtcacttattaaagtttaacattctgagactgcaatagattgttacgtttcatacctgtggtacgaatgacgtaactctactaatgattatactattattcggtgaaaaatataatcttgttatcccatttcatagatataccagcgaaagagcgagaaaaattgtaagtaatgcttgtaaatactaccaaagatacatacatgtgttgagcggatttaacgttctccattttgatttgcctatagccacgacgacgtcgacaacaacgactattcataggtgagtccaccgatctaagcgtgaagtcgccgctctgccagcgtcgctgctcagccaataacaaaatgccgacgggaaaaatggactcgattttagtttttggctaagggagtgcccgctaaaagacagggatagctatacggcgcttaatcgcactctctctctctgcgacattgtcgtgctcgagggcggggcttagcccggtggtgaaattgtagtataacagttttgcgttgaacgaagcccacgtttgtacgtatacgtattttgcgcacagtgaaattaagtcaattcttctgctgagctgcaaaagaatgattaaagtcttcggtagatgattcggtagacagacaatcttctatgtatttataatttgaactgccatagtttgttatattttcatattctgaattaaaagctctgctctctggtttcttagtcattgtaagtcagaagtatttccatcttacatttgataaagctaggtatgcattttatacacttttcccacctatatttgatcaaatggtcgaatcaaagtaaactaatcacatcaattattgtaattggtcaagtgacttaaaaaaactcagaaaattctttttcacatttattaaacactattcagtgccattttaatttcttcagcaattgcaaaaaaaaaatcttgaaaaaaaagcttaggtctaggcattcaaatattatttagtaaaaagttcaaattcacatttagatatcaattattattcataggcttaaaattcttagttgttagaacaatcatagtgctacatttgattcctaagattaaaatacttgtacaaactatccatgacgttgggagttattaatatgctacttagactataaacttatgcttatttataaaatgtactttattcatttacttggctggcaattaattcatagcttttccttagtttaagtaattccattcgtttttgactgttgactgttagtttaatttataaatgaatatgcttataagtgatcttgggagtatgtacaaagtcaatgggtttaagacctgatggcctgatgctaataatattttgcaaatggattcgcgtccttttcgcctgcccgattgaatcagaatcacctggcacgacagacttggttgaaccaggtccactgctcggttaggagatcatctttttcggcttttcgtgctctagctgccctactgcgctcctggatccttggcctcgccaggtggcgggacctccttaatggactccaccttggccacaattttaagagctggacccagcttcatgcccatagcgttcaccaaatgcttctccttgagcaacagaagcgcttggccgtcgatctcctgctgtataaagtcgtccacgtagtcctgacaaccaggcagttctcgaatgaagttgctgacatcgtccacactccagctgctgattggcggacgatctgttccattcacttccgaagacttgggcgccgcgccagaagtgactacagacagtggtgcaagagttggaagtgcaactgacaatggcgatcctagaggcattgcaagaggcgagggcgcagaaatcgccgcttggactggcagtgacattggaggtacttctgttgaggctcccaaaataggaaacgattctgaaagctttggggtggcctctgtctgcatcttctcctcagccatggcttcatccagcctgtccaccaatgccatggcgtccaccccaactataccacctgtccccaggccgttcgtctctcctgatccaactccaccgatgccgttctttgcctgcctcgagcatcctggcgaacagtagcgcttccgtttcagctttgctttgtgctccatctttccacactgctcgcaagcaaccatatccgagcctggagctgatgctattccacttagcttgatgtcctcctgcatggttgcctttttctctgcgcgaaggaatgacacgttaagattgcgaaaaagcattggtaccagaagtttatactcacttggcggctcatcgctgacgtctttgtctgcatatcgctgtctggtgacgggaaatggctcgttggcctcctggatgatgaagccatcgatgacgtgagttaagacgttcggcttaatcatcgccttggggagatccttcgatccattactgatactcgacgtggtggttgtggttgtgctggtgcaacttgtgataaaggtgccagaactggtagtggttgtgctagcggttgagacagccgtgctggctgtcgttctggctactccaatcccattggtgatcgttgtcgtggttgaagttgatgttgcggacgttaaactgccgcaggttgccagcttcggctcttctttcccactgacactgttgggagtggtgctactcggtggctgcactgctgcattgctttgcttgctggtgggagtggtagcgccctttgacggcgtggaagacctatctgaggcatctccattggacagggcttcgcctgtggaactactggcctctacggatgcgctgacagtggcaggagtagatgatttgggggtagtgcaggtgtcctttcctgatacaggagtcttgggcgaaccaatgggcaccagggttgcggtgggccctttcgaaggtgtctctttggtgggcgtggctggtatgctacctcctccaccgctactagccgtgcttaagagaaccagctgacccggcgacgaagtaacagcggtgcttgtcacagaaacagttacaggcggagcagtggaaaggtgacccactgtagcattcatcatcgaggtcatggccaaaattggatttgtggtgggtgtaagtgatggcggtccctgtggctgttgttgagtccctccggcaattgtggcgctgattagctgctgatgttggtggacctgagcagattgcgtctgagcctgctgtatactggccaccgtactgctggtgaccaaaggagtgctgctctggttggtaattgtgaccacactgcttgtgggggaggaggaactgcaagtacccggcttagctgtctgaaagatggcgccagaggcggagagggctgcctgcagagcactagaggtagctattccggctggcgtcgttgacgaagaaactgagaagggcacgctacttagctgtagttgcccggattggtggtgctgttgctgctgggaagtctgttgagaagtcgctccagactgttgcaccacaatctgctggataatattctgctgctgctctcgctgctgttgttgctgttgcgcttgagcctgcacttgggcttgaacttgtgcctgcgcctgttgctgtagctgctgctgtatcagttggttgtgaagttgctgctgctgctgttgctggtgggacgtgatgaattgatttggcgccacctgaaggatttgctgagtggcattcgcgagagcctgttgatgctgcgcctgggcttgggcaacttgctgctgttgctccctctgctgttgctgagcctgcgcgactgcctgttgttgttgcgccaccgcttgctgttgctgggcggttaacctgctgctgctgagagacctgttgctgctgttgttgctgggcctgaacagccgcttgctgctgctgcatttgaatggcagcaatctgctgttgcaacatttgttgttgttgcaggatttgctgtttctgaaacagttgtagctgctgttgct

SEQ ID NO: 27662 - DNA, 3053 bp, DROSOPHILA
agcaacagcagctacaactgtttcagaaacagcaaatcctgcaacaacaacaaatgttgcaacagcagattgctgccattcaaatgcagcagcagcaagcggctgttcaggcccagcaacaacagcagcaacaggtctctcagcagcagcaggttaaccgcccagcaacagcaagcggtggcgcaacaacaacaggcagtcgcgcaggctcagcaacagcagagggagcaacagcagcaagttgcccaagcccaggcgcagcatcaacaggctctcgcgaatgccactcagcaaatccttcaggtggcgccaaatcaattcatcacgtcccaccagcaacagcagcagcagcaacttcacaaccaactgatacagcagcagctacagcaacaggcgcaggcacaagttcaagcccaagtgcaggctcaagcgcaacagcaacaacagcagcgagagcagcagcagaatattatccagcagattgtggtgcaacagtctggagcgacttctcaacagacttcccagcagcaacagcaccaccaatccgggcaactacagctaagtagcgtgcccttctcagtttcttcgtcaacgacgccagccggaatagctacctctagtgctctgcaggcagccctctccgcctctggcgccatctttcagacagctaagccgggtacttgcagttcctcctcccccacaagcagtgtggtcacaattaccaaccagagcagcactcctttggtcaccagcagtacggtggccagtatacagcaggctcagacgcaatctgctcaggtccaccaacatcagcagctaatcagcgccacaattgccggagggactcaacaacagccacagggaccgccatcacttacacccaccacaaatccaattttggccatgacctcgatgatgaatgctacagtgggtcacctttccactgctccgcctgtaactgtttctgtgacaagcaccgctgttacttcgtcgccgggtcagctggttctcttaagcacggctagtagcggtggaggaggtagcataccagccacgcccaccaaagagacaccttcgaaagggcccaccgcaaccctggtgcccattggttcgcccaagactcctgtatcaggaaaggacacctgcactacccccaaatcatctactcctgccactgtcagcgcatccgtagaggccagtagttccacaggcgaagccctgtccaatggagatgcctcagataggtcttccacgccgtcaaagggcgctaccactcccaccagcaagcaaagcaatgcagcagtgcagccaccgagtagcaccactcccaacagtgtcagtgggaaagaagagccgaagctggcaacctgcggcagtttaacgtccgcaacatcaacttcaaccacgacaacgatcaccaatgggattggagtagccagaacgacagccagcacggctgtctcaaccgctagcacaaccactaccagttctggcacctttatcacaagttgcaccagcacaaccacaaccaccacgtcgagtatcagtaatggatcgaaggatctccccaaggcgatgattaagccgaacgtcttaactcacgtcatcgatggcttcatcatccaggaggccaacgagccatttcccgtcaccagacagcgatatgcagacaaagacgtcagcgatgagccgccaaagaaaaaggcaaccatgcaggaggacatcaagctaagtggaatagcatcagctccaggctcggatatggttgcttgcgagcagtgtggaaagatggagcacaaagcaaagctgaaacggaagcgctactgttcgccaggatgctcgaggcaggcaaagaacggcatcggtggagttggatcaggagagacgaacggcctggggacaggtggtatagttggggtggacgccatggcattggtggacaggctggatgaagccatggctgaggagaagatgcagacagaggccaccccaaagctttcagaatcgtttcctattttgggagcctcaacagaagtacctccaatgtcactgccagtccaagcggcgatttctgcgccctcgcctcttgcaatgcctctaggatcgccattgtcagttgcacttccaactcttgcaccactgtctgtagtcacttctggcgcggcgcccaagtcttcggaagtgaatggaacagatcgtccgccaatcagcagctggagtgtggacgatgtcagcaacttcattcgagaactgcctggttgtcaggactacgtggacgactttatacagcaggagatcgacggccaagcgcttctgttgctcaaggagaagcatttggtgaacgctatgggcatgaagctgggtccagctcttaaaattgtggccaaggtggagtccattaaggaggtcccgccacctggcgaggccaaggatccaggagcgcagtagggcagctagagcacgaaaagccgaaaaagatgatctcctaaccgagcagtggacctggttcaaccaagtctgtcgtgccaggtgattctgattcaatcgggcaggcgaaaaggacgcgaatccatttgcaaaatattattagcatcaggccatcaggtcttaaacccattgactttgtacatactcccaagatcacttataagcatattcatttataaattaaactaacagtcaacagtcaaaaacgaatggaattacttaaactaaggaaaagctatgaattaattgccagccaagtaaatgaataaagtacattttataaataagcataagtttatagtctaagtagcatattaataactcccaacgtcatggatagtttgtacaagtattttaatcttaggaatcaaatgtagcactatgattgttctaacaactaagaattttaagcctatgaataataattgatatctaaatgtgaatttgaactttttactaaataatatttgaatgcctagacctaagcttttttttcaagattttttttttgcaattgctgaagaaattaaaatggcactgaatagtgtttaataaatgtgaaaaag

SEQ ID NO: 27663 - protein, 514 aa, DROSOPHILA
MTSMMNATVGHLSTAPPVTVSVTSTAVTSSPGQLVLLSTASSGGGGSIPATPTKETPSKGPTATLVPIGSPKTPVSGKDTCTTPKSSTPATVSASVEASSSTGEALSNGDASDRSSTPSKGATTPTSKQSNAAVQPPSSTTPNSVSGKEEPKLATCGSLTSATSTSTTTTITNGIGVARTTASTAVSTASTTTTSSGTFITSCTSTTTTTTSSISNGSKDLPKAMIKPNVLTHVIDGFIIQEANEPFPVTRQRYADKDVSDEPPKKKATMQEDIKLSGIASAPGSDMVACEQCGKMEHKAKLKRKRYCSPGCSRQAKNGIGGVGSGETNGLGTGGIVGVDAMALVDRLDEAMAEEKMQTEATPKLSESFPILGASTEVPPMSLPVQAAISAPSPLAMPLGSPLSVALPTLAPLSVVTSGAAPKSSEVNGTDRPPISSWSVDDVSNFIRELPGCQDYVDDFIQQEIDGQALLLLKEKHLVNAMGMKLGPALKIVAKVESIKEVPPPGEAKDPGAQ

SEQ ID NO: 27664 - DNA, 4943 bp, DROSOPHILA
ccaccgtatttccagttgagcaggccgtgatagacgatgaagccgaggaccagaagcaaagccaccttcttggcattggtggcgtttagttgttccataaatatatccgctctggtgggcatacgctgtcctccggcggcgcctccaatgcagatgccgcctagttcgggactaggggctccattcactgacactccgggggttccggttgtagctgctccaatgcctcctacgcttccaccatttccaccgcgcagttcgcgtagctccataatttataagccgtctgccgccttctccaccgccaccaccaaacggtctgcgacggaaagtctggcctataatatagataatttggcctattgcatgggcatgttttaacccagttccgcttgttccttaggcagcgaccgactcctcctatcgcttgctgtttcgctcttgcttggcttttattttactttcctttagcttttgcttcgccggccgatagacaaccgcgtctatcgaccgccacccacaacacaaaactatcgacaccgaacagctgatttgtctgcattgtgggcgaacgggaaagatcgttaataatatcaattatcaaatttcgaaaaacacaatactatactttatagcaaatatacatttatttttttaccatttaagcattagcttttgctttgccggccgttaggcagccgcgtctattgccctccaacgcaatacaagactatcgataacgaacagatgatctctcagcattcctgtcgaaagggaggatcgttaataatatcaattattaattatcgaataaggcactacaatacttaatttatttttcagctaaaaatatttacatatcataggaaaaaaattagaaataaagttaaataaataggaataaatctacatcagagagtccataacaaagcgaaatttttgtattcgggacattttcattttcaaaaaatattcttcgcacgcaagataagtggtacgcaactatcgattttggatagtcatctgacgagaagacgcacataaaattgaattcgttcggaaaagttttgacaaaacgcgaagtttcggcagcactatgataactgctaagaagcacccgctggacaattgccaattgtttgtccagctgaagaagttatttcatgactacaacgagaaggtccagcgtctgaaggacatgatttactggagtggtaagtgaagtaccagaggttagtgcccaaatatgaacattgtttgttctcaggaaacgatgagcacattgcgaagatctgcgaccaagtgacggacctgctggtggagcacgatctaatcatacagccgccagacacaatggatccttgtgctatgaatcacctgcgtggactactggtgtacctggtgctgaacactgcacacgatgatatccagtgcgaatcgcagtggagcgccaatgtcatgcatttgtgtaaccagctgccgcctatcccactgttcttgaccatcgcaatagccgttaactgctgtctcatggagccgctggaggaattccttgcttgtggaccccgctggctgaccatccagtattttgaggcattcaatgaggctctgtcggtcattaattcagattgcgtggaaacactaccgctgctctctgccgccctcagagcagccggtcgcgcaattgtcaactgcaatttgcccgcagaaaataagcaactgctgcgccagatagcctgcatggaacatcgtcatatcttggactctaaacagcgcctccatacgctgccgcgtccatccactcgaaagatttacctggccaaggctatggatcaccttatagaagtccttttgtataccctcaatgatccattaaagcgggagaaaccaaattgcttcgccgtctacagccaaataaccgaggacatcagtgacagcaactcaagcgatcccatgcctgatctgcggcatttcgcccaaatactgctagacgttctgcagcgtatctttcagctcgttagcgtagacacgtatatgtattggcatgaaatgaaatcgaaagtgctttgtataactgccaggagctaatctgtagacagacggcagaattgcttaaagtactccaatcagataagttgctcggagagcatccggtttgcaagcagatgcagagctttgcggatgcagcaaaaacattggagcagcgcgttgccgagatgagaatgggtgaactcttagtctttctcgattccggtatggccaccgatgaggagttgctcgccgggctggacaatctctttagccgcttcatagcctttggtaacgatgagtgcgtggaaacgatggcaaatcatttaattatgctcaccaagaaacatgcccagataatactcagtttcctgggtcaggtggtggagtccgaaatggtggtcgaggacgagggcatatccgttacggaagtaaatcagggggatgacgaggacgagacctcgtccaacgatgattacgaagagctgctaagcctagtactgcgtcccttatttatgcaattaaatgtcgaggacaagatggaagtactgctattgcgcgatgagcaaaacgttacccaaggatttaatttcaaggctcccgatcatcgggagcgtcgcatacgcttctttaatcaattggattataataagcgcttcccgataaccaaatttctagtactgtgctttgagaacgcaagacagacctggattgatttctcccacttgggcgtgacgcatactcgcttctcgaagctattctggcacatagctcagtcttgtcccaagcatgctgcttttcatatttccgcctgtgccgataacatcttggtgaacgagcaactacttcaaaagccgtatgccttgcagtttacactctacctatatggccaccgacagatcctcaacggtctctacacgtcagcgcgacaactgtgcgttagtttgaaagacggacggtgtccctacggagaggatgagcttaggcaggcgcaaaataggttcctagacgcgtgtgcctacggtttggccaagtttatagagcccatgaacttgcccagcttgcagttaatcttgaaactgctcaagcagattagtctgggtgaaagcaatctaatcacccgaggcactgcagagttaaatgcactcgaaaaggagcacccgaaattggagaacggagacgatgcaccagctgtcaaggtggccaagcactacacatatctgcatgccagcttgccagagtggcgtttgaaacactggaagctgatctcgcatgtcatgaaaaccattgatgccctacgctgggacttggccacctttgaagatttccgggtggataatttagaactggcggtgtggtattggcaggacggtctgtctcatctgacattcctaggcactggtgcgctcttataaatgtaagtccaagacgaaagcctactaattattgctctttcacagaattccgccagaggatcttaaaccaagtgagcaaattgaagcacaaggacttttggatcatctaccttaaagaagacaccttaaaggacacacgctcctttctcaaattgctaactcagtccagtgcacaggaggctaacgatctcttcaacaagctccttaaaaaaagggccgattgtgctgttatgggcgatcttagcgatgcagtggtcaaggtgaacagcgagtccgctttcatggcctttagattcctatttcgagaatatttgatcgccttccggagccacgccaaacacaataagaccatcacgaagcgccagcattgggatcatttgatggccgttgtggccaaggctccattctccattcgcaacgagattatggagctagctagtaaagccttcgctgtgcgattcggcataaatatccaggaacagcaggcggccaagtgttaaggagatgctgttagaagtgtaattttcttaagccaaatcgaaacaccgccgctaatcgactaaagacgtacatatataataatcataacgctaggatgatgttcaatccagatatcagattattttacaattttgtatgtcctttaaaaggatgactgtatgcacataacatatgtactactgccttgcaaattttttgtctatttaaaaaatactttggcaagcaagtgaagttattcagatgaaaactattgcaattttgcatgttcttcatattattcgtataattatgtattatatacatacatacatatataaaatacaaaacgctatgatcgaacatcagaataatatgtgtgaggagtctacgtccccacaaatctgggtgcaggggagcggccttggacgccaggaaagcggagagactgtgaactaacggtaccgcgctggaccttggactcgagcctgccaagggcacggaggtcgaacagtaacggtgcggactttggacacgcacaagaggacacacattgtgaactaacggcaaattagttggacgcgcaaaggggaaaataacgggatccccgcggcctataaaggaacggcgcaagtgcagcttggggcagtcagtcacaacacgcgaggagccacacgtacgcgaggatagtcgaggagagtacgggcgcgagtcgagccgtcaggaggcggccgcgcaatcggaacggcgtctaaagaagagagacagtgcgttagaacgcgcggatactaccatcaagttttttgtctattaaataaatactttggcaagcttgaaattattgtaatttagcatgttcttattattattcgtattcttatgtacgaattccaaatctatctctcgatttcaaactcaagtgccgcatgcgaatcgcattattttaaatacttttgctaaataggaccactgtttaaaaaactgcagttgactttggagaagtcgcaatatttataatgtcaa

SEQ ID NO: 27665 - DNA, 2766 bp, DROSOPHILA
aactatcgattttggatagtcatctgacgagaagacgcacataaaattgaattcgttcggaaaagttttgacaaaacgcgaagtttcggcagcactatgataactgctaagaagcacccgctggacaattgccaattgtttgtccagctgaagaagttatttcatgactacaacgagaaggtccagcgtctgaaggacatgatttactggagtggaaacgatgagcacattgcgaagatctgcgaccaagtgacggacctgctggtggagcacgatctaatcatacagccgccagacacaatggatccttgtgctatgaatcacctgcgtggactactggtgtacctggtgctgaacactgcacacgatgatatccagtgcgaatcgcagtggagcgccaatgtcatgcatttgtgtaaccagctgccgcctatcccactgttcttgaccatcgcaatagccgttaactgctgtctcatggagccgctggaggaattccttgcttgtggaccccgctggctgaccatccagtattttgaggcattcaatgaggctctgtcggtcattaattcagattgcgtggaaacactaccgctgctctctgccgccctcagagcagccggtcgcgcaattgtcaactgcaatttgcccgcagaaaataagcaactgctgcgccagatagcctgcatggaacatcgtcatatcttggactctaaacagcgcctccatacgctgccgcgtccatccactcgaaagatttacctggccaaggctatggatcaccttatagaagtccttttgtataccctcaatgatccattaaagcgggagaaaccaaattgcttcgccgtctacagccaaataaccgaggacatcagtgacagcaactcaagcgatcccatgcctgatctgcggcatttcgcccaaatactgctagacgttctgcagcgtatctttcagctcgagctaatctgtagacagacggcagaattgcttaaagtactccaatcagataagttgctcggagagcatccggtttgcaagcagatgcagagctttgcggatgcagcaaaaacattggagcagcgcgttgccgagatgagaatgggtgaactcttagtctttctcgattccggtatggccaccgatgaggagttgctcgccgggctggacaatctctttagccgcttcatagcctttggtaacgatgagtgcgtggaaacgatggcaaatcatttaattatgctcaccaagaaacatgcccagataatactcagtttcctgggtcaggtggtggagtccgaaatggtggtcgaggacgagggcatatccgttacggaagtaaatcagggggatgacgaggacgagacctcgtccaacgatgattacgaagagctgctaagcctagtactgcgtcccttatttatgcaattaaatgtcgaggacaagatggaagtactgctattgcgcgatgagcaaaacgttacccaaggatttaatttcaaggctcccgatcatcgggagcgtcgcatacgcttctttaatcaattggattataataagcgcttcccgataaccaaatttctagtactgtgctttgagaacgcaagacagacctggattgatttctcccacttgggcgtgacgcatactcgcttctcgaagctattctggcacatagctcagtcttgtcccaagcatgctgcttttcatatttccgcctgtgccgataacatcttggtgaacgagcaactacttcaaaagccgtatgccttgcagtttacactctacctatatggccaccgacagatcctcaacggtctctacacgtcagcgcgacaactgtgcgttagtttgaaagacggacggtgtccctacggagaggatgagcttaggcaggcgcaaaataggttcctagacgcgtgtgcctacggtttggccaagtttatagagcccatgaacttgcccagcttgcagttaatcttgaaactgctcaagcagattagtctgggtgaaagcaatctaatcacccgaggcactgcagagttaaatgcactcgaaaaggagcacccgaaattggagaacggagacgatgcaccagctgtcaaggtggccaagcactacacatatctgcatgccagcttgccagagtggcgtttgaaacactggaagctgatctcgcatgtcatgaaaaccattgatgccctacgctgggacttggccacctttgaagatttccgggtggataatttagaactggcggtgtggtattggcaggacggtctgtctcatctgacattcctaggcactgaattccgccagaggatcttaaaccaagtgagcaaattgaagcacaaggacttttggatcatctaccttaaagaagacaccttaaaggacacacgctcctttctcaaattgctaactcagtccagtgcacaggaggctaacgatctcttcaacaagctccttaaaaaaagggccgattgtgctgttatgggcgatcttagcgatgcagtggtcaaggtgaacagcgagtccgctttcatggcctttagattcctatttcgagaatatttgatcgccttccggagccacgccaaacacaataagaccatcacgaagcgccagcattgggatcatttgatggccgttgtggccaaggctccattctccattcgcaacgagattatggagctagctagtaaagccttcgctgtgcgattcggcataaatatccaggaacagcaggcggccaagtgttaa

SEQ ID NO: 27666 - protein, 889 aa, DROSOPHILA
MITAKKHPLDNCQLFVQLKKLFHDYNEKVQRLKDMIYWSGNDEHIAKICDQVTDLLVEHDLIIQPPDTMDPCAMNHLRGLLVYLVLNTAHDDIQCESQWSANVMHLCNQLPPIPLFLTIAIAVNCCLMEPLEEFLACGPRWLTIQYFEAFNEALSVINSDCVETLPLLSAALRAAGRAIVNCNLPAENKQLLRQIACMEHRHILDSKQRLHTLPRPSTRKIYLAKAMDHLIEVLLYTLNDPLKREKPNCFAVYSQITEDISDSNSSDPMPDLRHFAQILLDVLQRIFQLELICRQTAELLKVLQSDKLLGEHPVCKQMQSFADAAKTLEQRVAEMRMGELLVFLDSGMATDEELLAGLDNLFSRFIAFGNDECVETMANHLIMLTKKHAQIILSFLGQVVESEMVVEDEGISVTEVNQGDDEDETSSNDDYEELLSLVLRPLFMQLNVEDKMEVLLLRDEQNVTQGFNFKAPDHRERRIRFFNQLDYNKRFPITKFLVLCFENARQTWIDFSHLGVTHTRFSKLFWHIAQSCPKHAAFHISACADNILVNEQLLQKPYALQFTLYLYGHRQILNGLYTSARQLCVSLKDGRCPYGEDELRQAQNRFLDACAYGLAKFIEPMNLPSLQLILKLLKQISLGESNLITRGTAELNALEKEHPKLENGDDAPAVKVAKHYTYLHASLPEWRLKHWKLISHVMKTIDALRWDLATFEDFRVDNLELAVWYWQDGLSHLTFLGTEFRQRILNQVSKLKHKDFWIIYLKEDTLKDTRSFLKLLTQSSAQEANDLFNKLLKKRADCAVMGDLSDAVVKVNSESAFMAFRFLFREYLIAFRSHAKHNKTITKRQHWDHLMAVVAKAPFSIRNEIMELASKAFAVRFGINIQEQQAAKC

SEQ ID NO: 27667 - DNA, 7268 bp, DROSOPHILA
gcagtttttcaaatatctttcgtgttcgctgtcttgcggcgtctgttactgcggtgtgggccatcagacacctgttcgaaatttgttaaattgagcgttgcaataaaaataaaaatatttgctgttgtctctgcccgcggtggtgctacttggcggattggtgagctggtgagccggtggagctgggatgtggtgctggtgtgctggtcagtcgcgtgtggcattctcgaaagtgaaagaaaaatccgttttcggcatttgcaatggcaaagaaaagcaaaacgtgtgcgatttgaatttcgtttttacgtaaaatgcgattataatgctttcacccgagcatcaggcggataagagattaccattccagtcgaggcaagtgccaagtcatggataaagatgcgagcaccgataaacgccagcagcttttggccaaccagtcgggcttataatttataatctggccgagagatcatcccatcacatggcgcgccaccactaactagatcaatttgggtatcacatttatccgtcttcaattttccactttgcaagccaatttcaaatttctgaaccgttcaaaaaaaaaaaaaaaaaaaatataccaaaagactaaagtactacaggttttttagcagatgttcaataattcaatgttcaataatttatatggcaaagtaaagcacggatatctttttatattgcctagacagatctgattccttatcgcatcttagtaaagttataagtaaactattcatatttatctttgttaaagtcgggaattttgtgtaatagtagtaccgacaaaactgtatcttcagacttggccacttgagcaatcgcacagcaagcattacacacagccaagtgtaaatagcacactagcctacataaccacggcgggcagtgcattaattaagcccaggaacattgcacaaccgctgaagcttggagagaatgggagatacacacttgaccagctggccccgctagccacttaaaatttcattagatgttctgcactaaatgtgctcttaatttgtggccactgtggctccgcatctcgggagatggatggatcacttcttatgattattgtacaataatttaagaacagaaggatattgcttaccaggtaaaaatcaatcggcttctcccgcgccttgttgtaagccttttgtatctccgtttgtttgagggcgtgcgcgatgtggagggcactggcgtcgaatcttccgtacttgtagtcagagtcattctgcgatggagaactgatctcccggctaccgtagccattcggcgtggactgccgcgagccacccagtgggccacctgcacagatccggtaaaacagtgttgttagccaagttgagagcacatgacagccccatactcaccatccacttcgctccgcgtgcctcggatctgctcgttcacgaacttgttggtgcgcggcgcattcagggcctggcgaatacccacagaggtctggtcgagatggccgggcccgctctttggtacatgtgaactgcaatagacctagagcgaaggtgtttccgaagattattagttgttgcacatatcgctgggtcatatgatatagtgcatacttattcaaaaagataaacttccaactaactaaactgcattcattaaaagatttaatcctcattactcatttcattatacatctagaaaaaaaggaatgctctttctgaatcatgtcatctaattgctattttgaagccatgagatttcttaatgggcaccgataattatcttcaattaaaatttccttaaacaaaaaggaattttcaactaaaacacttttggaatgcatatatctagcgtccaaatcgaaacacaccattagccttattgggtttcgctttgagtgcgtgagcagaccccaaaagtcagtcgcttgcaaatgcaattttaaccacttcacctacacacagcaggtggcaatagaatatgcaataacgaacacggacctttgcagtgcaaatacagtgcgttttgtggctttaaggcaggtcaaggaactaaatacatatattatatacaaatttaatacaaatttttaacttgctagatggaaaatacatacattcaaccatataaaacataatattgtcaccataatacttcatagatttttccatttaattgatcttctttccttaaataaatttcatttaaataatttataatacttatgaaagctatatgattcccccgacttactggctgaccgcatagctgcgaaacgcactgtacatgaatatatgtacacactacataagtgagtctataggtatatatttcatatgtatgacagaccgcagtgacacacatttgcgcctcggcaaggtgcaataacaaagttatttattattatgcataggcagaaaaacacaaaaagtgtcgttcgaattgcatttttgcatcttgcagctgtgcaaatatttagactgacgcgtttgtcgcttaagtctttcgtttttgtcggtccgtccccgtctgtctcgtgtgccgctgcttgcggcgatgcttgtggtggcacttacctctttgtcatcctgcttgtgctgattattgaaatacgtcttgagcgtcagctttgtgccgcagtgtacgcatttgaagcaaccggaatggaagaatgtgaaatcctttagtggccccacacgatccacctgatagactgtctcgctgcagcgcaggcaagtcgactcgtagaaatttggccgatacataatgtttggcgtctatgtattcctcctggatcttttctttttctgtggcagcttccgactggttttcggtggacctgtacctgttgagtttgtcacttttcttttcgtctttcaatttcacttggcgcggaatttacgagtatattctgctagtttttcgagtttgcagttgctggttctgggggcgacatcatccgctcatccgctcatcctcgtcatccgtccgcagctggcagaagctgtccgaaacgaaaatgaccgaaaacgatgattactgcctgagtgggagatagaaatttcctatttgggctgcgataagatttttcgaccatcaccatataccatatcagggttcaaaaaacaaaaattttgattctgcgcaggcgtttgtcatgatgcgagccaaaactttcatttattttggctatgggcagattattaatgaatcttaattaactggacacggtggacaagagttttggcgtttctcagcggcaaagggttaaatccgtttcgccttgccattgacctcgcttgggaagtcgagcttgagattgctccaaacgtgccacaattgaacttgagttgctgcattcgtcgtacaactggctcgtgcaacttgcaactgccgcctggcagcggcacaaaagttgcattttccatttgattaattgacgcgattgttactggcaggtttcctttcggtttttgtctagctacaacaattaaattgaagtggaaaagcagactgtgtgaaggtaagtgtgtgcgagcaagtgcatgttactttaattgaaatcattgttgttgcggcgtctgttgctctgaccaaaattaaaacaaatgcggctcagttgcgcagacaaagccaaaagccgcagtcgaactcaaagtcatcgttttgctttcttttcaagtttaatgaacgttgagtccgggcgatgaatggtgggtggttggggatcggttggggaatgggtggtggcaaggccttatgattagcgccagttgcggcatcgaaggttgctgatctgtggattgcatgccacattgcagctgcagcactaatggaaaatggtaagaaattgaaatggaaaaggggaaaacgccaatgcaaatgcggcgaaggccgccaagacattttgtaacaccaaattattttgattggctgtgaataaaaatttattccgcttttgaggtctgccttttgatcgaccacatcgaatgtgaggcaacaaattgatgtgtgaatcaagacgagcgggagatttgtgcccttaaagaccataagctccatcgatgactaacctgtccacaatctcgtctagctctttggccatagcccccgcatcgattcgaatatcaatcaacaacgcccacatcgagagcgacaaaaatggcagtttgatctgttgatgcgatcataatcggtgtgattgaatggtccaattacgcttagcggctgacataattagcgtgtaattataattgtaatggacatgaatacgtggatagccgcgaagaccctgcaaattggatggggcggctttgacaaaacgcctcgtgcgacttacatcacctatcacaatatcgttccatcatcccatcatgccaccatggccacttgggtgtgactaagaagctatggactgcaggtaacccgagatgccgcatataatttcgcacacatgcctgtgctccgtgccagctttgggtttcttttccacctcaatgcggatgaaatgccatgcgaatggaatataaacatacaaaataaaatgacaaacgcgagaagcagtcacaaaaacgaaagttgctctgcgcgggcaattgtttgcaatcgagacatttaaataaattgataagcactcggaagcatttgcatcgggcgaacaagttcgttgcctaagtctttcgtttcgatgtggtatctctgctgttgtttttgtcgtttcccttatcgctggcattgcttaacgaaacgctaacaatgacaattaaataaataccaataataacagtaaactgctgcagcagcaacacaagtataatgaacttgaattggcataattgccaccgctaatcacattaaagccagatacaaagatttgataaatgcaaagaaacaacagccaagcagcaaacaacaagacaaaaagcaactggttattccgcctggcagtgaaacaatcataggaattaaaataagatgcaaatgattgcgtcactgcagagtagcgatatgaggggagaaatataaacttaaaatgtgacaatggcactaatgtgaataactaacaagtcgaacagggcaatgattcccctttttagattatggaaataaaggcagataatttcaatgtgatgaacttaaataattgttaaattaataaacattataaaattcaaactgttttcccatttcgctttacttttaggcgaactatttaaagtatacaaaagtacttgtcaaaaacgtttaactgttcttgaaaagtgtgagaattggttgggcaaatttgaaaaaatcaaggtacttgctttgctgtgccaatttcaaagtcgctaattgaatggaacaatgaattgcttttagaaatcgcccatttcgctggcaataaattagaagcacaaacaccgaaaataatttatgagcaagccacaataattggaagccacatacgaaacccgtgtagttaaaagggatggagggcgggtgcaaccagcgcccatgacaggtggtgtcgcctcaaccacccaccccgtctatttgcgtttgtattggtttatgtgtgtgtttatgccgtgacgcaggcccagcttcgacttcaaacgtcagcctgcaatctttcacttttttttcgtgtctgcagccgcggcgtcggttgttccagtttttccgtagattatttccccagcatcgctattatttttgttattttcgcctagattatacacacgcgatacatggagtgcttattctaggccctttttgacacacttctttgccgtttatgtgtatttctattacttttacgcatatatgctaaacaactttcttcttctggttgcaaaggggcgcgctttgtgcaaaagtatttatcataaattttacacacacgcaggcgcacaccgacacacaaacacacacacacagagcgatagccccagcgagatccaagcacacatattgcatacacacacacaggcatagaaaaaggggagagcagattgttcagttcgcaaggtccatgaatccggaattccaattctgcgctttatcacattttcggcattatttgttgtgcctccaaaagtctcttctccgaacagcaggtttcgaatattgggaatgtaacaaaatttcattaccaaacacaaccactcatacacaatcagcacagcacgacgacacacacggacgcgttcactcacactagcacaggtttcgagccgcttttcttttcgatccgtttcttttccgttcggctcgagcgcgatcacgatcgatttgagactagttgctttgctattcgcggaatggaatccgctctgagtcgagctttgttgggggtaaagcttttacatagctccaaaaagctcgcttcgcaaaggcaactgcgcgtgcccaccactactatcgatagccgtccacggatcagcctaggagttccagtaatcgttaaaaatattttactctggtccccgttggaaaatctataatttcatttgtttttttttataaagccctcggctacacttccttgctataactatcatttcagcttagcatttttaatagttttaatttatataaatatttatatagaaaggttttacaattttttgttcgtaatctgctgcgatagatcgataggtgttcaacgtttgaacttgaacatcgtggtattttcaggctcttcacctgcggtctcactggctgcaacaattatcgaagaaacgataggttgaaattaataacaaaagagtgcaaaagggaaaacgcaaaaagttatggggaaccaattggctatacagatgaatagcgatgaagacgacgattttgattcttcggacaacgagctgggcttcaacgtgatcaactttacggtgaacgccatggatctgcgctccgattattgcagcagcgagatgccagttatacgaggcaagcccgatctagttaaatttcaggtaatgacgaaataccccgtccccagataacaattaatagtaatttattgcccacgcaatcttccagaaaactgatatgtacaaggagatccaggcgtcgagtggattagtgagcaatccgaacaatcgctggaacctggtgcacgcccttcagcagcgtgagaatgggttggcatcgccgcacagcgcatcgttctccaagaaccagcagcgctacatatccaatctttacataccaaacaaaaaggccacacgcctgatgtcgctggaatccaaaatatttgtgaccaagttcaatcgttcgggcag

SEQ ID NO: 27668 - DNA, 973 bp, DROSOPHILA
tgatcgcgctcgagccgaacggaaaagaaacggatcgaaaagaaaagcggctcgaaacctgtgctagtcttctgccagctgcggacggatgacgaggatgagcggatgagcggatgatgtcgcccccagaaccagcaactgcaaactcgaaaaactagcagaatatactcgtaaattccgcgccaagtgaaattgaaagacgaaaagaaaagtgacaaactcaacaggtacaggtccaccgaaaaccagtcggaagctgccacagaaaaagaaaagatccaggaggaatacatagacgccaaacattatgtatcggccaaatttctacgagtcgacttgcctgcgctgcagcgagacagtctatcaggtggatcgtgtggggccactaaaggatttcacattcttccattccggttgcttcaaatgcgtacactgcggcacaaagctgacgctcaagacgtatttcaataatcagcacaagcaggatgacaaagaggtctattgcagttcacatgtaccaaagagcgggcccggccatctcgaccagacctctgtgggtattcgccaggccctgaatgcgccgcgcaccaacaagttcgtgaacgagcagatccgaggcacgcggagcgaagtggatggtggcccactgggtggctcgcggcagtccacgccgaatggctacggtagccgggagatcagttctccatcgcagaatgactctgactacaagtacggaagattcgacgccagtgccctccacatcgcgcacgccctcaaacaaacggagatacaaaaggcttacaacaaggcgcgggagaagccgattgatttttacctggtaagcaatatccttctgttcttaaattattgtacaataatcataagaagtgatccatccatctcccgagatgcggagccacagtggccacaaattaagagcacatttagtgcagaacatctaatgaaattttaa

SEQ ID NO: 27669 - protein, 221 aa, DROSOPHILA; identical to SEQ ID NO: 21993

SEQ ID NO: 27670 - DNA, 8399 bp, DROSOPHILA
aatacaaagttgtaacagggcaagacaacatttatatagtgcagcagcagtcagtcggttgatgctacatctacagctcggccacaaaacctcgtcagcacaatcacagcaattgctggcggtgcccagacggggaatgcactgagagaaacgggtggaacaatgtaggccatctaactgaatgagcaagttatgctagaaagtaaagcttatagaaagaaaaagcaataaatctcaaatgctaaccctaagttattaggcttttttaatgacttagggaattcataaatttcctgaaatacacaagattattcttagatacagtattttcgctctctgtggaaatgaaatgggaacgggactgggactgggactgggattgggttggagaatggtactgggagcgatggtggggagttcagcaataatggggaaccactgacagaccagacagccagtagtccatgtgagccgggactgcggcggtagttgcacaattttgcacaaaagccaaagcataatcatgaataatgagcgtttgtgataagtgataaatgcccggtggcaaatgcacagggaattcaaatataatggaaattgtattcatcggcttggcctgggaaaacttttaaaatggatcgatattacaaaatttgcataatacgatttttgaggctcgttcaaagtgagattttaaaattgtatatttttaataatattcaatggttttttatgtattcggaccaaatttaaatatcttctgtatttgacatactttgtaccacatttcgatacacccttttcagaactttaccaagtcctttatggatatatgtacttggcatcgcagaaacaggttcccatccgatttcccaccgggcagctctgagcccgtttttctctgctacccgcccgacttttctgttgtctcaggcttttgctccggtcttccagtcgggcgacttgaccaccccttggactcacagtatggttcggatcgggaatcggtgcggttcagttcggcttggaaatgcgcgccaaaggtgctaagctcgataaaaataaagaaataacaaatcacttaaaggcaacgcatatttaaacgtgtttgagcttagggaaatgttcaagattcggcggaaaaaattaaattagattgggagtttttctttgactcaatatgattggtgtttgtcgcagttcttatctgtggacttatttacgtcgtagtttgccgtctagttttgtcaactttaattgaaattaatttactttcttcacattctatctgccagatacagatacacgtatccgtatctgtgtgcacatgccgctaagtgaacagccttgtatgcgatcagatttgagcgcagaggtcagcaaataaacaaattgtcgcacattatggtttgttagacagccacgattcgtatgcaaaataagaatagaatgggagagggcccatcatgactagaagtgtgcaaattcaacaattcctgatacccatcttctggctgggatctcgtcgcaaaagtgccgccctttacgggttttccccagactgcaatctcaatcagcgaatgcaaatcgcagcgtgatgaactcagtcaaagtattcttttttttatatatatatgtatagccgcatagatatagatattcgtatttatagaatggcgaaaaacgcgatgcgatttgcatacaaatcacttgaatacccgcatttagtcgcacagacgacgcctggaatttcaataagttaaaagtttgcaaactaatcaaaatcaccgcctcttcttccagcacttgacaattatgtaaagcttctctcgccgaaaacaagtttgcaaacaacaaaaaatgaataaactcgtggtaccgtaaaactatcaaaactgaaactaaagaacaagtggcaacaacccaaccaactcaaagaaaacaactaacgaaaactctccaaacaaaagtgctagcaattaaaaataatttctcagttccctaacgagcaagaatagaggaacacgaaatttaataaaacagcaaccgaatctctcgaatgtcgcgcaaaatgttgcaagtgccggtagcaacacttgtgttgctgtcgctgctgccgattgcccatgttgctgctgcctcagccactgccgcagatgcaacagcagcaactgcagcatccacaacgtcaaccggaatcgatgccagcctgaagaatgccaagctgattgaggccaaagtgctgcccgacttggccatcctgcaacgcgttaaccaggaagacgaaaagtggcagcaggtctaccggttcatcgacgatggctttcccgtcctcgagttgtacggctacaagccgctaccaggtgagtttccatcatgggaaacttaagaggcatacaatcctaaacagtggatattattatacaatattattgattgcggtacagaacaagtatcgttcattaattggtttcaaatgtatacaaggtacagaacaaatatcattcattaaatattatcaaataatttttgaatattaaaatccttagattatttagcttgctaagaattaacttagtagattacaacaattttttatagttcacagtcttgaaatgcttaagcctagcggtgctgttgagcaacatggcgtttgtgaacatggcgaaggaccatcccaatcttagcatttctaaaatgtgtcccctatccaggcgaaaggcattaaagccacttttatccacagtcgctctcatcacgtgcatgtagagccacatcatttgtgtctgcaaaataaaatgtcaatacctattttattttgttgttgaaaagattggaaaagttcttgctcacctgtcgctgcggtttaaagctcgctctaaattgaccgaatgttttctcgatggagctaatggtcacatttatgtggagcagggctaccggacatatgaacgagctgagcagactctcgccaaaatctatggctgattgctgatcgtacaggatcaagtggaagttggctatgaagatgaaaaagctgtgcgctaaagccgtccacacaaaggacctgaccaagcagtcgaatgcgtggcgaagtctgatgagctgtctgtagaagacgaagagctggaatgatttccttcgattgtgaggcacttggatgtcgtagcaggcatagagtagcatgatgcccaagtaggccaccagtgacaatagcaggggctgaatgcacacaaagattactgcagacagtcccagtaatatgtcaacatttgggctgatgcccaaacccattttttggtttccaacaatcggcgccatcgaagcgacaaatgccctataggcttggatgccaaatagaagccagttaattttcggcactttaccgcaaattctctcgtagctataatagatccttatgaattcgttcagaacccgtcgcattagcttttgatgatgcctgtaattgggagataattaacaatacattaatgtttttcaaagtgaatccatcacaattatagaattataattagacatttcaacatcaaattctacctgtagtgataggcaattcctgtgctgatgaaaacatttcgatatttggcgactgtcagtcctatttcgtaagtgagctgaagtgacctctcactcccaggcgttagatccgtcagtcccttgcgaaactccgccagccagaatatgaggtgcatcaggaaggtcgtcagcagatatggccttagccagaatctgtgcaccgcccccacaagcaaattaatcttcgggttcactttgaatacccgcctgccttcgatgtatttgtaaatgttgcaacccgaaagcgttgtcagcacttgcagcagctgcagaacgctcttgaggcaggacatggcgctactgacttccagacagtctggaaaactcccaatagcagcaaaatggaaatgcgtgacattgacaaattacttcgttcaactgtccaaatgttgatcataaacaaaaacaagagacaccgcgatagtatcgtcgactatcagatacccagtactcagtcaaacttagggcgacagaatgatcaaataaaaatttgacatttaggcaaaagataatttcatttacatttatacaaaatcttggacaaagcatagccagatatattcctcaatttgtagatagcttggagtgtcagtttattgtagtatttctgaataagaatacatactttgttctacatgattaactttttaccaaatccaatatacccaattttcaccatttccatttaagttgaggcatggaaaaaatcaaaaatcatcgagttagagaatgtttattaacatagatttgttcaacatttattgtttcatttcacaaaaaaatatgaaaaatcaggtgcgacttatatttttattgccgaaaggcatttttttaatacggcaagaaatattaaagaacttatatatcatacgcactgtcaaaataaaaaaattaactataaagtaaaattgactaataaaaagctgctgactgcttaaaatgccgtatagtaaaatttgtgtatggtttttatacttgtaatgccattcaagtgaataccaggtatagtaattaagaatcattgaaatatgttatgttagttaactgccaacataacagttcacaacgcctatgccatactaataccggttaattaaagccacgaatttccgccgactacacacccaccaaaaaaaaaaaaatataaaaagttatgtacccgcgacagggcccaaagttaattacatgattagcatgcagacaggtgagggattcaggtgtggtgagcgcagcacttagccgtaaatgaaacgaaaacagtttacatttttaagcgagcaattccctgggtaactgggtaactaaacctccgtctcctttgcatgtgcgattccggtggacatgatccggacagacctgccgtacacgttgattgtgcccaaaatcgatgtgcggagcattgagaagccgcgactgaaggagttcatgttggaacatgtggtgcctgggaaaatcttcgacagctacaatggtaatgggaacagcaaggaggaggaggagtccttcggcaatgggaacggacacaaaatcgttttccgtaaattggaaaaatcccacaacaatgtttggctactcaatggccagcaaatactccacaagctgcgtatcaatgagaacctgatggccattgcaattgatggttatttgggcgataggaagtcgccctactccaagcgcaatatccaggaaacgaacaagtgagtaaggccaccgccaccctttccagtacagtgggctgaaactatgccataaacgtgtccatttcataataggttcatttatttaaagtacacgtataaaaaatgttttaaatagatacagattggcaacatttgagaaaatgtattagatattattaaataaaccaagggatttcatagacattttttaaacctatcctttttagggcctatgctgaaaccactgtagagcacttctgctgaattcctagtcctagtttgtttgcggtcaaaagtgcactcatgcgaaatttatcaggcggcaaacaaagttttcgctggtccaactttccgcacacacacacacacactccaacttttgagggtttcctcttccgcaatgctaaccgaggccatctcaatctcaatctgtggacctagttccaccacattcccataatcatccactgaatattcgtcgcacataaaaacgattcggtccatgattttccatttaagaaaattacaaatatttcttttggtagcctaaaaaattcagattttccgggagtaaaaaatactataaatttagtaacataatttgatgatttgtgatgcccattttttccctgtgcatcctgcagccgctacaacgaccctcagccgctggagcagccgaacattacgaatgcacatgcaaaggtggagcccgttatcaaggagtcgaaggccagtccgctgatgtcctttttggcaaacatgaagaccggcaccaaggtcttccagcacttcctctccaagagcaatctgacccgcatcatggacgacaacgcgtatacggtgctgattccgtcggacaacgccttccagcgctggcatcccatcgactggggattctatccgttttccgtgccggaattcactgagtcggtgcttagaaaccatttcctgcccatgcagcgacccctgcggctggccgatgttcggaacatggacgaggtcgtcgtgaccaccatgggtggcgaggatgtcgtcttccacggccaacgtaagtggctcccataaataatattcccaaattcaatttatgacaacggcatgtggcccttgcatcgttcgatagccacccccacggtgaataatgtgagcattatgtccgactacaacctctccaatggcaatcaggtgttcattatctccgaggtgctcttcgtcacggaagctgtcgtctccaaattgcaccaggtaagctgattatgcataatccgcactggctaaatttcaatttcaattattccgattcttttagatgcacaaggataaggagacacctccgttgctggcattcccctggtttggagcacagttcctttcccattcatttttggccttggagagagatccacgatttacccagattaccaggtaaaaattcgatttctaaataaataaaattaataaaaaaaaactttccaaaaagatatttgaacagtgccgagatcgccccccacatttccggcgccaattacacgttctttgtgccagaggatcgggccttcgagaagcaaggattcgacaagctatcagatgaggtcatggtgagtgcggaatacattgtcaacagttgagtaggaataacaagatacttctaggcctcacaacgcggcgtaaaaatgctgctgaaccacttcgttaagggacgactgtataaccgtgatctgcgcgacaatgaagtctttgagacgatcggcggaggccacattaagatcacccgtaacccgggtagcaactataccagcgtcaataatgcccagattacggagagcgaggtgttcgtatacaacttgggcaccatgtactacctggacgacatcctgtactcgcacatgctgcgcgacttcgtaagcaagtccaccaagacgagatccaatcggcacggcagcgattccggcggaggatcacggagcacctcgcggcccagcgacgtggaaatcgtgcccaacgagttcgagggggagcacaatggcggcgactatgccatccacggtgatgacgaggacttcgaggatgagattatcacgcccaaggcgctgcccgtccagatctatgagttgcccaagtaaagggcgggatcatgacagctgggttagtgtcagagtatatatatcgcgatggtaaatgcgaaaataacacaggcggcactttgagattgtttttgggatccctcaatcggccttcgagtcttgtatcagtctatttccgaagtaggagacattccaggcccttcgacaattagtctattgtcgctttatattattttggcaattaattagcagtatgtacaatatttttttgcaattgatctgcgttagaggaacgaatgtgagagggaggcgagcgctaaaagcgtttttgtatagttctgggctaattttgtaacgaatttttctagtttagttcttagtttttcatgtatgttttaagtttagcattgaacgaggcggtgaaacgaagtatactacaaagtcaacatcaagagcagcagcagcagcgacaacagcaaatatataaaatctaatcctaaagaacttatcagcgatttagacaaagcttgtagacatagcgagaaattgcagccaacaaattactacaaatatttaaagagtaaacgagtaagaataaagcattcccgtaatattggatttagaagcaaaatttcaaaaaatataaaaatatacgtatactatgcacattagcgctcatcagtgtttatgcttttttgagtctatccatatgagggagcataggaaaacatatcggctaaatcggcgaatcgagcctagagcgaccaaaattcaaacgcaaaaatccctggcatgatatatctatagaacgagtatattacgaacagatattgtattttttaatttacggtattgatatttaatgtatctgtgtatatgaacaacaaagcaatgagaacggagcatccaattttataatagtttgttaaaataaaaacaaaaatcttccagaaaaataattccagtcgcatagcatttcgttgaactattttattatgaattagttaaactcaatacatttgtaagtatgattatattt

SEQ ID NO: 27671 - DNA, 2509 bp, DROSOPHILA
ggaatcggtgcggttcagttcggcttggaaatgcgcgccaaaggtgctaagctcgataaaaataaagaaataacaaatcacttaaaggcaacgcatatttaaacgtgtttgagcttagggaaatgttcaagattcggcggaaaaaattaaattagattgggagtttttctttgactcaatatgattggtgtttgtcgcagttcttatctgtggacttatttacgtcgtagtttgccgtctagttttgtcaactttaattgaaattaatttactttcttcacattctatctgccagatacagatacacgtatccgtatctgtgtgcacatgccgctaagtgaacagccttgtatgcgatcagatttgagcgcagagcacttgacaattatgtaaagcttctctcgccgaaaacaagtttgcaaacaacaaaaaatgaataaactcgtggtaccgtaaaactatcaaaactgaaactaaagaacaagtggcaacaacccaaccaactcaaagaaaacaactaacgaaaactctccaaacaaaagtgctagcaattaaaaataatttctcagttccctaacgagcaagaatagaggaacacgaaatttaataaaacagcaaccgaatctctcgaatgtcgcgcaaaatgttgcaagtgccggtagcaacacttgtgttgctgtcgctgctgccgattgcccatgttgctgctgcctcagccactgccgcagatgcaacagcagcaactgcagcatccacaacgtcaaccggaatcgatgccagcctgaagaatgccaagctgattgaggccaaagtgctgcccgacttggccatcctgcaacgcgttaaccaggaagacgaaaagtggcagcaggtctaccggttcatcgacgatggctttcccgtcctcgagttgtacggctacaagccgctaccagacctgccgtacacgttgattgtgcccaaaatcgatgtgcggagcattgagaagccgcgactgaaggagttcatgttggaacatgtggtgcctgggaaaatcttcgacagctacaatggtaatgggaacagcaaggaggaggaggagtccttcggcaatgggaacggacacaaaatcgttttccgtaaattggaaaaatcccacaacaatgtttggctactcaatggccagcaaatactccacaagctgcgtatcaatgagaacctgatggccattgcaattgatggttatttgggcgataggaagtcgccctactccaagcgcaatatccaggaaacgaacaaccgctacaacgaccctcagccgctggagcagccgaacattacgaatgcacatgcaaaggtggagcccgttatcaaggagtcgaaggccagtccgctgatgtcctttttggcaaacatgaagaccggcaccaaggtcttccagcacttcctctccaagagcaatctgacccgcatcatggacgacaacgcgtatacggtgctgattccgtcggacaacgccttccagcgctggcatcccatcgactggggattctatccgttttccgtgccggaattcactgagtcggtgcttagaaaccatttcctgcccatgcagcgacccctgcggctggccgatgttcggaacatggacgaggtcgtcgtgaccaccatgggtggcgaggatgtcgtcttccacggccaacccacccccacggtgaataatgtgagcattatgtccgactacaacctctccaatggcaatcaggtgttcattatctccgaggtgctcttcgtcacggaagctgtcgtctccaaattgcaccagatgcacaaggataaggagacacctccgttgctggcattcccctggtttggagcacagttcctttcccattcatttttggccttggagagagatccacgatttacccagattaccagatatttgaacagtgccgagatcgccccccacatttccggcgccaattacacgttctttgtgccagaggatcgggccttcgagaagcaaggattcgacaagctatcagatgaggtcatggcctcacaacgcggcgtaaaaatgctgctgaaccacttcgttaagggacgactgtataaccgtgatctgcgcgacaatgaagtctttgagacgatcggcggaggccacattaagatcacccgtaacccgggtagcaactataccagcgtcaataatgcccagattacggagagcgaggtgttcgtatacaacttgggcaccatgtactacctggacgacatcctgtactcgcacatgctgcgcgacttcgtaagcaagtccaccaagacgagatccaatcggcacggcagcgattccggcggaggatcacggagcacctcgcggcccagcgacgtggaaatcgtgcccaacgagttcgagggggagcacaatggcggcgactatgccatccacggtgatgacgaggacttcgaggatgagattatcacgcccaaggcgctgcccgtccagatctatgagttgcccaagtaa

SEQ ID NO: 27672 - protein, 625 aa, DROSOPHILA; identical to SEQ ID NO: 12135

SEQ ID NO: 27673 - DNA, 4389 bp, DROSOPHILA; identical to SEQ ID NO: 19681

SEQ ID NO: 27674 - DNA, 1607 bp, DROSOPHILA
cggcttgcagctttaatattttagtcgtaattaaatgcaatatgtttgtactataaacgccgtcggaagagcttaataatgagcttgagcattgtgagttactatggcagccagcagagcaagtgcggctactgcgcgggagcgaactgcagcctgtcgcacggtatgcacgcgtatcagctggactgccgggactatcaggacctcatcgatcgcggctggcggcggtgcggctactactgctacaagctgcgcaaccaggagacctgctgcccctgctacacaatcaaatgtaatggcctggagttcaagctctccaagtcgaacaagcgcatacttcgccgcataaatcgatttttgcgcgacggcaagcgagagtccaaaccggaagccggcgacggtgacggggaagccgatgccgattacgccatagtggctcccgaggtcacggccagcgaaccgcaaccccagctgccagataagagtccccctgttatcaatgtcgagcaagttgcatcactggcaacggctcagaggaagccgacgaagcaggcaactgctgccgcggtggaagctcctacgttggggtccaacaaatcatcactcttatcttcatcagccgcagcaccgatctcaaacaagccgtgcaagaaggccaagcagatgcgattggatcgacggctggccaagctgggagactcggcctcctactcaacgaaatcccttacccaggaaaagacacttcgcgacttcttgaacacggacagcgagacaaacaaacatcggctaaagctgcgcttaattcacgtctacgacgacgagttccggcggaccctgccccagagttttgcgctctataagaagtatcagatatcgatacataatgatccgccaaaggatcaggacgcgtacaaggagcatctgcaggcgactcccctacagaatgagaaaccctgggatggtcccgaaatgggctacggttcgtttcatcagcagtactggctggacgacaagttgattgccgtcggcgtgattgacattctgccgggttgtgtaagctcggtgtactttttctacgatccggactatagctttttatcgcttggcacatatggttcactcagggaaattgaattggtgcagtcgctcgccgagaaggtgccttctctcaagtattactatatgggtttctacatacactcctgtcccaaaatgcgctacaagggcaagttgtccccctcttacttgctgtgcccggagacctatgaatggctaccgctcaccgatgttattcgtgctaagctagacgaacataaataccagcgcttaaacgaagatcctgcagctagggatgtgaatgagtttttgatggagcatttggacgaagttaagctgctcttgggtggaagaacccgcacagactacaagcactttaggcagctgcgtgggaccgtctccgatgacgatatcattattgagtacagcaagctcgtgggaaaagagtgtgctcggcgcatgctatacgtgaagtaaagttgccattatttgaattttgaattaaatgccgttcgcaatagcaatatgttgaaaatataaaatattttaat

SEQ ID NO: 27675 - protein, 484 aa, DROSOPHILA
MSLSIVSYYGSQQSKCGYCAGANCSLSHGMHAYQLDCRDYQDLIDRGWRRCGYYCYKLRNQETCCPCYTIKCNGLEFKLSKSNKRILRRINRFLRDGKRESKPEAGDGDGEADADYAIVAPEVTASEPQPQLPDKSPPVINVEQVASLATAQRKPTKQATAAAVEAPTLGSNKSSLLSSSAAAPISNKPCKKAKQMRLDRRLAKLGDSASYSTKSLTQEKTLRDFLNTDSETNKHRLKLRLIHVYDDEFRRTLPQSFALYKKYQISIHNDPPKDQDAYKEHLQATPLQNEKPWDGPEMGYGSFHQQYWLDDKLIAVGVIDILPGCVSSVYFFYDPDYSFLSLGTYGSLREIELVQSLAEKVPSLKYYYMGFYIHSCPKMRYKGKLSPSYLLCPETYEWLPLTDVIRAKLDEHKYQRLNEDPAARDVNEFLMEHLDEVKLLLGGRTRTDYKHFRQLRGTVSDDDIIIEYSKLVGKECARRMLYVK

SEQ ID NO: 27676 - DNA, 4391 bp, DROSOPHILA
gcggcgtacaaggttccataggtcgcctccaggtcggcgggtacgtgctggtgggtgtcctttccattgactgcctgtgggccgtcgtcctcgtggcccagtttcagattgtcattgaagagggcaataaactgggggcttgcccgctcggcggaagccgcgtcaatcattgtgttctgcagaggaagccaatttggttatgcacctattgcaagcaaacaaagacaatcgcactagcacagctgcagcgacaggtgataaccatgtccgatgcactgcttctccggattggagtgactaactttgtgggtatgaaggtcgcattgagactgaaaccagttattgttgctctcaaaatagggaactttatacttgatgtatatataaatatattgtttgctttttacctatatgcaaataaatgccactctgaattttgttgaaacttattgaattaggattttcttgcagtgtagttgcaatgcaattacaatgtaagccattaaaaactttcactaaacaactacgcacttaaacgatttgtctgaagtatcgaattgtcagtgcgacgtgtttctgcacagtggcttttattgacaaatttacttacagattcttaactcgttgcttttagctcaatgcatttttaattggtccacctattgcggctccaaacattactattcttataggacttagcaccgatttaaccgatttggccagtgtgaccgttttgaggcacaataggggcattcccataattttttaagcttaaacatatttttacaatgattcaattcaatataacatttaatataattttaaatatatattagagaataactttataaatccaaatatgctagaaactttatctcttagatgagatatgaatgtaatttctaattacagtgtacatggcctattaccatttatggcgccagtattttttaatcggcgagcactggtcacactgcttgcatataaaatttcgcaacagagcggcttgcagctttaatattttagtcgtaattaaatgcaatatgtttgtactataaacgccgtcggaagagcttaataatgagcttgagcattgtgagttactatggcagccagcagagcaagtgcggctactgcgcgggagcgaactgcagcctgtcgcacggtgagaacatgcaaaaccagtccaaaaaccaggtgcaatgtaccaattattgtggattcgtcataaatgacaggtatgcacgcgtatcagctggactgccgggactatcaggacctcatcgatcgcggctggcggcggtgcggctactactgctacaagctgcgcaaccaggagacctgctgcccctgctacacaatcaaatgtaatggcctggagttcaagctctccaagtcgaacaagcgcatacttcgccgcataaatcgatttttgcgcgacggcaagcgagagtccaaaccggaagccggcgacggtgacggggaagccgatgccgattacgccatagtggctcccgaggtcacggccagcgaaccgcaaccccagctgccagataagagtccccctgttatcaatgtcgagcaagttgcatcactggcaacggctcagaggaagccgacgaagcaggcaactgctgccgcggtggaagctcctacgttggggtccaacaaatgtgcgtatgctccttaatgccttaatgccacagtaatatatatattatttattatattagcatcactcttatcttcatcagccgcagcaccgatctcaaacaagccgtgcaagaaggccaagcagatgcgattggatcgacggctggccaagctgggagactcggcctcctactcaacgaaatcccttacccaggaaaagacacttcgcgacttcttgaacacggacagcgagacaaacaaacatcggctaaaggtgcgttgcgaataaatgtggatagaataattagttagaccgtttgcaaaactaagctggatagcgtgaacctatgtacatatgttgataagggtttacactgtatattgcgcctatgtgtttcctgtgtccgttccccgagtataagtctcccgctacatgtagacacatctgtctttgtgctgtttgtgttcttgcagatcgtgttagtcgcttcctcagacacagagcgcacttgtgccgatgcagtgatcgcgttgtatcgcaaataccaaataaccgttcataatgataaccccgcacgcctcaccctagctagtatgcagcggttcttggtcaaatcgcctcttaaggtaattataaacgagtattcatctttgccccaaaaatgtattcgcagctgcgcttaattcacgtctacgacgacgagttccggcggaccctgccccagagttttgcgctctataagaagtatcagatatcgatacataatgatccgccaaaggatcaggacgcgtacaaggagcatctgcaggcgactcccctacaggtttttctctataataattcatacatttaaaagctttacttctaacctcataattccgggacgtttttgcttgcagaatgagaaaccctgggatggtcccgaaatgggctacggttcgtttcatcagcagtactggctggacgacaagttgattgccgtcggcgtgattgacattctgccgggttgtgtaagctcggtgtactttttctacgatccggactatagctttttatcgcttggcacatatggttcactcaggtaaagcaagattccgagcaaagaaagataaaactgcatagaagaaattcttacagggaaattgaattggtgcagtcgctcgccgagaaggtgccttctctcaagtattactatatgggtttctacatacactcctgtcccaaaatgcgctacaagggcaagttgtccccctcttacttgctgtgcccggagacctatgaatggctaccgctcaccgatggtaagtttgcgattttcttgttaatattctgtactaataacaaacacgtatatattcagttattcgtgctaagctagacgaacataaataccagcgcttaaacgaagatcctgcagctagggatgtgaatgagtttttgatggagcatttggacgaagttaagctgctcttgggtggaagaacccgcacagactacaagcactttaggcaggcatgtttattatcattaacatcagtggttcataatctaatatacgttttatttacagctgcgtgggaccgtctccgatgacgatatcattattgagtacagcaagctcgtgggaaaagagtgtgctcggcgcatgctatacgtgaagtaaagttgccattatttgaattttgaattaaatgccgttcgcaatagcaatatgttgaaaatataaaatattttaataattccaccggtcttgcacccaatatagttgtaatcattagcagacacttgattaccccttgttgtttgcctacaccaggtaagcgccactgttggaatgtaaagaataatatgctcgtcattcgtacatatttttctgaaaagctgacagctttccactcataatcgcctcttatcagaaacaagcagctaaatgcatcaattaagctttatgggctggcaacattctgtgttggtacaagtcggataaccgctggagataatgtactttataagccactccagggtgagatagttggccaggaagccaattgttgccgtgaaatcaagtcgtttacagcagtggaacaagtcggatgtgtccaaagggttcggattaccaactgtctacgctggaaagagtgttcttgcccaaggtgaggagtgtgagaagttatttgcgtctgaagacgagcgcttaattataaataaacttgtgtcaataatatctgttctgctctggcttttcaccggcattcgccaagtgcgctaattaaacaaaaattaaattataaaacaacggtcaagtaagtttttacagcacgtgtattttatggtgatatttttttttccaaatttatgaatactatcattcgccagtttgggttgggatttaccaaacaaattagtaatatgaatatcggggtggtaatatttttgaattattagtcaccgtgtttattggcttacattttagcacaattttgtgagatttgttgttaacaaatttctcggcacattttcgttgcgccaatcgcatgcgatttttggcacgctatcagaaagcgttaaaaaaaggcagttcgacgttgagcttcaaccgacggcagcaatttaaacaatttttaaccgttttaaccggtgctgccgccgctgaaaacgagactgcgactgcggcaggtggaagttttgcttaaatcgtcgccccaagtagatgtatatatgccattggcaaccgccg

SEQ ID NO: 27677 - DNA, 1460 bp, DROSOPHILA
agcggcttgcagctttaatattttagtcgtaattaaatgcaatatgtttgtactataaacgccgtcggaagagcttaataatgagcttgagcattgtgagttactatggcagccagcagagcaagtgcggctactgcgcgggagcgaactgcagcctgtcgcacggtatgcacgcgtatcagctggactgccgggactatcaggacctcatcgatcgcggctggcggcggtgcggctactactgctacaagctgcgcaaccaggagacctgctgcccctgctacacaatcaaatgtaatggcctggagttcaagctctccaagtcgaacaagcgcatacttcgccgcataaatcgatttttgcgcgacggcaagcgagagtccaaaccggaagccgacgaagcaggcaactgctgccgcggtggaagctcctacgttggggtccaacaaatcatcactcttatcttcatcagccgcagcaccgatctcaaacaagccgtgcaagaaggccaagcagatgcgattggatcgacggctggccaagctgggagactcggcctcctactcaacgaaatcccttacccaggaaaagacacttcgcgacttcttgaacacggacagcgagacaaacaaacatcggctaaagctgcgcttaattcacgtctacgacgacgagttccggcggaccctgccccagagttttgcgctctataagaagtatcagatatcgatacataatgatccgccaaaggatcaggacgcgtacaaggagcatctgcaggcgactcccctacagaatgagaaaccctgggatggtcccgaaatgggctacggttcgtttcatcagcagtactggctggacgacaagttgattgccgtcggcgtgattgacattctgccgggttgtgtaagctcggtgtactttttctacgatccggactatagctttttatcgcttggcacatatggttcactcagggaaattgaattggtgcagtcgctcgccgagaaggtgccttctctcaagtattactatatgggtttctacatacactcctgtcccaaaatgcgctacaagggcaagttgtccccctcttacttgctgtgcccggagacctatgaatggctaccgctcaccgatgttattcgtgctaagctagacgaacataaataccagcgcttaaacgaagatcctgcagctagggatgtgaatgagtttttgatggagcatttggacgaagttaagctgctcttgggtggaagaacccgcacagactacaagcactttaggcagctgcgtgggaccgtctccgatgacgatatcattattgagtacagcaagctcgtgggaaaagagtgtgctcggcgcatgctatacgtgaagtaaagttgccattatttgaattttgaattaaatgccgttcgcaatagcaatatgttgaaaatataaaatattttaat

SEQ ID NO: 27678 - protein, 210 aa, DROSOPHILA
MSLSIVSYYGSQQSKCGYCAGANCSLSHGMHAYQLDCRDYQDLIDRGWRRCGYYCYKLRNQETCCPCYTIKCNGLEFKLSKSNKRILRRINRFLRDGKRESKPEADEAGNCCRGGSSYVGVQQIITLIFISRSTDLKQAVQEGQADAIGSTAGQAGRLGLLLNEIPYPGKDTSRLLEHGQRDKQTSAKAALNSRLRRRVPADPAPEFCAL

SEQ ID NO: 27679 - DNA, 5811 bp, DROSOPHILA
taacacaactaactactcgagacgacacgaataaaagacacgggacgtaagcaaagtgttttggtgtgagccaactgaaaaaaggggcagcaacaatctggccgatgggggagcacatggattcattcgggaacaggggaccctctcctacaaaacctgtctgttatgcctgcgtcctgcaacacaagaattacaagcatcagttggtggctcgcgattgatagagtatgaataatgaggtgatgcaaggcggcgaatcgaacgccgaagaatagcctctaaggtaatatgtggccgtgcgccaccggaagtgaaaccgaaaacagaaactggacgggccaatatagggaccataacagtaagagaccgcgagccgcgagatgtgcgattaatgtgtgtgggatgtgggtcctgcctacgggccggcattctggctctggccggaggacgccgtggcagctgcagcagccgcaaccgcagccagatccaacagttggaagtgcttttgatccgcgaccgcagcagccagggattccaggagggaggcatggacggctgccgtcgctggctgctcgtgctgttgctgctgcagttgctgctctgagactgtctgcttctctggcgattggcggctggcctgctgttctggggattctacgagttgcatcggcggcagcatggacgggtcacacaaaaagatcaggggaagaagagaaagagagagagagaaagaaaaaagacaaagaaatgcacaagttacttgaattagtttagttattatcatcatataaccttgggtttaggttaacacaacaacaatcggaaaagaggctctcaacaaaaaccttcactaacaaactggcatgatttattaaaattatcacttaaaataagagtacatatcgtgaaataatttagattcggtgacaacagaaaatacattgaaaatgaattaggacaaatggtggtataaaaccgaaaaatactctattaactttgcttagccgacgtttgggcgccttgagctctctggcttgggttttctgtaagaatgttctgattaagtatgggattcttgttccaaacccgaaccatttcacaatcgatcgacggaaaacataccgtgggcgcagccaaactcctaaatgaacacgcttgtaaagctcctccgctttctgaggttttttaaaaacattaccacctacaatacaagcaacgaaagcggatagagtcaatttatagcctacttagtctatacaagttttggctaggggattttacgaaatctacggaaaccttttcgatgctggactccgtagatctaacacaaaattatcatgataaatagcccttctggtcacttttttgaaacataaacatatgtttgtacatactacacgtaaaattgggttaattttaactgggtgtactcatactaaaatcaaatgatgcactaaagtcataagcggaatcggggacctaattatatttgaataacaataagtgatgatgaagtcagaatcatatgtaacatatatgtaattttcattttggacaatgtgaatactctttcgaacttttgcagttaaaattttctaatattatttaagacaattgatgcaccaaaaaaatacttttacgttaaatgatgtcctagaggtgtgccgtaaaaggtgaaccgaaacctaaatgcttgatcttgttaggatttcattcctttgtctaaattattggtgccgaagcgtggttgagtcagtgtggatgtatgtaaatgggatgtgtatggattcttataactactttaccctagggtctacaattagcaatttgtaaacataaagatttcttggctatacagagatataattctcgttactggcttattgcaaaaagggatccaacgtaccggattgctggggctgctgtgccggggtataggcacgttggccgccaccgctgccgttcgacgtggaactggcgacggcttgcttggcgggcggacgacgcttagccagcggcatgtcgtcgtctgaatcgcttaacgttaggtcaacctgttgcgcagacagaatacagtcatatgataagacagtttggtaggttgtagattggtgctctctacttacagtttcactgtttgacgttgatgtgggctgttcgtcctgtgctggggacaaatccctctttactggcttggcgtcatccgagataagttctggtaatgtccgaaaaacttgattaatgtcaaaacaatttaaaaggttgcgtgttaggcgattacctatgtcatccgatataacctcaaccttttgggcgggctttgaaggcgtatcaaggatctgcgtctcgctccgtagtcctggtgtgctccaagatccatcctgatgaagttgaatctcagtatcatcactctttagaagcgacgagcccaacacctcctggaagtagctggaaaacagagtttaatcagttacaaatatgctaaatgaaatgacatttcttacccatctatgaccaggttgtcataaatggccggcttgtcgcatacagggcagttccacgtgggcttacgctcattcatttgcaggtagagactggcatcgaagcattgcagatgcgagcaggttgatgctcgacaaggcagcaacattttcatcttgcccaacgggcagttaagggaaaccttcagcatagtggtggctatttcgcagtcagcatcctcagtcagcttctctttgactttaaaaaaatggtatttattattaagtttgcatcattggagcacagaaaactcacttaagcctcgcgtgtagtccgctggttttacgcccttcgtcttcattcgctgcaaaagctgtgttgaggtgagcttctttaccaggtatacggccagacagtagctacgagtgtagtccggacaccactgaaccgttatggtgttggtgacggtaggcgacagctttacattggacgtgacattaacgggtcgcggcggacgcttgggctccacatttggtcggtttgtaggaatgacattctgcattggaataaagagcaggatattataccaggtcctgattggataatcggataatacttacaggcagctgacagagtttgttgttcactttgacgtttacgttcggcgggaagcagtcctcctggtcgcacgaagtctccaccaggcaaaagcgcagttgaacctgaatggcgtgctccaccttggagctgttgcgaatgtcgcgattagaggcaatctcggtggcctgctgcggcgtgagcgtgaagtagaaaggcacctcttggacgcgctgagtgttgcgtggcaccagagttgaaggcttaattagcgttccgagtacatcgtagaaggctagctttttcagccgcacatcggggtgaataggcagctggctgttgatgctgtgtgtgtggaggaagggtgcgccgccgaccacattcatctggccgccgggcacttgcacaccttggccgctgcccacgaggcccacgggattgggctgcacggtgggcggcagctggatgtgcgagtacatcctggttgggtcgatgtactgcagcgtggcgttttgttcctgcacggactgggcgtagacttcctggaccttcggggcaagcagttccaagttggtgcgcaagaacgagaggatgcggctctgcaggtcagtttttcgtccagcgaatgagatgttcagaaacgacaggattttttgcagctcgaccactcgaagcatctgcaccatttgctcacattcctgaagagacggaaatggcatggcgaacaatgaaaattttgtatttcggaaaattgggaaggtgtctatgtccaaatagcgggacttagcaccaagcgtccacacgaacacacacacaagcgcgctctatatgcaaatatcgcgttttcgcacatatgtacacatgcgtatgccttgtgcggctttatgcagaaaaaatcataaattcgctctacattatatgccaagtgattgcttgacagtcggacaaaagcctggcttccacatttttcccatctgtggataatttactggtccgaaactgccgcatgccaccaaatcattacctagatgctcaaacatggcgttctcgcaaaaagtttcttttcgtggaaccgatcgggtttcagtggcttttaacgttggtatatgcagaaaatttggtaaggcttgtgttcgccactggcagccttccttctttcgcaaattgcacttaaacaaactaccgcaaaaatgcccccttttttgtcacacgaattttgttttgtccgcacggtctgaagaaatatggcggatgatagtgttgttaagcgccggcggatttggctggcaaatcactctgttcgtgggtggggaagggtacagacaccatttttttctgcggtcacactgcttatcaataaccatggcccccatatttatgaaaaattctttggactgaataaactgagactggcggaaacataccttgtacttggtggaatcaaagggattaactgctattggcgctgacgaagtcgactggtgcccggggctcgaagatgttgcggcattttccgcctgcgtgcgagccgtctgagagcgggtctttcgcatcactattattttctattcacggtggcgttaggcgttcggcaattgaagtcgcggactcgtttgcatttgcctgggacgcgcaccacacataaaaacaagcaattgccgctgtttttcaacgaatgcggagaaacaaaaatattttacgcggcgtcgtcgctgtgggccgactagagttgacactatcgatcgacactgcggaaatctctaccgcctggccgagtcttgtctcacgcagcccgaaaatgccctaacgcgtgcgtttgtttactttgttagcaaccgttactttcgtagattcctaattcgctaggcatttatttaattgtacaaatatgggtctatctatgcaagaatagtataaaaggggcccgccgcttggcgtgggcctagaaaaagtccatgtccccgcaattgacgtccagaaagtcgtggtcgtagctgattaaatccttcagcggcgctccctgagccgccgccgctgctttggatgtggagggaagttccgcattgtccacaagatttatattgatctcgtgggtcctgtactcagggctgtcgtgctcctgctcagcgccaacaggggagggtggcgggttggacactgaaatagtcaaaatagtcacataggagatttaacaataataatgggatcttcttacagctgcccggttgcttatcttcactttgctcgtcgccctgcatgtagtactctttgcgctgatttaacgtcggcagttccgtaacctgcttgctgaggcacttcttcaactcttccaccttacggtcccgcatcaacgtttcgatctgctttcgagacttgctcagactctggcgatcctcactaaaaatgcgcttctgctgctcctgagtgatgttatcgtggtgctttattaggaacaggaataccccgcctggtgtacgtctccgtatgccgttctgtttcgaggtatcgtgttagtatattcgggggaacatcctttactacttactttgatcatcatgccgccatcggcttcaatgcgctgagtttccttgtatagctctaggcacacatctatgccaagaacctccacgactcgaactggtaaaactggcattatttactaagtagggcattatttatttcacatactcaccaagtaattcgtccttttcctcgtacagtttgctggccatt

SEQ ID NO: 27680 - DNA, 1986 bp, DROSOPHILA
tcaactctagtcggcccacagcgacgacgccgcgtaaaatatttttgtttctccgcattcgttgaaaaacagcggcaattgcttgtttttatgtgtggtgcgcgtcccaggcaaatgcaaacgagtccgcgacttcaattgccgaacgcctaacgccaccgtgaatagaaaataatagtgatgcgaaagacccgctctcagacggctcgcacgcaggcggaaaatgccgcaacatcttcgagccccgggcaccagtcgacttcgtcagcgccaatagcagttaatccctttgattccaccaagtacaaggaatgtgagcaaatggtgcagatgcttcgagtggtcgagctgcaaaaaatcctgtcgtttctgaacatctcattcgctggacgaaaaactgacctgcagagccgcatcctctcgttcttgcgcaccaacttggaactgcttgccccgaaggtccaggaagtctacgcccagtccgtgcaggaacaaaacgccacgctgcagtacatcgacccaaccaggatgtactcgcacatccagctgccgcccaccgtgcagcccaatcccgtgggcctcgtgggcagcggccaaggtgtgcaagtgcccggcggccagatgaatgtggtcggcggcgcacccttcctccacacacacagcatcaacagccagctgcctattcaccccgatgtgcggctgaaaaagctagccttctacgatgtactcggaacgctaattaagccttcaactctggtgccacgcaacactcagcgcgtccaagaggtgcctttctacttcacgctcacgccgcagcaggccaccgagattgcctctaatcgcgacattcgcaacagctccaaggtggagcacgccattcaggttcaactgcgcttttgcctggtggagacttcgtgcgaccaggaggactgcttcccgccgaacgtaaacgtcaaagtgaacaacaaactctgtcagctgcctaatgtcattcctacaaaccgaccaaatgtggagcccaagcgtccgccgcgacccgttaatgtcacgtccaatgtaaagctgtcgcctaccgtcaccaacaccataacggttcagtggtgtccggactacactcgtagctactgtctggccgtatacctggtaaagaagctcacctcaacacagcttttgcagcgaatgaagacgaagggcgtaaaaccagcggactacacgcgaggcttaatcaaagagaagctgactgaggatgctgactgcgaaatagccaccactatgctgaaggtttcccttaactgcccgttgggcaagatgaaaatgttgctgccttgtcgagcatcaacctgctcgcatctgcaatgcttcgatgccagtctctacctgcaaatgaatgagcgtaagcccacgtggaactgccctgtatgcgacaagccggccatttatgacaacctggtcatagatggctacttccaggaggtgttgggctcgtcgcttctaaagagtgatgatactgagattcaacttcatcaggatggatcttggagcacaccaggactacggagcgagacgcagatccttgatacgccttcaaagcccgcccaaaaggttgaggttatatcggatgacatagaacttatctcggatgacgccaagccagtaaagagggatttgtccccagcacaggacgaacagcccacatcaacgtcaaacagtgaaactgttgacctaacgttaagcgattcagacgacgacatgccgctggctaagcgtcgtccgcccgccaagcaagccgtcgccagttccacgtcgaacggcagcggtggcggccaacgtgcctataccccggcacagcagccccagcaatccggtggtaatgtttttaaaaaacctcagaaagcggaggagctttacaagcgtgttcatttaggagtttggctgcgcccacgaaaacccaagccagagagctcaaggcgcccaaacgtcggctaa

SEQ ID NO: 27681 - protein, 554 aa, DROSOPHILA; identical to SEQ ID NO: 4152

SEQ ID NO: 27682 - DNA, 2532 bp, DROSOPHILA
gtctccacggaattgtgcgatctaattaaattgggcatgtgtaaggaagtgaaaattacaaaaaccagtgattaagcgacaaaacagtcgaatttacattcgcaacgaactgaaagaggtttgagtgaagtatctgcacaattaaagctatataatattaccccgctaatggtttttgtttttatgaaaaagtttactttactcagtagaatgttactttaaaataactttattggcatttttgtagtgttcttcatttcattcattttgtttcattttctagacacctcacaaaatgctgattgctgattcagtactcatctttaaattcgcttcctcgcttattcctgccacttcgtaataaggtaataaagtccacactccgaattcaatttgccatcatgaaaggcagcaagggaagcaaacaaacacattgtctttcaatatcccgccaaatgtttacgttatatccgttccatatacacttcatcatactcaaaagccgccagcacctgtgcaaaagaccattcggagaccattacctgtgaaggtggccaaaagcccaactttgtatgtgtgtgagtgtgttgtgacaatgtgagccaaattctagtcaaggaaatttcctttctgccaaaaaacactgcagcgtggccaaccagcagctgtctgccaaggaggaagtcgaaacgaaacgaagcgatttcgcccaggtaacaggtaactgcaaagtaaacgggggcaatgtttgaattttcattttcttggttctttacttagtttttttttgtgcatttttggtaatatttgcactgggtaaacgggaccaggatactttgcattggtaatttggcgtcattttcagatagttgccactacgtgtcctggctgtgttcgcagctcgggctaagagaattgacccagtttcattccccgaggtccgccctggctccctcgatattcaacaacaaagcagtggcagtgacaaacagagaaaacctgcccatcgacaaaacagtactggaatatccttgcaacttgagccagagctgtccgcaacatgcaacatgtcgagttttgttgtcctgacgggatccagcacagatccctaccctatctccccttgattcccgcatatccttgaggatgtcttggccatccggtcggttacctttccccgatttcctccgctctccctcgcttttcacatgagctgcagctcagcagaatgttgctaaggcttctaatcaatttttgaaatggctgaaattccgattcaagatttctattttcctgaccccatttgttgtcttgatttcgcttttttccacaaccattcggtgtcttattccatgtttgatttttctgtgtgttgctgtggtttttctctgctgttttaaaattcgagcacttatattccgggcccgaaaagcggaggcctctatggcgaggcgactgtctttgtaactttggtagttgtcatgtccaggatgtttaacatgtccactcttatttacctttgcctcggccatctttcctcactttcccaccactaaacgccccccccaatcctgaccagagccattggatgtccggacatcgcctgcatttgactgacaaaacgcactttgtataatcgaaaattcttttaattgaatgcaactcggtttccattccatgccaactttactttactttcgtttcgtttcggatccagcgtacggggcttttcctccggcagtccaaatatttgtgcttcaatttaaattccgtgtactcgtaactgatttttatttcgccaaggatagagattggcatgtgattgtgtgcggacagttttggaaattaagtggaacagctccatgcgtgtgtataaatgtgggtatatatatttgtcggaaaacttttgtgggtttgctcttggttttaggactttgttctttgttcgcttcaccagctcagaagagtccaattaattaagaaaaagagtgcaacactttcaatttttaaatgtgggactacattatatctagatttttgtaataagcatcttatttaagacatttttagataaattctgacgtatatactcatctatcttatgcattacactgaaacaacttctaattgattagcaaacacattttatttgcaattgtcaaatcctttctaatagccaaataaaaatttattgattgaattttcatgaagtcatattgttaaattcatctccaaccattgtattgtttttaaatcaacccgagaacgtacaactcgtgcacaagaattttataaataacttaaataaactgtttataatgaataaatcagaatgagtcttgttgctagggctgcctggttgattgcgattgccagcagccgcaaaatcattcattctattcatacagcctggctaattcaaatccaacccacatacgaggttgcctttaaaatcaatttaagtttcagatccattccaaaaaccgcaacgcaataaaacacaatggcattgcatttgttgaaagttacgac

SEQ ID NO: 27683 - DNA, 532 bp, DROSOPHILA
atggccgaggcaaaggtaaataagagtggacatgttaaacatcctggacatgacaactaccaaagttacaaagacagtcgcctcgccatagaggcctccgcttttcgggcccggaatataagtgctcgaattttaaaacagcagagaaaaaccacagcaacacacagaaaaatcaaacatggaataagacaccgaatggttgtggaaaaaagcgaaatcaagacaacaaatggggtcaggaaaatagaaatcttgaatcggaatttcagccatttcaaaaattgattagaagccttagcaacattctgctgagctgcagctcatgtgaaaagcgagggagagcggaggaaatcggggaaaggtaaccgaccggatggccaagacatcctcaaggatatgcgggaatcaaggggagatagggtagggatctgtgctggatcccgtcaggacaacaaaactcgacatgttgcatgttgcggacagctctggctcaagttgcaaggatattccagtactgttttgtcgatgggca

SEQ ID NO: 27684 - protein, 94 aa, DROSOPHILA
MAEAKVNKSGHVKHPGHDNYQSYKDSRLAIEASAFRARNISARILKQQRKTTATHRKIKHGIRHRMVVEKSEIKTTNGVRKIEILNRNFSHFKN

SEQ ID NO: 27685 - DNA, 4966 bp, DROSOPHILA
ggcactaactattgcccattctatatatattaccctttgaacccatcaacaccttattgaaaattatttttttattattctgatctgctagttaagtaaaatttttactgatttaatttttgtaatttcttgctggtacgcattactgatgtttgactgtatccaacttgcttaagctaagaagccataatcctccttccgattgtctgtgcttcttccggggtgccggaatcatcacgagatgtaagaaagcccctgagtcatccatcaatcgctggactaaccctcagagcaagtgcctccattacccttctcggagtttcaggtgcacttgctgtatggatggataatcatctcctggggaattgctgccaagcagctccatttgccgattagccgacagaccaccagagcaccaccgcacgtggtaacgctcgtcggcaccatttgagttattctggaatttatgtatatgctacttcgtaattgcttatcaagcagctctgcagacccactggcgtgctgttttctaatctggaccaagagaaaggccattaaaacgaatgtccagctggaacggagtgcaaactgctttgtgtaatggtcgtcaaatggcaatgcaggtggtaatttcgtttaattgtttttactggctacgtagactgctttgaatgttaacctaatggtgggcgaatgggaacaaattgataaaaaaattaaagaaaatgaatatatatatatatatataggttctatattaggttctgaaaacagttttttattttttcaaaattttttggttgtaccaccctaatgtattttcacaaattctgttgatctggaaacattatctctgcaaactgctcaccgttacttctgttgcgcctgctctttcgccttccagtacgaaaagcaccgtaagtctccaaaatgcagatgaatggagaagtggaccgcgttggcgagggatccaagaatattggatcactttcctccaagcgatggccgcagtcacaagtgaattccccagcaaaccgatcagttataccagcaccaatacttccgccaaaacctattatcttaagtccgtgaaaaagcgggtgaccacgtgtttccagcagttgcgcgataaactccagtcatccggttcctttcgcaagagttcctccagctgcctcaaccagatcttcgtaaggtccgatttctccgcatgcggcgaacgctttcggaagatcttcaaatcggcgcgaaaaaccgaattgccggagttgtggaaggtgccattggtggcccatgaactcaccagccggcagagcagccagcagttgcaagtcgtagccagactcttctcgtccactcagatttccaccaaggaaatcacctacaacagcaacagcaacaccagcgagaacaacatgaccatcatcgagagcaactatatatccgtgcgcgaggaatatcccgatatagatagtgaggtgcgcgccatattgctgagccacgcccagaatggaatcacgatatcgagcatcaagagtgagtagctttatgtttgaaagctttcttctttccagaagtttcgacttcatcaaacacttcagaactttctctaagtggctatatttagttagaaatctaaaatgtataaatttttagtaggttattaaattttatttggattatataacttttatagtttagtatatttattttaatttatattttttctatgtttcttttttgtaagattacccttaaataattctataattgaaattcgccaggtgaatatcgaaaactgacgggcaatccatttccactgcacgacaacgtgacggatttcctgctgaccattcccaatgtgaccgctgagtgcagcgagtccggtaagcggatcttcaacctgaaagcgagcctgaagaacggtcacctcctggatatggtgctcaaccagaaagagcgcaccagcgactacagcagcggagctccgtccctggagaacataccacgagcacctccacgctactggaagaatcccttcaaacggagggctctgtcccagctgaacaccagcccgaggaccgtgcccaagataacggatgaaaagaccaaggatatcgccaccaggccggtttcgctgcatcaaatggccaatgaggcagcggagtcgaactggtgctaccaggataattggaagcatctgtgagtactgaaaaggtgttttgtagacagtgcaactatagcaaaaataaacctttacttaacaaaatgtactaatctttctactgaactcctagcaacaatttctaccagcaagccagcgtaaatgcgccaaaaatgccagtacccatcaacatctacagccccgatgccccagaggaaccaatcaatttggctccacctgggcatcagccaagctgcagaacccaaagccagaaaaccgaaccgactgaaaaccgccatttgggcatctttgtgcatccatttaacggcatgaacataatgaagagacgccacgaaatgacgcccacgccaacgattttaaccagtggaacctacaacgattctctgctgacgattaactcggattacgatgcctatctgctggactttccgcttatgggcgatgattttatgctatatctcgcccgaatggagctaaaatgccgatttaggcgtcacgaacgcgtcctgcagtcaggactttgtgtatccggactgacgatcaatggcgcccgaaatcgtttaaaaagagtccaattacccgagggtactcagatcatcgtcaatatcggatcggtggacattatgcgcggcaagcctttggttcagatcgagcacgattttcggctactgatcaaggagatgcacaatatgcgattggtgccgattctaacaaatcttgcaccgctgggcaactattgtcacgataaggtattatgtgacaaaatctaccgattcaacaagtttatccgaagcgaatgctgtcacctaaaggtcatcgacatacactcctgtctaatcaacgaaaggggcgtggtgcgatttgattgctttcaggcgtaagactttataccatataccatatcatatgagtttacgatttgtgccacttttcagctcaccacgccaagtcaccggttccaaggaaccctatctgttctggaacaaaatcggtcggcagcgcgtactgcaagttattgaaacgagtctggagtattaagttgggttcttaatcaagatacatatatgcaaattttgactgggctggcaccggaaccgacaaaataagaactttttgatgattttacgatttacgctgatggatcgctgcttttacggaattcgcttagttttaatatgttttatatgtagtatgttctctgtctttgtttatttatatgttcgtgcacttgtcctagtccattattgtatattattgtgtgttttgtgttctatgttagatttaaacttctcaatttttcgctgtctgtgatttgttttgccaatgccattgattttctgcacactttttgctgctatcccaaaagctgtgtaaaataatcaaatgcaaaataagcgcaagcagctgaaaacttctcttcaaacttttccgcttttcccaaaaccattttgctttgaaatctgtttttaccaaatcagattaaactgcaaaatggaacttaaatgcaaatcattgcaatgcttataaactgttttttgttctatatacttttgtgtgggtcaaaattcggcatgctcctgtatcacacaacctgccacttgcccttaaaaagaagggcgcagtgggcgtggtacgtatacatatgagccatgctgcattttggccgtaatgaaaatgcactgctttacttggaaaattcgcttgcacaaaatcaacgccgcggctgatttattattgatgtgctcaagcaaattcaagtgaagcatttgcgcgattttcgtctttctgtttccgtttgcaaaaaagtttataaaatgcttacactctgctgcagacacgccaaccggaagtgcgcactaagcgcttgtttgtagcacagtgtagaattctggcgtaatttacagctctactttaaagtcttctagatagctatctactatttataaacttatttattgtcttgaatgtatgttaattgtatgtattgatggtgatcacgttttttttgtcctataacaagctgcaatgtaaaatccaaaaaaaaaatgaaaaaataaaataaaagggaaatcaatgattttgtttgctctaagctatgttcaaagtaactgggaactaatcgaactaatttcgatttaaaagtggtctagattatattgtgacatttgtgaatatattattatatttgcgaatttattattatcataaaaataacggtagttgaaaaataatttagatggcatgcaatattaaaagttcccgccaaattggcttgaatctttgctaatatattacagtttccaaccttgcattaagttcacgatagtttttcggcattttcgattgtaaaagcataaaaaagtccctgctatcgaagctctaccacctccatcagcaggcgacggcaaaaaaatcttgaaatgtaagcagtaacgtcaaaattcgctttcaaatcgttaaacgtacgttctcattcgatttcagaacaaaatggcttcattcttggcacgaactggcggccccctgatcgaaaccgttaggccagcggccataaaaaaggtgagttcgccaattagtagtcatatttgtgtgtaaaaaatgcgaaaatccgtcgctttacataataaggcgaaaagagagagtgaacacctacgctgtccccttctctgtctctcacttactcacacatgtgaaatgctgatcgtttatcggtacaaaaaaaaaacttaagcgataatttaagttctttgccatttgttaactaattgtttctccagagaa

SEQ ID NO: 27686 - DNA, 2565 bp, DROSOPHILA
gatggccgcagtcacaagtgaattccccagcaaaccgatcagttataccagcaccaatacttccgccaaaacctattatcttaagtccgtgaaaaagcgggtgaccacgtgtttccagcagttgcgcgataaactccagtcatccggttcctttcgcaagagttcctccagctgcctcaaccagatcttcgtaaggtccgatttctccgcatgcggcgaacgctttcggaagatcttcaaatcggcgcgaaaaaccgaattgccggagttgtggaaggtgccattggtggcccatgaactcaccagccggcagagcagccagcagttgcaagtcgtagccagactcttctcgtccactcagatttccaccaaggaaatcacctacaacagcaacagcaacaccagcgagaacaacatgaccatcatcgagagcaactatatatccgtgcgcgaggaatatcccgatatagatagtgaggtgcgcgccatattgctgagccacgcccagaatggaatcacgatatcgagcatcaagagtgaatatcgaaaactgacgggcaatccatttccactgcacgacaacgtgacggatttcctgctgaccattcccaatgtgaccgctgagtgcagcgagtccggtaagcggatcttcaacctgaaagcgagcctgaagaacggtcacctcctggatatggtgctcaaccagaaagagcgcaccagcgactacagcagcggagctccgtccctggagaacataccacgagcacctccacgctactggaagaatcccttcaaacggagggctctgtcccagctgaacaccagcccgaggaccgtgcccaagataacggatgaaaagaccaaggatatcgccaccaggccggtttcgctgcatcaaatggccaatgaggcagcggagtcgaactggtgctaccaggataattggaagcatctcaacaatttctaccagcaagccagcgtaaatgcgccaaaaatgccagtacccatcaacatctacagccccgatgccccagaggaaccaatcaatttggctccacctgggcatcagccaagctgcagaacccaaagccagaaaaccgaaccgactgaaaaccgccatttgggcatctttgtgcatccatttaacggcatgaacataatgaagagacgccacgaaatgacgcccacgccaacgattttaaccagtggaacctacaacgattctctgctgacgattaactcggattacgatgcctatctgctggactttccgcttatgggcgatgattttatgctatatctcgcccgaatggagctaaaatgccgatttaggcgtcacgaacgcgtcctgcagtcaggactttgtgtatccggactgacgatcaatggcgcccgaaatcgtttaaaaagagtccaattacccgagggtactcagatcatcgtcaatatcggatcggtggacattatgcgcggcaagcctttggttcagatcgagcacgattttcggctactgatcaaggagatgcacaatatgcgattggtgccgattctaacaaatcttgcaccgctgggcaactattgtcacgataaggtattatgtgacaaaatctaccgattcaacaagtttatccgaagcgaatgctgtcacctaaaggtcatcgacatacactcctgtctaatcaacgaaaggggcgtggtgcgatttgattgctttcaggcctcaccacgccaagtcaccggttccaaggaaccctatctgttctggaacaaaatcggtcggcagcgcgtactgcaagttattgaaacgagtctggagtattaagttgggttcttaatcaagatacatatatgcaaattttgactgggctggcaccggaaccgacaaaataagaactttttgatgattttacgatttacgctgatggatcgctgcttttacggaattcgcttagttttaatatgttttatatgtagtatgttctctgtctttgtttatttatatgttcgtgcacttgtcctagtccattattgtatattattgtgtgttttgtgttctatgttagatttaaacttctcaatttttcgctgtctgtgatttgttttgccaatgccattgattttctgcacactttttgctgctatcccaaaagctgtgtaaaataatcaaatgcaaaataagcgcaagcagctgaaaacttctcttcaaacttttccgcttttcccaaaaccattttgctttgaaatctgtttttaccaaatcagattaaactgcaaaatggaacttaaatgcaaatcattgcaatgcttataaactgttttttgttctatatacttttgtgtgggtcaaaattcggcatgctcctgtatcacacaacctgccacttgcccttaaaaagaagggcgcagtgggcgtggtacgtatacatatgagccatgctgcattttggccgtaatgaaaatgcactgctttacttggaaaattcgcttgcacaaaatcaacgccgcggctgatttattattgatgtgctcaagcaaattcaagtgaagcatttgcgcgattttcgt

SEQ ID NO: 27687 - protein, 606 aa, DROSOPHILA; identical to SEQ ID NO: 22692

SEQ ID NO: 27688 - DNA, 3017 bp, DROSOPHILA
gcttcgtgttgtttttgatgtgaagagaaattatttgttctctgaaaaatgtaacttggttgtataagcaaatactaatactataaaaattaaaaaagctgtaaacaataaattcaaaattgcgatgcttatttgaggacaattttgtttgcgtacttatggtctattgtattttataacaaggtatcactgtaacaacgttaattaagacactaaggcgccattcgggctttttacgaactggcaaataagaagtttcgctgcatacttttcggcgggtaaatgtgatgtaattgcgttatcgcatgcgatttccccttttgcttggttagaaaatcgacagcaatcgcttctctgtttttcccagcaatattttgttggtctttgccgccgcatgagctcctaattagcccgcaatgagttgtcgatacgccagttgcgagtacatgaaattcggtttggtttttgccctaccctgacataacaatttcggcttgtctaattgggagggcctcgtctgcacctcctgtaaagtgttctttcggtttgagttgctctctaattgcatttccaacgatgcctaaccattttgtgtactctcatcaatgcgggaaaagggtgacaagcgaggaggcgaagttaaagggttgaattgccaacgagacagataataagccgcttgccagggtctcgttaatttgtgggtggcccaaaactggcacaattatctggcatgtgaggaaaattatagaggtgcgttaattggccaaaggtgttggcctgttaactgccacaattaaaatcaatgccacgacgacccaaatccgcaaggcaacgcgcagttgtgaacatttccatggactggatctctcctttggttgaaagaactatggtcaagtggaggacctctaagaattatcttttgggaaaaagtcttgcttgttgtggaaggctttgttgtggatgtcaactccataaaaacccccacatacgaatttggctcgtttccaaccatacactctcaattcacatctctttttcccaaacatacttattatatcttccaattgtcctgttccacatggcgctggtttacggggttgaaaagaagacggtacccacccacatgaaattcgtgatgggcggaacctccggaatgctggccacatgcattgtccagccgttggaccttctcaagacccgaatgcagatatcaggaactttaggcacacgcgagtacaagaactcatttgaggttctatcgaaggttttgaagaacgaggggatattatccttgtacaatggattgagtgccggactattgagacaggccacgtacacatcagccaagatgggtgtttaccagatggagttggattggtatcgcaagaacttcggaaattatccatctatggtggccagtatgacgatgggcattgtggctggcgcctttggagccatgtgtggaaatccagcggaggtggccctgatccggatgatgtccgataaccgcttaatgccggaggacaggcgtaattacaagaatgtgggtgatgcctttgtaagaattgtgaaggatgagggcgtggtggcgctctggagaggatgcttgccgacagtgggtcgtgccatggtcgtgaatatggtgcagcttgcctcctattcactgatgaagaaccaattgcatgggtatctcagtgaaggaatacctcttcacctgaccgccgccctggtgtctggtttgctgacctccgtgacctcaatgccactggacatggccaaaacacgcatacagcagatgaaggtgatcgatggcaagccggaatacagtggtaccatcgatgtactgaaaaaggtgctgaaaaatgaaggcgcctttgccgtgtggaagggtttcactccgtatctaatgcgtatgggtccacacacgatattttcatttgtcttcttggagcaaatgaataaggcctacagcaagcatatgctcagtgattcgctatccgattcggtaccttaaaggcatagaaaatatggcattcctcatcccaaacaaatggaaattgatacgatgtctgtgtaaagcgcgcttgttctgtaaagtaattcatatcttatatacaacaaaaaaatagtttattatgcaagaatgaatttaattaatccaaatcatgggaatggtgtggtttgatatataagagaatcgactgatttcctaagaatttttattacgaaaatatggtatctaagaaggcatcaaaacacctctcattcaatcctaacatggatttccattcattcagccttttaaatctagtttcggcttaaataaatttcttaaattcgaatttctaaaccgtttgtgagtggccatggcgtacagcatcgaaaagaaatccatacccggctacatgatgtacattaatggcggtctggccggaatgctgggcacctgcattgtgcagccattggatttggtgaagaccagaatgcagatatcagccacgacgggcgagtacaagagctccttcgattgcctgctaaaggtttttaaaaacgagggcatacttgcgttgtataatggattgagtgcgggattgatgcgacaggctacgtacacgacagcccgaatgggtttctaccaaatggagatcgacgcctatcgcaagcagttcaatgcaccgcccactgtgttggccagcatgggtatgggcattctggccggtgctttcggtgccatgttcggcaatccggcggaggtggccctcatccggatgatgtccgataaccgattgccaccagcggagaggcgaaactacacgggtgtgttgaacgcctttgtgcggatcgtcaaggatgagggtgttatcaccctctggaaaggatgcatgcccactgtgggtcgggccatgatcgtcaacatggttcagctggcctcgtactcgcagttaaaggcagcattttcggaatacttttcgggactttcgcttcacatcgctgccgccatgatgtccggtcta

SEQ ID NO: 27689 - DNA, 1017 bp, DROSOPHILA
ctcgtttccaaccatacactctcaattcacatctctttttcccaaacatacttattatatcttccaattgtcctgttccacatggcgctggtttacggggttgaaaagaagacggtacccacccacatgaaattcgtgatgggcggaacctccggaatgctggccacatgcattgtccagccgttggaccttctcaagacccgaatgcagatatcaggaactttaggcacacgcgagtacaagaactcatttgaggttctatcgaaggttttgaagaacgaggggatattatccttgtacaatggattgagtgccggactattgagacaggccacgtacacatcagccaagatgggtgtttaccagatggagttggattggtatcgcaagaacttcggaaattatccatctatggtggccagtatgacgatgggcattgtggctggcgcctttggagccatgtgtggaaatccagcggaggtggccctgatccggatgatgtccgataaccgcttaatgccggaggacaggcgtaattacaagaatgtgggtgatgcctttgtaagaattgtgaaggatgagggcgtggtggcgctctggagaggatgcttgccgacagtgggtcgtgccatggtcgtgaatatggtgcagcttgcctcctattcactgatgaagaaccaattgcatgggtatctcagtgaaggaatacctcttcacctgaccgccgccctggtgtctggtttgctgacctccgtgacctcaatgccactggacatggccaaaacacgcatacagcagatgaaggtgatcgatggcaagccggaatacagtggtaccatcgatgtactgaaaaaggtgctgaaaaatgaaggcgcctttgccgtgtggaagggtttcactccgtatctaatgcgtatgggtccacacacgatattttcatttgtcttcttggagcaaatgaataaggcctacagcaagcatatgctcagtgattcgctatccgattcggtaccttaa

SEQ ID NO: 27690 - protein, 311 aa, DROSOPHILA
MALVYGVEKKTVPTHMKFVMGGTSGMLATCIVQPLDLLKTRMQISGTLGTREYKNSFEVLSKVLKNEGILSLYNGLSAGLLRQATYTSAKMGVYQMELDWYRKNFGNYPSMVASMTMGIVAGAFGAMCGNPAEVALIRMMSDNRLMPEDRRNYKNVGDAFVRIVKDEGVVALWRGCLPTVGRAMVVNMVQLASYSLMKNQLHGYLSEGIPLHLTAALVSGLLTSVTSMPLDMAKTRIQQMKVIDGKPEYSGTIDVLKKVLKNEGAFAVWKGFTPYLMRMGPHTIFSFVFLEQMNKAYSKHMLSDSLSDSVP

SEQ ID NO: 27691 - DNA, 14727 bp, DROSOPHILA
atagcaactatgtacgtgcatgtatacactccttaaaactgcaaagttaatagaaccctctaaaaatatcaataactgcatttaaatctatgagaaaaccgtacatatatcgaatgcaaagtaaaatcaaaaatatatacacaaaacagtttaagaaactctttccgcaagctcacaattttccacatatataaatttttcacctttttaaagcacttttttatttactttaattgattggataaagtacccaactcacttcccaaaaacggccaataagacgattgtaacataagcctatgcctaaactcaaatttttgtcagcttaagaagggttatttgaaaaataacgcaaacattttcaataaaaccaaatatatacatatatatacctatatgcgactgtacatgtgttttttagctagctaaactaactttataccgtaaaataatagaacaattgaataaatattaactaacgttggacgcaacactaaattacaacagatagaactcgatttgaacctattactgctcgaaatgctgaaacattataaacattaagtattgctggaaaatatgtataatttgcacagagccaaacaggcacactcaaacggaattaactcaaaacccaagctacaaaaccatctgaaatatttaatattgataatttgtaatgcattaacaacaacattaaataaactaataatacttactgaactgaatctgttttaaaaatcatttatatttctaattggaacacttagaccatataaaataatagcatcaaatgagatagaacgaaatgaaggccaaatatttttggaatttttaaacgctcctgtgagcgcgcgcatttacttgtggcttatggtcaccctaatgaattcagtactagttggtctgatgccatcactatttgaaaataagcgatatatcgataggatgtaattgttatcacttataaaagcgtttcggtattgtgaaagaaatggaaggcggtacacacacaatataaacatccaaataacagcctgtaagcccttagaaaattcccataaaaaaagaaacagtgcccgttttgtaaagccaaaccatccaaattgttggaagagaaggaagtgaacgtctcaggaactgaaaaaaacaccaaggataacgaacaaagatgccactcaaccaattgccactccccaagctcaacgaaaagctgccctatttagttgctgaaatgcagtaaaaaacgcataaacaactgttaaaacaccacaacaagatgacccagaagccaggcgagtgggctagcgcccttttggcacgtttcgaggatcaggcaagtgttttccaatcgcttttccgcagttgcgttttcgcaagcgaaaaaatgtacctgctgctctgcctcttcctcccccacacatgctcacagcgaccttgcgagtgtgcgtgcctcacccgctctgtcagtgtgagctctcaatcaaatgcgtgggagagcgagatagcaacaataacaaaaacaccggttcccgcatgaatgaagtggaattgagcaatcaatggtttactttttcagctgccaaacagaatcggtgcctatggcacgcaggccaggatgagccaggaccaattggtggcctgtctgatccacatatcgcgctaccgcttctcccttgtcatatccggtctcaccaagatgctgcagagggtcaatgaggcggtaagtactccattctctattgttaacccttaaactatgttgccttattttatggggctaggatacgattaaattacttaaacaaaaatttcattgcaggcccttcaaaatcgccatgagccagagcgttgctactttgagtcgctggtcatcatactgaccactctggaacgctgtctgaccaaccagaccaaggacacagcacgttttgaagaggccatgaatgtgaagcttctgctgcgcgagatctcccagtttgtcgacgtccagagcgacagcaatccgaatgccgcccagctcaaggccctggcatccaaggtgctctttgccttgtcccagaatcacttctcggcggtgttcaatcgcatatcggccaggattcaagagctgacatcctgttccgaggaaaacccggactacaacgacatagaattaattcaacacatcgatatggatatgataaagctaaccaagctgctacaaggtaaactaacttttttaatatttcggaaaggttaaacaacgttttacgtttccagaaaccatcacaaagtttcgatcgaagcgtgctccacctttgatcttgctttactcgctggagaaggctatttggaactggatcgagtaccatccacaagagttccaggacttgcaacgaggaaccaatcgagatatatcaacgtaagaggaattacaagcgtttttaaagtcacattaattgatcctgtttcgtttagctgctgggaacccctgatggactttgtagagtactttaaaaccgaaaacaagaaaagcaagactcttgtttggccgcttcaaatgctcttgctgatattgaatccctcttgccttgaggctgttgttaacgaacttcagcagtcggagaaagagaaggaaaaggacaaggaaaaggttgcctcgaagtcagcgcaatccacgtcccgggacaaggacttctcggccaagcagttcatcgagagtatcaagagaggcttgggccagcactcaccatccaaacaggtgaccgaatctgcggcaattgcctgtgtaaagctgtgcaaagcatccacctacatcaacaacaccgactccaataatgtggtcttcaagttggtgcaattctttatcaacgatctcaaggcactgctctttaatccagcaaagcccttttcgcgcggtcaggggtacaacttcgctgatatcgagctgatgattgactgctgggtgtcttgtttccggattaatcctcacaacatcgaggctctaaaggtttgcctgaatttgtcctcgccgcaggcttaccattttgtaattgtgtgctctctgctaaggtaatttacttgggtagctatataaaactcttgacttttacatgtatactttccattataggttggctcacatatacgttgacttccgtttgcagaacaagaacccctttcgaatagtaaaccaaccgagattgtcttggtggccgcaaacggatgtggttcactaccgttctgctgagctacgagctttgtttacggatacgctcaacaaggccacccagggttatatagcccatacgccactgcgctacataacctccctgacgctcaaatctaaagatacccagaaaggtttaacccgcgctgaagagggtcccgcccacaaaatgctattactgctactcgtacggctaattcatgcagatcccacgcttttgttgaatgtgagttatttgataatttgatcgataatagtctcatatttaacaattgttttgtaatatagacccaaggaaaagtggcacatgaagtgcagagctccacattggagctcatcaacggcttagttagtttggtgcatcaaactaccatgcccgatgtggcacaagaggctatggaggcgctgcttgctctgcacgccccggagaaaatagaggtttggaatccagaggctccgatcaatacgttctgggacgttagctcccaagtactgttttcaatctcgcaaaagctcattcaacaccaaattgccaattacactgatgtcttaaagtggctacgcgagatcctcatctgtcggaatacttttcttcagcgacacaaggattatgcacatgtgggaagtcagattgccatttgcaagcaggctcacattaagatggaagttgttttcttcatgtacctgtggagtgttgatttagatgcggtgctgacatcgctatcgtgttttggactactatgcgaggaggctgagatttgctgcagttctgatgaattgacagtcggatttattatgccgaattaccacatttaccaggagctggctcagttgtccacatgtgagtttggtaaattcatcatacatatttttattaataataatttcgttttagctgcaacggactctcgcatttgcttttttgacaacacgcacggcaatgtgctgagccgtcttacacttcaaaagcgcataatgaccctattgcgcaagatcgagcactgtgttcatggtgttcagcccgcctgggaggaaaccttccgcaactgggaagtatccagcaaggttttgcaaacgtaccccaaatgtaaaggagaagatggccaagcggaggttttccatcgtggcatgggcaagcggcgagcgagtcaccaaagctcagagcacgatttggaggaacaaattaatgaatgggccaatatgacatggtttctattagccttgggtggcgtctgccttcataaacgtagcagcagtcgtcaaatgctgctgcagcaatcacagaacaatgcttctttgggatcacttgctcaaaactctctttactcaagctccacaagttctggacatggctctctgcatcctagcacggtttcactatccactcttcccccagcaccgccacaagatgtcagctattgtcctgtaacacagtaaggttttatttattttaacatgtcccatatataacctataactttaatttagattcgtgggccaactattgcgcctgttagtttgcagcaacgaaaaaattggacttaatattcagaaaaatgtgaaggaactggtgggcgaggagatgtccacccaactgtatcctatactcttcgaccaggttagagccatcgtggagaagttcttcgatcagcaaggtcaggtgaacgtcaatgtgaccgacatcaacacgcagtttatcgagcacaccatctacataatgaaatcaattctggatcccaaagccaacaaggatcccaacaacgatcaaccctcgccatcggaacatttaggtgttacaagcatcgaaggcatgatgctaggaatagtgcgctacgttcgccacctggatatgactgtttatgccattcgaatcaagacaaaattgtgccagcttgtggaagtaatgatgaagcgacgcgacgacctcgcctttcgccaggagatgaagttccggaataaactggttgaatacttgaccgactgggtgatgggcacctcccatcagattgcaccgcccagctcggcggatgccgctattcttaccaacacatccctcatatttcgcgatctagaccaagcctgcatggaggcagtggctgccttgcttcggggccttccccttcagcctgaggaatcggatcgaggcgatttgatggatgcaaagagtgcgctctttttaaagtactttaccctatttatgaacctgctgaatgattgcatcgatagctccgaggcggagaaggaaatgaataataccccactattgcctccgcgccctcgaatggcagctggaaaactgaccgctctgcgaaatgccactattctagccatgtctaatttgttgggtgccaacattgactctggtttgatgcactccatcgatctgggttataatcctgatttgcaaacgcgtgccgctttcatggaggtgttgactcaaatcctgcaacaaggcaccgaattcgataccttggccgaaactgttttagctgatcgatttgagcaactggtccaacttgttacaatgatcagcgacaaaggagaacttcccatagcaatggctttggctaatgtggtgactacatcccaaatggacgagctggctagggttctggtcaccctattcgacgccaaacacctgttatcgccactcctatggaatatgttttatcgcgaggtggaggtctcagactgcatgcagacacttttccgtggaaattctttgggcagcaaaatcatggccttttgctttaaaatatacggcgcgagctatctccaaatgctactagagcctttaattcgtccgcttctggatgaggaggaggagacctgttttgaggtggatccagctcgtctggatccaacagaagatattgaacagcacaggaacaacttgattgccctaacgcagaaggtgtttgacgctattatcaactcgtcggatcgctttcccccgcagctgcgatccatgtgccattgcctgtaccaagtgctaagcaaacgcttcccgaatcttcttcaaaacaatatcggtgctgtaggcacagtcatcttcttgcggttcatcaatcccgccataggtaagattatagaaaaattctagaatacctcttattaatatttgctttgttttcagtttccccacaggaattgggaatcgttgacaaacaagtgcacagctcggccaaacgaggtctaatgctaatgtccaagatccttcaaaacattgctaaccacgtggagttctccaaggagcagcacatgttgtgtttcaacgattttctgcgcgatcactttgaagctgggcggcgattcttcatacagattgcatcagactgtgagaccgtggatcagacctcgcacagcatgagttttatttcagatgcgaacgtactggcactgcatcggttgctgtggacgcatcaggagaagatcggcgactatctgtctagcagtcgagaccacaaggcggttggaaggcggcccttcgacaagatggctactttgctagcatacctgggaccaccggagcacaagcccgtggattcgcacatgatgttcagctcgtatgcacgctggagctccattgacatgtcgtcgacaaacttcgaggagatcatggtcaagcaccaaatgcacgagaaggaggaattcaagaccctcaagtcgatgaacatattctaccaggccggaacaagcaaatctggctatcctgtcttttactatatagcaagacgatacaagtaagtgaatcgcattttatacatatttaacttagtaactaactctatttcaggattggagaaacgaatggagacttacttatatatcacgtcatactcactctgaaaccattctgccactcgcccttcgaggtggtcatcgattttacgcacacctgttcagataatcggttccgcaccgagtttctgcagaagtggttttatgtcctgcccacggtagcctacgaaaatgtccatgctgtgtacatctataactgtaactcgtgggtgcgcgaatataccaagttccacgatcgcattctggcaccattaaagggaaatcgcaaacttctgttcctggagtcacccaacaaacttactgatttcatcgacgcggagcaacagaaattgcctggagcaactctttccttggacgaagatttaaaggtattcagcaacgcgctgaagctcagccataaagacacaaaggtggctatcaaagtgggtcccaccgcattgcaaattacatctgccgaaaagacaaaggtcttggctcactccgtgctcctgaacgatgtatactacgcctctgaaattgaggaggtgtgcttggtggacgataaccagttcaccctgtctataactaacgaaagtggccagcttagctttattcacaacgattgcgacaacattgttcaagccatcatacacatccgaaatcgatgggagcttagtcagccggactccgtgacggttcaccaaaagatccgaccaaaagatgtgcctggaacgctgctgaacatggcgctactcaatctgggatcatgtgaccccaatctaaggactgctgcctacaatttgctgtgtgctttgaccgctacttttgatctaaagattgagggtcaactgttggagacccaaggactttgcataccctcaaataataccatatttatcaaatccgttagcgaaaagctggccaccaatgaaccgcatctgactctggaattccttgaggagtccattcagggcttccagcgcagcaccatagagctgaaacatttgtgtttggagtacatgacgccatggttaaagaacctagtcaaattttgcaagtccaacgatgactccaaaaagcttaaggtctcccaaattctggacaagctcatcaatttaactattgaccaaaaggaaatgtatccctcagtgcaggccaagatctggggatcaattggacagatccccgagctgatcgacatggttttggataactttttgcacaaatcgatcacatatggcttgggatcaccacaggtggagattatggctgacacggcagtggctctcgcttcagcgaatgttcagctggtgtccaaaaaggtcataacgcgaatatgccgagtcatggacaaatcctgcacaaatcccacacaatatctggagcagcatatgatgtgggacgatattgcaattcttggtcgatacctgctcatgttgtcgttcaacaattgtttggatgtggccacatcggtgccatatctattccacaccattacgtttttggtatgttcaggatccctgtcgatgcgagcctctactcatggcctagtgatcaacatcatccactcgctgtgcacatgcacaaatccctcattttcagaggaggcgcagcgagtactccgactgtccctggatgaattctcactgcccaagttctatctactcttcggcatcagcaaggtcaagtccgcagcagttaccgctttccgctccagctgccgtcaccctacagataaatggctaggaaatgaaagggttacccagcctctgcccgccgatcgagagcgtttatccctaccatcgcttgaggttatcacggatgccctgctggaaatcatggaggcttgcatgcgagatgttccggactgcgaatggctcaacacctggacctctttggctcgcagttttgctttctgttacaatccagcgctacagcctagagcccttatagtttacgggtgcatcagcaagagtgttaccgatcacgaggtcaagcagttactacgcatcctggttaaggccctcgaatctttcaacgatctcattctgatcgaggctctagtaatgtgcttaactcgcattcaaccactactccgaccagagtcgcccattcatcgggccctcttctgggtggccatttcggtgctgcagttggacgagattaccctgtacggcgctggactagctctgcttgaacaaaatctacacacgcttaagtcacagggctgttttgacaagaaggagaccatagccgaggtcatgatgaagacaagggaaaagctggagtggcatttcaagcaactggatcacgccgtcggcctctccttccgcagcaatttccactttgccctagtgggacacttgattaaggtacgttttgaactaaccgaacttattcttaatctacggatatcataatttacagggcttccgccatcctacacctacaaccgtctcacgcacctctcgtgtgctgacgatgctcttgggcataatagccaaacccctgcatcgggacaagttcgaagtaacacctgacagtgtggcctatttgactgcgctggtggctgtctccgaggaagtccgttccagatgtcacgtaaaacatgcccttccccgctggccagccgatctgagtagtagtgtggaaaatggtgaagcatccggcggagtgcaagctgttagttgaaaaaaagaaatgaaatcatacaggggatcaatgacatttctgacattccttttagatcggcctgcccctgtcacgccgtcaaaaaagttgggacatcctggatcagtccgccttgcagtttgcccgccaacacaaggttcccactcttcaggtgagcttataagaactatccagccaagctgtaattcccacttgttcgaaatttgctgtgcaaaagttgttataaccatctgctatggtaacttttggctatctatttgagtttatatattcaaacctatatatcctatatatcccatctactatgtaatatcaactatctattgagatcagccgttgcataactaataatcgttcaatgatttttttctttctctttttatgtttgatttgaatataaaaaaaaaacgttacatataaatcacaatgtatactcgttgaaaccatatttatgccataatctgcctgccgaatcttacatctaattggtgcttgtaactctcatcaatatcgatattactatatgtcctatatgaactccaaacttgtaactgccacctgccacttctactactactactactactacgcatgaacattgtcatttgatttacgtttgatttggttaccgaaacccgctaaaactacaacatcaacactgtgcaaaatcaacaaccaccccgaacacaaaattaaactccgtagaacgcgcgagttttgttcaaaactcaacgctcattctcggtgccgacgaccaaagatccgaacaatgccaccggcatcgaagaacgtcaggtactgctcaacaaaacttatctcttagctaagactaactaactactaccccactaaatcaaatgtttaagtttgctactaaaacccatactaaaatgaggtcattaatgtttcgctgtaatgtcatttgttttggttactcttgcatggcaccgaatgaaggcagtcaaaaagccgtccagttcactatacccattgccaaaatgcacaattcggatatatcgtagatctttcatcttcactagtacttttttaccatatctgtgtgtaattaaatatcacatcaattgtattacaaatcaatatgtatttgaacaggaacgcggttcgcgttcgtcggtgtccaacgagtccaacgtactgctcgatcccgaggtcttacctgacctgtccattcaagccctggtactgactgttttggccaccttggtcaagtactcttcggatgaaggcgaaacgcgggttttgtatcagtatttggccgaaggatcggtggtctttccaaaggtgtttccagttatgtgagtctatacaattctaacgtttttcgacaaattttattttaatatgtttgataccgtagccattcactgctggaccaaaagataaacaacattttgtcagtgtcacacgaccaagtggtgctcaactctgtgcagaacattatacaaaatatgctggccagcgaagatccttcccagcagcagctgcacttcctgcagagttgtggatttggcggactctggcgatttgctggtcccttcaccaaggtgggtgctttaaatgcgtattccgaagaatatatgatttatttttgattgatttttagtacaatatgatgggtgagtcctcggagctgtttgtcaactgtttggaggccatggttgagacctgtttgccaggcgacgaatccgcgccggtgccaccatctccgcgtccatacaacctgagctccagtctgagtagcctgaccctgggatcacccacggataaaggttagtatcctgtagatttatctttagcttttgcccaagctataccgtaatgcattcattgctttaatctatagcgtttatttttcaatagcaagacccattgaatgaacacagatttttacaaacagtatttactcaaacttaaccttttctttatatcacaccaattgcgatatatagcattctcatcggaatcattagatttttatgacaattgcccaggcagcgtcagcagcctgcgacgcgcctcacacagcaaatcacgcgccaaacatcgaattaacgacagtccatcacattgaacgttccacaagtaaaatacgaaaatattcaaactgcaacttaagacaacataagaatagctgaaaacaatgcaacaaaataacaccatgattgggaaacatatgtatttcgtagttatataagctttgccaaatggaattattgtcccaacactccaaacgatttcacttttgtaatatcgaacacaatatccaatatgcaaattgttaatctcaaaaaaaaaaaaaatccaatgaatttacactagataatgcaccttatcctacacgcattagcaaattgatgttgaagatttgagaattatattgatgataaatctggtaccttgaagcatttacaacatattttcgacataatgtaggtgaattgaaagcaccttttgtagcgtagagtagtgttgtcataaatatttgttgttcaaaaattaaaacacacagtcaaaaaaaaaataattcacgatagctaaattaaaacaaagacccaaaatatatttctgataaatgcatgccaagagtatataaaactaatgcaagttaaaatagctgagaacctttagttatcggtagctgctaatttagctaaaaacaattactaggcacagaaaatacatcaagattttatatattttcattgacaactatattttatacgagccaatagataattgaagtaagtctaagtaaattgaataatcttcactgcttctttgccccaaatatcctttcgccccaatttgttcttccctcgatatgtttatgcaagttttgtcttactttcagctgcatgaataacaactacaaacccgcgcactagacgtaccacacttatcgcaaaagtaatgcgtttcctaaatctgcttaaaaagtgcttttagagaacgtgaaaacccccacagaatgtcgtacaaaatcatagaatatttatatatatatgtatgtatgtatgtatagaatgtccagaagcgatgaccactgaatgcgaaagaaggaaatgaacgcgtgtattgatgtatgtaaacagaatgtatatatttgtatgtgtagaagggagtggatcgaggatactataagcaccgtagaagaagatatcgaatggaaatatttttaaacgattaccgattgtacattttaatgcttgcaacccacaactgcaactaggcacaccaagtccaccagttcctcaaaggatgaccgcgaccaggcgaaacggagttaaccatgaaagcgattaaaggcaaaatcaaacgaaacgaatacaagaacaagaataacttaaagctttaagaagacggcatgttgcacatgtcgtttgcattactttgtattatagatgaatctccccgcagcaaatgtatctgatggcatttattttttttttttattctatataattttacttttaaaccaagttcacctctctcattagtccttactaatttatttcatcagcacattttccaagaaatttccgaaacaccaaaaactaatcgataataagcttaaaacgacccagtccgctttaaatataatttagttttaagcacaacaaagattttaatcgaaatagaaatgataagcgaaatgaatcgaaccaaaataaaaacttacgaacgttacacatttgtacctcttattaaacaataaacgaagcaaattagtccgttacacttactttctagcacatggattttaaactgtatttggcgttatccgcattaaacaagaacatttttttaaactagatgcgcaaaaatggaactggattctatacattattattaatctaaatgtatatgtgtgtgttgctatatgtgtattaaacgaatatgtatctttgtaaattacagccacttgaagatatttatgaaatgttaatgtcccaaatttatcaatgtacaacaatatcgaacaaatgaatatactttcaattaaaatgtttattgagtatcggaacgattcttttattgggaaagattaaaattcggaacgattcttaatttttgttttatgatccttgatcctcctcttctactttcaaaagtaggatgattcatcattgtcaacagattgaaatctctctcttaaaatctttccctcatggaaattggcgcaattgaaatccctgtttttgcatatggctgtcttccttaagtcgtcccaatacccatatcaaaacattgccactctgatgatctcagaaacctcccccacgaagaaaactggaaacgaaatgtacgaaatcagtgccatcagatgtcagcaaatgtcgccggtgccttgctgcactgtttgttaacttctcgatttcatggctgcgattgcagcgacccctggtcttggatttgaactggaactcaccctcgggcaggtggatttcgtcaatggccctatccccgaatacccaatctcgcaaaatgcgccaaacaagtgtcacagctgaccgaggccgaggaaccgggcaaccggcagcagaagtgcggcacaatcccaatacttgtgggaatgtctccagtacactttctcacgatgcacatgcaccgaccgacccatcgcagcaccggctgtttgccgcttgcctgggtggtgctatgctgccgtcccgttggtggtggtggttgttgcggtggttgctgctgctgcttctgctgctgatgatggtgctccgtgcccgtaagtgtaacgcaatgtcgcgccaaagaggaaatgaggtctgtgtgactgtgcgccaaaagggaagaggccacactgcaagaaaattcgaactctaaactagcaacttataaagatggcttataaagacttcgggattgcattgcttttaaagcaaagtaatgcaaattatagtttagttacagaatttaatatattatttatgcacattttgcatatttctgaatattatatttcagtttacaaaacaacattttttccagtgcacctgcacgcatacaag

SEQ ID NO: 27692 - DNA, 9739 bp, DROSOPHILA
ggcggtacacacacaatataaacatccaaataacagcctgtaagcccttagaaaattcccataaaaaaagaaacagtgcccgttttgtaaagccaaaccatccaaattgttggaagagaaggaagtgaacgtctcaggaactgaaaaaaacaccaaggataacgaacaaagatgccactcaaccaattgccactccccaagctcaacgaaaagctgccctatttagttgctgaaatgcagtaaaaaacgcataaacaactgttaaaacaccacaacaagatgacccagaagccaggcgagtgggctagcgcccttttggcacgtttcgaggatcagctgccaaacagaatcggtgcctatggcacgcaggccaggatgagccaggaccaattggtggcctgtctgatccacatatcgcgctaccgcttctcccttgtcatatccggtctcaccaagatgctgcagagggtcaatgaggcggcccttcaaaatcgccatgagccagagcgttgctactttgagtcgctggtcatcatactgaccactctggaacgctgtctgaccaaccagaccaaggacacagcacgttttgaagaggccatgaatgtgaagcttctgctgcgcgagatctcccagtttgtcgacgtccagagcgacagcaatccgaatgccgcccagctcaaggccctggcatccaaggtgctctttgccttgtcccagaatcacttctcggcggtgttcaatcgcatatcggccaggattcaagagctgacatcctgttccgaggaaaacccggactacaacgacatagaattaattcaacacatcgatatggatatgataaagctaaccaagctgctacaagaaaccatcacaaagtttcgatcgaagcgtgctccacctttgatcttgctttactcgctggagaaggctatttggaactggatcgagtaccatccacaagagttccaggacttgcaacgaggaaccaatcgagatatatcaacctgctgggaacccctgatggactttgtagagtactttaaaaccgaaaacaagaaaagcaagactcttgtttggccgcttcaaatgctcttgctgatattgaatccctcttgccttgaggctgttgttaacgaacttcagcagtcggagaaagagaaggaaaaggacaaggaaaaggttgcctcgaagtcagcgcaatccacgtcccgggacaaggacttctcggccaagcagttcatcgagagtatcaagagaggcttgggccagcactcaccatccaaacaggtgaccgaatctgcggcaattgcctgtgtaaagctgtgcaaagcatccacctacatcaacaacaccgactccaataatgtggtcttcaagttggtgcaattctttatcaacgatctcaaggcactgctctttaatccagcaaagcccttttcgcgcggtcaggggtacaacttcgctgatatcgagctgatgattgactgctgggtgtcttgtttccggattaatcctcacaacatcgaggctctaaaggtttgcctgaatttgtcctcgccgcaggcttaccattttgtaattgtgtgctctctgctaaggttggctcacatatacgttgacttccgtttgcagaacaagaacccctttcgaatagtaaaccaaccgagattgtcttggtggccgcaaacggatgtggttcactaccgttctgctgagctacgagctttgtttacggatacgctcaacaaggccacccagggttatatagcccatacgccactgcgctacataacctccctgacgctcaaatctaaagatacccagaaaggtttaacccgcgctgaagagggtcccgcccacaaaatgctattactgctactcgtacggctaattcatgcagatcccacgcttttgttgaatacccaaggaaaagtggcacatgaagtgcagagctccacattggagctcatcaacggcttagttagtttggtgcatcaaactaccatgcccgatgtggcacaagaggctatggaggcgctgcttgctctgcacgccccggagaaaatagaggtttggaatccagaggctccgatcaatacgttctgggacgttagctcccaagtactgttttcaatctcgcaaaagctcattcaacaccaaattgccaattacactgatgtcttaaagtggctacgcgagatcctcatctgtcggaatacttttcttcagcgacacaaggattatgcacatgtgggaagtcagattgccatttgcaagcaggctcacattaagatggaagttgttttcttcatgtacctgtggagtgttgatttagatgcggtgctgacatcgctatcgtgttttggactactatgcgaggaggctgagatttgctgcagttctgatgaattgacagtcggatttattatgccgaattaccacatttaccaggagctggctcagttgtccacatctgcaacggactctcgcatttgcttttttgacaacacgcacggcaatgtgctgagccgtcttacacttcaaaagcgcataatgaccctattgcgcaagatcgagcactgtgttcatggtgttcagcccgcctgggaggaaaccttccgcaactgggaagtatccagcaaggttttgcaaacgtaccccaaatgtaaaggagaagatggccaagcggaggttttccatcgtggcatgggcaagcggcgagcgagtcaccaaagctcagagcacgatttggaggaacaaattaatgaatgggccaatatgacatggtttctattagccttgggtggcgtctgccttcataaacgtagcagcagtcgtcaaatgctgctgcagcaatcacagaacaatgcttctttgggatcacttgctcaaaactctctttactcaagctccacaagttctggacatggctctctgcatcctagcacggtttcactatccactcttcccccagcaccgccacaagatgtcagctattgtcctgtaacacaattcgtgggccaactattgcgcctgttagtttgcagcaacgaaaaaattggacttaatattcagaaaaatgtgaaggaactggtgggcgaggagatgtccacccaactgtatcctatactcttcgaccaggttagagccatcgtggagaagttcttcgatcagcaaggtcaggtgaacgtcaatgtgaccgacatcaacacgcagtttatcgagcacaccatctacataatgaaatcaattctggatcccaaagccaacaaggatcccaacaacgatcaaccctcgccatcggaacatttaggtgttacaagcatcgaaggcatgatgctaggaatagtgcgctacgttcgccacctggatatgactgtttatgccattcgaatcaagacaaaattgtgccagcttgtggaagtaatgatgaagcgacgcgacgacctcgcctttcgccaggagatgaagttccggaataaactggttgaatacttgaccgactgggtgatgggcacctcccatcagattgcaccgcccagctcggcggatgccgctattcttaccaacacatccctcatatttcgcgatctagaccaagcctgcatggaggcagtggctgccttgcttcggggccttccccttcagcctgaggaatcggatcgaggcgatttgatggatgcaaagagtgcgctctttttaaagtactttaccctatttatgaacctgctgaatgattgcatcgatagctccgaggcggagaaggaaatgaataataccccactattgcctccgcgccctcgaatggcagctggaaaactgaccgctctgcgaaatgccactattctagccatgtctaatttgttgggtgccaacattgactctggtttgatgcactccatcgatctgggttataatcctgatttgcaaacgcgtgccgctttcatggaggtgttgactcaaatcctgcaacaaggcaccgaattcgataccttggccgaaactgttttagctgatcgatttgagcaactggtccaacttgttacaatgatcagcgacaaaggagaacttcccatagcaatggctttggctaatgtggtgactacatcccaaatggacgagctggctagggttctggtcaccctattcgacgccaaacacctgttatcgccactcctatggaatatgttttatcgcgaggtggaggtctcagactgcatgcagacacttttccgtggaaattctttgggcagcaaaatcatggccttttgctttaaaatatacggcgcgagctatctccaaatgctactagagcctttaattcgtccgcttctggatgaggaggaggagacctgttttgaggtggatccagctcgtctggatccaacagaagatattgaacagcacaggaacaacttgattgccctaacgcagaaggtgtttgacgctattatcaactcgtcggatcgctttcccccgcagctgcgatccatgtgccattgcctgtaccaagtgctaagcaaacgcttcccgaatcttcttcaaaacaatatcggtgctgtaggcacagtcatcttcttgcggttcatcaatcccgccatagtttccccacaggaattgggaatcgttgacaaacaagtgcacagctcggccaaacgaggtctaatgctaatgtccaagatccttcaaaacattgctaaccacgtggagttctccaaggagcagcacatgttgtgtttcaacgattttctgcgcgatcactttgaagctgggcggcgattcttcatacagattgcatcagactgtgagaccgtggatcagacctcgcacagcatgagttttatttcagatgcgaacgtactggcactgcatcggttgctgtggacgcatcaggagaagatcggcgactatctgtctagcagtcgagaccacaaggcggttggaaggcggcccttcgacaagatggctactttgctagcatacctgggaccaccggagcacaagcccgtggattcgcacatgatgttcagctcgtatgcacgctggagctccattgacatgtcgtcgacaaacttcgaggagatcatggtcaagcaccaaatgcacgagaaggaggaattcaagaccctcaagtcgatgaacatattctaccaggccggaacaagcaaatctggctatcctgtcttttactatatagcaagacgatacaagattggagaaacgaatggagacttacttatatatcacgtcatactcactctgaaaccattctgccactcgcccttcgaggtggtcatcgattttacgcacacctgttcagataatcggttccgcaccgagtttctgcagaagtggttttatgtcctgcccacggtagcctacgaaaatgtccatgctgtgtacatctataactgtaactcgtgggtgcgcgaatataccaagttccacgatcgcattctggcaccattaaagggaaatcgcaaacttctgttcctggagtcacccaacaaacttactgatttcatcgacgcggagcaacagaaattgcctggagcaactctttccttggacgaagatttaaaggtattcagcaacgcgctgaagctcagccataaagacacaaaggtggctatcaaagtgggtcccaccgcattgcaaattacatctgccgaaaagacaaaggtcttggctcactccgtgctcctgaacgatgtatactacgcctctgaaattgaggaggtgtgcttggtggacgataaccagttcaccctgtctataactaacgaaagtggccagcttagctttattcacaacgattgcgacaacattgttcaagccatcatacacatccgaaatcgatgggagcttagtcagccggactccgtgacggttcaccaaaagatccgaccaaaagatgtgcctggaacgctgctgaacatggcgctactcaatctgggatcatgtgaccccaatctaaggactgctgcctacaatttgctgtgtgctttgaccgctacttttgatctaaagattgagggtcaactgttggagacccaaggactttgcataccctcaaataataccatatttatcaaatccgttagcgaaaagctggccaccaatgaaccgcatctgactctggaattccttgaggagtccattcagggcttccagcgcagcaccatagagctgaaacatttgtgtttggagtacatgacgccatggttaaagaacctagtcaaattttgcaagtccaacgatgactccaaaaagcttaaggtctcccaaattctggacaagctcatcaatttaactattgaccaaaaggaaatgtatccctcagtgcaggccaagatctggggatcaattggacagatccccgagctgatcgacatggttttggataactttttgcacaaatcgatcacatatggcttgggatcaccacaggtggagattatggctgacacggcagtggctctcgcttcagcgaatgttcagctggtgtccaaaaaggtcataacgcgaatatgccgagtcatggacaaatcctgcacaaatcccacacaatatctggagcagcatatgatgtgggacgatattgcaattcttggtcgatacctgctcatgttgtcgttcaacaattgtttggatgtggccacatcggtgccatatctattccacaccattacgtttttggtatgttcaggatccctgtcgatgcgagcctctactcatggcctagtgatcaacatcatccactcgctgtgcacatgcacaaatccctcattttcagaggaggcgcagcgagtactccgactgtccctggatgaattctcactgcccaagttctatctactcttcggcatcagcaaggtcaagtccgcagcagttaccgctttccgctccagctgccgtcaccctacagataaatggctaggaaatgaaagggttacccagcctctgcccgccgatcgagagcgtttatccctaccatcgcttgaggttatcacggatgccctgctggaaatcatggaggcttgcatgcgagatgttccggactgcgaatggctcaacacctggacctctttggctcgcagttttgctttctgttacaatccagcgctacagcctagagcccttatagtttacgggtgcatcagcaagagtgttaccgatcacgaggtcaagcagttactacgcatcctggttaaggccctcgaatctttcaacgatctcattctgatcgaggctctagtaatgtgcttaactcgcattcaaccactactccgaccagagtcgcccattcatcgggccctcttctgggtggccatttcggtgctgcagttggacgagattaccctgtacggcgctggactagctctgcttgaacaaaatctacacacgcttaagtcacagggctgttttgacaagaaggagaccatagccgaggtcatgatgaagacaagggaaaagctggagtggcatttcaagcaactggatcacgccgtcggcctctccttccgcagcaatttccactttgccctagtgggacacttgattaagggcttccgccatcctacacctacaaccgtctcacgcacctctcgtgtgctgacgatgctcttgggcataatagccaaacccctgcatcgggacaagttcgaagtaacacctgacagtgtggcctatttgactgcgctggtggctgtctccgaggaagtccgttccagatgtcacgtaaaacatgcccttccccgctggccagccgatctgagtagtagtgtggaaaatggtgaagcatccggcggagtgcaagctatcggcctgcccctgtcacgccgtcaaaaaagttgggacatcctggatcagtccgccttgcagtttgcccgccaacacaaggttcccactcttcagaacgcgcgagttttgttcaaaactcaacgctcattctcggtgccgacgaccaaagatccgaacaatgccaccggcatcgaagaacgtcaggaacgcggttcgcgttcgtcggtgtccaacgagtccaacgtactgctcgatcccgaggtcttacctgacctgtccattcaagccctggtactgactgttttggccaccttggtcaagtactcttcggatgaaggcgaaacgcgggttttgtatcagtatttggccgaaggatcggtggtctttccaaaggtgtttccagttatccattcactgctggaccaaaagataaacaacattttgtcagtgtcacacgaccaagtggtgctcaactctgtgcagaacattatacaaaatatgctggccagcgaagatccttcccagcagcagctgcacttcctgcagagttgtggatttggcggactctggcgatttgctggtcccttcaccaagtacaatatgatgggtgagtcctcggagctgtttgtcaactgtttggaggccatggttgagacctgtttgccaggcgacgaatccgcgccggtgccaccatctccgcgtccatacaacctgagctccagtctgagtagcctgaccctgggatcacccacggataaagctgcatgaataacaactacaaacccgcgcactagacgtaccacacttatcgcaaaagtaatgcgtttcctaaatctgcttaaaaagtgcttttagagaacgtgaaaacccccacagaatgtcgtacaaaatcatagaatatttatatatatatgtatgtatgtatgtatagaatgtccagaagcgatgaccactgaatgcgaaagaaggaaatgaacgcgtgtattgatgtatgtaaacagaatgtatatatttgtatgtgtagaagggagtggatcgaggatactataagcaccgtagaagaagatatcgaatggaaatatttttaaacgattaccgattgtacattttaatgcttgcaacccacaactgcaactaggcacaccaagtccaccagttcctcaaaggatgaccgcgaccaggcgaaacggagttaaccatgaaagcgattaaaggcaaaatcaaacgaaacgaatacaagaacaagaataacttaaagctttaagaagacggcatgttgcacatgtcgtttgcattactttgtattatagatgaatctccccgcagcaaatgtatctgatggcatttattttttttttttattctatataattttacttttaaaccaagttcacctctctcattagtccttactaatttatttcatcagcacattttccaagaaatttccgaaacaccaaaaactaatcgataataagcttaaaacgacccagtccgctttaaatataatttagttttaagcacaacaaagattttaatcgaaatagaaatgataagcgaaatgaatcgaaccaaaataaaaacttacgaacgttacacatttgtacctcttattaaacaataaacgaagcaaattagtccgttacacttactttctagcacatggattttaaactgtatttggcgttatccgcattaaacaagaacatttttttaaactagatgcgcaaaaatggaactggattctatacattattattaatctaaatgtatatgtgtgtgttgctatatgtgtattaaacgaatatgtatctttgtaaattacagccacttgaagatatttatgaaatgttaatgtcccaaatttatcaatgtacaacaatatcgaacaaatgaatatactttcaattaaaatgtttattgagtatcggaa

SEQ ID NO: 27693 - protein, 2764 aa, DROSOPHILA
MTQKPGEWASALLARFEDQLPNRIGAYGTQARMSQDQLVACLIHISRYRFSLVISGLTKMLQRVNEAALQNRHEPERCYFESLVIILTTLERCLTNQTKDTARFEEAMNVKLLLREISQFVDVQSDSNPNAAQLKALASKVLFALSQNHFSAVFNRISARIQELTSCSEENPDYNDIELIQHIDMDMIKLTKLLQETITKFRSKRAPPLILLYSLEKAIWNWIEYHPQEFQDLQRGTNRDISTCWEPLMDFVEYFKTENKKSKTLVWPLQMLLLILNPSCLEAVVNELQQSEKEKEKDKEKVASKSAQSTSRDKDFSAKQFIESIKRGLGQHSPSKQVTESAAIACVKLCKASTYINNTDSNNVVFKLVQFFINDLKALLFNPAKPFSRGQGYNFADIELMIDCWVSCFRINPHNIEALKVCLNLSSPQAYHFVIVCSLLRLAHIYVDFRLQNKNPFRIVNQPRLSWWPQTDVVHYRSAELRALFTDTLNKATQGYIAHTPLRYITSLTLKSKDTQKGLTRAEEGPAHKMLLLLLVRLIHADPTLLLNTQGKVAHEVQSSTLELINGLVSLVHQTTMPDVAQEAMEALLALHAPEKIEVWNPEAPINTFWDVSSQVLFSISQKLIQHQIANYTDVLKWLREILICRNTFLQRHKDYAHVGSQIAICKQAHIKMEVVFFMYLWSVDLDAVLTSLSCFGLLCEEAEICCSSDELTVGFIMPNYHIYQELAQLSTSATDSRICFFDNTHGNVLSRLTLQKRIMTLLRKIEHCVHGVQPAWEETFRNWEVSSKVLQTYPKCKGEDGQAEVFHRGMGKRRASHQSSEHDLEEQINEWANMTWFLLALGGVCLHKRSSSRQMLLQQSQNNASLGSLAQNSLYSSSTSSGHGSLHPSTVSLSTLPPAPPQDVSYCPVTQFVGQLLRLLVCSNEKIGLNIQKNVKELVGEEMSTQLYPILFDQVRAIVEKFFDQQGQVNVNVTDINTQFIEHTIYIMKSILDPKANKDPNNDQPSPSEHLGVTSIEGMMLGIVRYVRHLDMTVYAIRIKTKLCQLVEVMMKRRDDLAFRQEMKFRNKLVEYLTDWVMGTSHQIAPPSSADAAILTNTSLIFRDLDQACMEAVAALLRGLPLQPEESDRGDLMDAKSALFLKYFTLFMNLLNDCIDSSEAEKEMNNTPLLPPRPRMAAGKLTALRNATILAMSNLLGANIDSGLMHSIDLGYNPDLQTRAAFMEVLTQILQQGTEFDTLAETVLADRFEQLVQLVTMISDKGELPIAMALANVVTTSQMDELARVLVTLFDAKHLLSPLLWNMFYREVEVSDCMQTLFRGNSLGSKIMAFCFKIYGASYLQMLLEPLIRPLLDEEEETCFEVDPARLDPTEDIEQHRNNLIALTQKVFDAIINSSDRFPPQLRSMCHCLYQVLSKRFPNLLQNNIGAVGTVIFLRFINPAIVSPQELGIVDKQVHSSAKRGLMLMSKILQNIANHVEFSKEQHMLCFNDFLRDHFEAGRRFFIQIASDCETVDQTSHSMSFISDANVLALHRLLWTHQEKIGDYLSSSRDHKAVGRRPFDKMATLLAYLGPPEHKPVDSHMMFSSYARWSSIDMSSTNFEEIMVKHQMHEKEEFKTLKSMNIFYQAGTSKSGYPVFYYIARRYKIGETNGDLLIYHVILTLKPFCHSPFEVVIDFTHTCSDNRFRTEFLQKWFYVLPTVAYENVHAVYIYNCNSWVREYTKFHDRILAPLKGNRKLLFLESPNKLTDFIDAEQQKLPGATLSLDEDLKVFSNALKLSHKDTKVAIKVGPTALQITSAEKTKVLAHSVLLNDVYYASEIEEVCLVDDNQFTLSITNESGQLSFIHNDCDNIVQAIIHIRNRWELSQPDSVTVHQKIRPKDVPGTLLNMALLNLGSCDPNLRTAAYNLLCALTATFDLKIEGQLLETQGLCIPSNNTIFIKSVSEKLATNEPHLTLEFLEESIQGFQRSTIELKHLCLEYMTPWLKNLVKFCKSNDDSKKLKVSQILDKLINLTIDQKEMYPSVQAKIWGSIGQIPELIDMVLDNFLHKSITYGLGSPQVEIMADTAVALASANVQLVSKKVITRICRVMDKSCTNPTQYLEQHMMWDDIAILGRYLLMLSFNNCLDVATSVPYLFHTITFLVCSGSLSMRASTHGLVINIIHSLCTCTNPSFSEEAQRVLRLSLDEFSLPKFYLLFGISKVKSAAVTAFRSSCRHPTDKWLGNERVTQPLPADRERLSLPSLEVITDALLEIMEACMRDVPDCEWLNTWTSLARSFAFCYNPALQPRALIVYGCISKSVTDHEVKQLLRILVKALESFNDLILIEALVMCLTRIQPLLRPESPIHRALFWVAISVLQLDEITLYGAGLALLEQNLHTLKSQGCFDKKETIAEVMMKTREKLEWHFKQLDHAVGLSFRSNFHFALVGHLIKGFRHPTPTTVSRTSRVLTMLLGIIAKPLHRDKFEVTPDSVAYLTALVAVSEEVRSRCHVKHALPRWPADLSSSVENGEASGGVQAIGLPLSRRQKSWDILDQSALQFARQHKVPTLQNARVLFKTQRSFSVPTTKDPNNATGIEERQERGSRSSVSNESNVLLDPEVLPDLSIQALVLTVLATLVKYSSDEGETRVLYQYLAEGSVVFPKVFPVIHSLLDQKINNILSVSHDQVVLNSVQNIIQNMLASEDPSQQQLHFLQSCGFGGLWRFAGPFTKYNMMGESSELFVNCLEAMVETCLPGDESAPVPPSPRPYNLSSSLSSLTLGSPTDKAA

SEQ ID NO: 27694 - DNA, 9783 bp, DROSOPHILA
aaatatcaaataatatatctctgctctgacaatggaaatctattttggcaatgaccgaagtgaaatctattttataataataaatatttatttataaatataaataaattatatttatttatttatatctatttaataataaattaaatatatttcacttaattaaaataaaagtgttttagaaaactagcactgataattttaagttttttgaatcggtaatgtccttaacggttcacaagattgaaaatagcaaatcagactgaataataataaactgaataattatttattcatttttaaaaagcgcgccaactgcacctgaagaacatgtacagatctaagttacgtatttattgcggaacttttttcacttttttttcaagatcatggcaaaaaatgagtgttagcatggaatctatttaattagttgttctgcaaccgtagtgtttgtaaataaataatttaatacgtaatagttctttgaacattaggattattatttcgcagagtgtaactagttcgatttcagcgcaggcacttcctaacactggcgcatgcaacactgcgccgctgaagcgagtggcccgcgataacagaccctcgacacatcgataggcgatagcgcaaattgcatacctgagaccgacgcggtctgtgtgtcgcggataggaaaataggaaattataaatagaaacgggccgtgccgatgccccaaaagccacccaattgccagctgccccaatcggcgaggataccaagtgctaccgaggtgaaaatcggcgtgccgaaattgttgcaaaaatatttgagacgagaacgccatttacaagccgcgtttgtacagcgagtgcgcgtgtagtagagccggagagagagccgctgcgtgtgtgtgtgcctgtgagagagcgagagagcgccgccgccaaagctgcccaacacatacacgaatgttagacacttcgcggtcggtcggcagaaacaggcaattttatacgggcgaaaagttacaaaaaataattttcccacttttcggtggcgaaaacgaagaaactgtaaaaaatggaccagagatttaagtgcaaaacatagaaacatcttgcgataaagcgtgctaatccggggcataaaactggtactgccattatctcgcttttttaattgcttttgtttattttttgtataggacacagtataatttttcttttgcgctgcgcgcgtgtgagtgagtgtgtgtgtgtgatttggccactcgctggtttctatgtatgtgcccgtatcgccgaacagagttgccgcctccagggcaaatcataaaaaatatattggctgtacaattgaaaaatattgaaaagggccaagcaagtgaattatatgcggataagcggaaaaataacaaacaataaacatcaaagtaatgtgcaaactgtgtttctgctgctgtgcgcgtttcaaacggcatggcaaccctgtttaattgcagtctgtctgtatatgttcgcatgttgtttgtgcggagtgtgctgcctttacgaaagaaaagtgttttattttcattggattaatcccgcccggttaactgcacaatcggattagtgcgtccagcggcccccgaaaatcaaacagtgattttgcgtaacaatttcatgggccacatgcaactgtgcgcttgatttttcggcggtaaacactcacactcgtaccctcgctcccgtttcctgtgctagtgtgcgtgtgtctcgctggctcagcgcgcctgtgtgtgtgcgtgtatgtacgtgcgtgcgaacgtatcgaaaaaaatggtgcaaaaatatgaaaaagcataactaagcaaatatgttgttgtaaaattccattcgcaggatatgcaaaatgcgaagtagcccggacatggagtgccactaagtgccggttccgtttgtgggaatactaataaagcggatcaactgccatcgaaaaatattattaaaaaaaaaaacagaagaaaaagaatagctaaaaaacaagtaccataaaacgctggcaaacagatagatattagtccacgttttgcaaggagtttctgtgcaggagtggagtgctcagggataaccggaaggaaggaagcggcgtacgcagcaggaggagcagcaggacttccgctccggcaaatcggtgtccacctcggaactatcgctcttgctctagccggcaacataccagcctaacaacatgtatccctcaccggtgcgccaccccgccgccggggtaagttcacccgacagtgggtcccacctctgacccccgaatccgtgctaattgtgtttatgtctctttccaccacgccgcgccatgtgccgcccacgtacggaacaccaaccacctctattcacatctaaatagggaccaccacctcagggtccaatcaagttcaccatcgccgatacactggaacgcatcaaggaggagttcaacttcctgcaggcgcagtaccacaggcaagtatccggtggaatactctatacacggcaatgtttacatatgtaaacattacgcgaatcatatttacaagggatatacaaggtttatcattataattgtgaatacaaggcaaatctttactataaagatttgcaaggaaatatttgccatcataatgacactctctgcaaatgtcatctttgtaattgctatgtcaagaaaaaactacattgaatattggccctaagaactattggcccactaaaattgctatgatcgcaaatttatgtcagataaaagtaaaattcttcacactttcaaataatccaatggcatagttttcatgggttaagcaatacgcaattagagattaggccccaataattaagttgaggttaaacctattagaagcctttacaataacatgccccaaagaaatcacattttaagccttagccttaaccgccatcgtatggaagtgtgcgagtgtgagtgtggatggatgctgcgtctgcgttttgcgaaaagtaaaacaaaaagctgagcaaaccggtttggcgcgccatatgcgccgctgtcataggattaacctgcgccgccccagccgcaactcaatgctccatgctccacaatcgccgcttccttgcgttcttgaattcagttcgcttccgtcgtccaactaatttgcccgttgatcacttttcctgtgaattccagcattaaattggagtgcgagaagctgtcgaacgagaagacggagatgcagcgccattatgttatggtaagtcgtcatgatccgcaaattatcgagatcccttagctaatgccacggcttgccttccaactttcagtactacgagatgtcctatggccttaacgtggagatgcacaagcagaccgagatcgccaagcggctgaacacactgatcaaccagctacttccattccttcaggccgaccaccagcagcaagtgctgcaggcggtggagcgggcgaagcaggtgaccatgcaggagctcaacctgatcattggggtaagtcgatcgaggacggatgatggattctgcggcagcagcaatacggtttcagccattctcagatagacactaatgggggcatggccgattggaaattcggttgccacaccgaaaaggcagagaaatttagtttgccgggtactttgtaatacagtctttcaaagaataacaaatatcttgaaaattgtataaaaaataagaaatctaacgtatatatgaaacagtacatatcataaatgtggcaaccgttaagtgggaacttcgtttcggtttagtttgttccttgggccgcatttgatttgagtttgtttttctacttcctaatttgttatgatttcgcattcgaccaatccaatccaaacaacgttgtgcagcatcagcagcaacatggaattcagcaacttttagtaagtttgtttcgttgcaagttaatttcttattgtttgtttactgttgccgtctgccgctgcatccgccgaatgtgccactgccacaactacaacaacagctccagtgcctcactacctcctcttccttttctgattgtcaacgtttatattatttgaataacgcttcaaatgccgccaattgttgttgctgtttccattaaccccagatggtctttgcttatgcttatgaatcgaaagataaataaattaaattttgatacaaaataaaaatatggcaaataccatttagtgttaatgtcgttgttgtgtttacacacatatgtacacacatttcaatgctttcatattcccactaagcacgatgttcattattccgaaagccagcaacgcgcacgcccgatttcatacgatctcatggttccattgcagcaacagatccacgcccagcaggtgccaggtggaccacctcagccgatgggcgcactgaatccgtttggcgccctgggcgccaccatgggcctgccacacggaccgcaaggtctgctgaacaaaccgcccgaacaccacaggccggacatcaagccgacgggtctagaggggccagcagccgccgaggagcgattggtgagtaccacgccctagatcaaaattctgcatatttcaagctaattttcatgctgatcttgcagcgcaattcggtttcgccggccgatcgtgagaagtatcgcacacgctcgccgctggacatcgagaacgactcgaagcgtcgaaaagatgagaaactgcaagtgagtatcgagcttttttcagtgttagcattatacacttgtagtatcatagatcatcgcgttgatggtgattgccataaccgattactgtcatctcatctgagctgttgctgtctctcaactcaccagaaactcaattccgtagtttacccattgttgttgtctaattctgctaacactctaccccaaaatcatgctaaacaaaacctaaattgctaatttttaagagacaaaaaaaacatcacgatctaatggtgcctgttccggttttcaatttctagtagttggtttaaggtgtatctcaacttatagaattttgtttctaatattccacaaattgtaaagctaatgtgtaaatgtaaattggagatgatttataattatgactggtttactttgttttagattataaattttaatagtagtgtggaacatgtgtaaactatatacattttctatgcttttaactagttttatttctttgattttattgtcttacttaaaaaaggaacactaatcgtaacttcatggtttgtttgcgtttttaaattgttaaccatgtaaaatgatgtgaaaaccagaacagggcctaaaatttagatactaactatttctattgtggttgttgttattgctgttgttcgttgtgggtttttgtatgaattttgatttatattgtttttgtgtttttttcaaaattatttccaggaggatgaaggcgagaaaagcgatcaagatttagtcgtagatgttgcaaatgaaatggtgagttgagtgtcggcccagattcaatgcaaccactcccaaatttccccaaaaaaaaaaagaaacaaaaaccacacctttgctattacatttatcatcaaatgcaaaaacagtacttaatgcatacatgtgccttgcaggaatcccactcaccgcgtcccaacggcgagcacgtgtctatggaggtgcgcgatcgggaaagcttgaatggcgagcgcctggagaagccaagcagtagtggcatcaagcaggaacggccgccctcacgctccggctccagttcgtcacgttccacacccagcctcaagacaaaagatgtgagccaaatgtcaaatgtcgaacccagaaagtgttagagctaattgaatctcgttcatttagatggaaaagccgggtacaccgggcgccaaggcacgcacaccgacaccgaacgccgctgctccggcgccaggcgttaatcctaaacaaatgatgccgcagggaccaccgccagccggatatccgggtgcaccgtatcaaaggccggccgatccctaccagcgtccaccgtcagatccagcctatggacgaccgccaccaatgccgtacgatccgcacgcccatgtgcgaaccaatggcattccacatccctcggccctaacgggtggaaagccgtaagtcatttatgtcaatttacggtccgaaaagtagactataggaattttgtcgtgcattgttattaagtatttaaagtaattcaatgcaactgattaaaatgcaaagtgcaatgtagtcgattggagatgataaatgtatgaatcggcacagataggagtatataatatcgctatttctacgaacgttaaacgtcttatcactaattaaatggttacattaattaataaacacattttgccgttgcagtgcatactctttccatatgaacggcgagggtagtctacaaccggtgccgttcccgccggacgcgttggtgggtgttggaattccgcggcacgcccgtcagatcaacacgctgtcgcatggagaggtcgtctgtgcggtaaccatctctaatcccacaaagtacgtgtacacgggcggcaagggctgcgtcaaggtatgggacatctcgcaaccgggcaacaagaatccagttagccagctggattgtctgcagcgcgacaactacatccgctcggtgaagctgctgcccgacggccgtacgctgatcgtgggtggtgaggcgtccaacctgtctatctgggatctggccagtccgacgcctcgcataaaggcggaactaacatcggcggcgcccgcctgctacgctctggccattagccctgactcgaaggtgtgcttctcgtgctgcagcgacggcaatatcgctgtgtgggacctgcacaacgagatcctggtgcgccagttccagggccataccgacggcgcttcatgcatcgacatcagtccggatggctccaggctgtggacgggcggcttagacaacacggtgcgctcctgggatctgcgcgagggtcgccagctgcaacagcacgacttcagctctcaaatattctcgctcggctactgtcccacaggtatgatgacgacttccttacgagatataatcatctagaaataacataatttgtattatccattaggcgactggctggctgtgggtatggagaactcgcatgtggaggtgctgcacgcatcgaaaccggacaagtatcaactgcatctgcacgagagctgcgttctgtcgctgcgctttgccgcctgcggcaaatggttcgtttccaccggcaaagacaacctgcttaacgcatggcgaacaccttacggtgccagcatattccaggtaagcacacatccttatcatattaaaggaaatcctcaattaaaatactggacgtttttcagtcgaaggaaacatcatccgtacttagctgcgacatatcaactgacgacaaatacattgtgacgggttcgggcgataagaaggctactgtctacgaagttatttattaaatccacaaaaccatgcagttttttcattttgtaataagctcgtatagtttttattacaacatgttcgaaatcatgcaaataacaacaacaaaaacaacagcagcagcatcggcagtaaaacaaaaaaagaaaagcagaaaggcggcagtagcaacgcatcaaaaagcgaagcaaaaatgaaaattctataatatatatacaagaaaaaggaaaactaaaattttaagcgtacttgtagctactaagcctaagctaagtccaataaataaaaacaaaccaacaagttgaacacacaaattgcaagtaaagaagaattcaagtaaaatgagaaccagagcgaaataaaatgataatgcatgcgagcaacagaaacgagtatgttgtaaaattaacaaaatgaaaccggaaacagaaacataaaaagtcggcgatacctacctacgttcatcttaacataaaaacaaataggaggataagtggaattagtcagtcattgcaattgcaggagcgttgagattatgattaccagctgaacaaaaggagttaaatacaaatacgatgcgagtgcttttagtttgttttatgtgagcggtttttgtaatttagctgaaaagtcagacagcgaatgcaacaacaaatgtaattttaagttgtcagtttccttacctcccaacgtccctccaaacacacaccacacacacacaaacacaacatacgaaaaacacaaaacacatttgcataaaaggtatatatatatatatatatatataattataaatgaatatacttagtaagcattttagttaagagttttacattataaattaaacacggaaaccactttcgaaacactcactcgcattgggggtcagtagttagaagctcagagcagtccgctttgcttgtatgtaatttgagaaaatgtgtaatgagaaaatcgaggaattaattgtgtgaatcaaactcaactcttcagaaccaagtgtaaaatcctatattttgagcagctaaacccaacacagagagagccgcatcaacaaccgaaaccgaaaagtagaacacagctaaattgtttagtgtttagagtatatatatgaaaaacagaaaacgaatcgatttatatatatttacaattatatatataatgcgagcggcgaaattgtaataagcaagagatagagtgcagcacacgcttcgatttttaattttacaaatattattattattgtggttatatatgtatataattatattataaataattgaagcaaaacgaaaaaataaaaaattatatgtaatcgaaagtaaatcccacggcgtgcatctaaaacacatctgtggtgtagacgctgcgctggcgcggcactggagcaccttgctggcgggacattttcgtgtgcaactcgcgcaatccctcgcactggcgtccagaaatctgtcgaaacttgtcgatggcgatgggcagcaggttgtccaccagaaaaatcttgttcttcattacaaagttgggctgaaaatggcattcttgaagagagcggttttatttaagctgctttctaacttacatccacggccatgtcgctgggcggtttcaacgaatgctgggcaatgaacagctccttaagaagcagttccaggctctgcagcagggtttcgcacttggccagacagccgcagtactcggtgagctgcaggaagtgtctgatgaaaaccactgtcgactgggtgagattaatccatgtgtcgcccgtcgcctgggctcgcacatcgatacccaagacatcgagctccaggagcagacgcttcaggttcgacttggtctgcaaattgtacggctgccagctctcctcggtgcgacccacggagtccagcagtcgctccttggattcctctatgagcgactcgagtgtagtgcgcaacagaccttccaaatgataactaatgtccagcccgatctctgtgagctttgtcgagggcttgcgcactcgctccacacatttggccactgactccagggaggttcccttggtcaggtaatgctttatcagttggctggcaaaatattgcagctccgcattgcaccaaaccacgagcgctgcaagaattagatagtagtaatacttaaatgtagacagaaataggaatgaagcttaccgctaacgcacgccggttgcttctcaaaggcggtgagaaaatcacaggccacctgcgtcaggtcacaaaagaagagttccgatatatccgcattattcctgcgcgcctcccgttgcgccacccgcaaactgacggcgcagaccttcagcagag

SEQ ID NO: 27695 - DNA, 3951 bp, DROSOPHILA
cgaaaagttacaaaaaataattttcccacttttcggtggcgaaaacgaagaaactgtaaaaaatggaccagagatttaagtgcaaaacatagaaacatcttgcgataaagcgtgctaatccggggcataaaactggatatgcaaaatgcgaagtagcccggacatggagtgccactaagtgccggttccgtttgtgggaatactaataaagcggatcaactgccatcgaaaaatattattaaaaaaaaaaacagaagaaaaagaatagctaaaaaacaagtaccataaaacgctggcaaacagatagatattagtccacgttttgcaaggagtttctgtgcaggagtggagtgctcagggataaccggaaggaaggaagcggcgtacgcagcaggaggagcagcaggacttccgctccggcaaatcggtgtccacctcggaactatcgctcttgctctagccggcaacataccagcctaacaacatgtatccctcaccggtgcgccaccccgccgccgggggaccaccacctcagggtccaatcaagttcaccatcgccgatacactggaacgcatcaaggaggagttcaacttcctgcaggcgcagtaccacagcattaaattggagtgcgagaagctgtcgaacgagaagacggagatgcagcgccattatgttatgtactacgagatgtcctatggccttaacgtggagatgcacaagcagaccgagatcgccaagcggctgaacacactgatcaaccagctacttccattccttcaggccgaccaccagcagcaagtgctgcaggcggtggagcgggcgaagcaggtgaccatgcaggagctcaacctgatcattgggcaacagatccacgcccagcaggtgccaggtggaccacctcagccgatgggcgcactgaatccgtttggcgccctgggcgccaccatgggcctgccacacggaccgcaaggtctgctgaacaaaccgcccgaacaccacaggccggacatcaagccgacgggtctagaggggccagcagccgccgaggagcgattgcgcaattcggtttcgccggccgatcgtgagaagtatcgcacacgctcgccgctggacatcgagaacgactcgaagcgtcgaaaagatgagaaactgcaagaggatgaaggcgagaaaagcgatcaagatttagtcgtagatgttgcaaatgaaatggaatcccactcaccgcgtcccaacggcgagcacgtgtctatggaggtgcgcgatcgggaaagcttgaatggcgagcgcctggagaagccaagcagtagtggcatcaagcaggaacggccgccctcacgctccggctccagttcgtcacgttccacacccagcctcaagacaaaagatatggaaaagccgggtacaccgggcgccaaggcacgcacaccgacaccgaacgccgctgctccggcgccaggcgttaatcctaaacaaatgatgccgcagggaccaccgccagccggatatccgggtgcaccgtatcaaaggccggccgatccctaccagcgtccaccgtcagatccagcctatggacgaccgccaccaatgccgtacgatccgcacgcccatgtgcgaaccaatggcattccacatccctcggccctaacgggtggaaagcctgcatactctttccatatgaacggcgagggtagtctacaaccggtgccgttcccgccggacgcgttggtgggtgttggaattccgcggcacgcccgtcagatcaacacgctgtcgcatggagaggtcgtctgtgcggtaaccatctctaatcccacaaagtacgtgtacacgggcggcaagggctgcgtcaaggtatgggacatctcgcaaccgggcaacaagaatccagttagccagctggattgtctgcagcgcgacaactacatccgctcggtgaagctgctgcccgacggccgtacgctgatcgtgggtggtgaggcgtccaacctgtctatctgggatctggccagtccgacgcctcgcataaaggcggaactaacatcggcggcgcccgcctgctacgctctggccattagccctgactcgaaggtgtgcttctcgtgctgcagcgacggcaatatcgctgtgtgggacctgcacaacgagatcctggtgcgccagttccagggccataccgacggcgcttcatgcatcgacatcagtccggatggctccaggctgtggacgggcggcttagacaacacggtgcgctcctgggatctgcgcgagggtcgccagctgcaacagcacgacttcagctctcaaatattctcgctcggctactgtcccacaggcgactggctggctgtgggtatggagaactcgcatgtggaggtgctgcacgcatcgaaaccggacaagtatcaactgcatctgcacgagagctgcgttctgtcgctgcgctttgccgcctgcggcaaatggttcgtttccaccggcaaagacaacctgcttaacgcatggcgaacaccttacggtgccagcatattccagtcgaaggaaacatcatccgtacttagctgcgacatatcaactgacgacaaatacattgtgacgggttcgggcgataagaaggctactgtctacgaagttatttattaaatccacaaaaccatgcagttttttcattttgtaataagctcgtatagtttttattacaacatgttcgaaatcatgcaaataacaacaacaaaaacaacagcagcagcatcggcagtaaaacaaaaaaagaaaagcagaaaggcggcagtagcaacgcatcaaaaagcgaagcaaaaatgaaaattctataatatatatacaagaaaaaggaaaactaaaattttaagcgtacttgtagctactaagcctaagctaagtccaataaataaaaacaaaccaacaagttgaacacacaaattgcaagtaaagaagaattcaagtaaaatgagaaccagagcgaaataaaatgataatgcatgcgagcaacagaaacgagtatgttgtaaaattaacaaaatgaaaccggaaacagaaacataaaaagtcggcgatacctacctacgttcatcttaacataaaaacaaataggaggataagtggaattagtcagtcattgcaattgcaggagcgttgagattatgattaccagctgaacaaaaggagttaaatacaaatacgatgcgagtgcttttagtttgttttatgtgagcggtttttgtaatttagctgaaaagtcagacagcgaatgcaacaacaaatgtaattttaagttgtcagtttccttacctcccaacgtccctccaaacacacaccacacacacacaaacacaacatacgaaaaacacaaaacacatttgcataaaaggtatatatatatatatatatatataattataaatgaatatacttagtaagcattttagttaagagttttacattataaattaaacacggaaaccactttcgaaacactcactcgcattgggggtcagtagttagaagctcagagcagtccgctttgcttgtatgtaatttgagaaaatgtgtaatgagaaaatcgaggaattaattgtgtgaatcaaactcaactcttcagaaccaagtgtaaaatcctatattttgagcagctaaacccaacacagagagagccgcatcaacaaccgaaaccgaaaagtagaacacagctaaattgtttagtgtttagagtatatatatgaaaaacagaaaacgaatcgatttatatatatttacaattatatatataatgcgagcggcgaaattgtaataagcaagagatagagtgcagcacacgcttcgatttttaattttacaaatattattattattgtggttatatatgtatataattatattataaataattgaagcaaaacgaaaaaataaaaaattatatgtaatcgaaagta

SEQ ID NO: 27696 - protein, 719 aa, DROSOPHILA; identical to SEQ ID NO: 18285

SEQ ID NO: 27697 - DNA, 8897 bp, DROSOPHILA
aagcgaagtttgcacctcgcgaataccacaaacccaattgaaaagggatcacggtgcagattacgaaccctgttgcacgctgtgcttttgcttccatttgcattacaaataagcgaaattgtaaatttaagtaacacaaaactctcgaaattgggtacagattctgcgttgacctcaaggtctgcggctttacctttggctatgttaatagcaactgcccaaggttattactaattgactttcagtgatataagaacttcgaatgctacatgtaacctcaatgataaagatgacttggttttaggcccacagtaccttttaaactgtaactcatgcctggagttatgcaacgctttttaaaacaaaccaataatattaaaccaattagggtttctttgctcttaaggttttttattgaaagatgttactttaacaccattacttgtatgcggatgatgtttatttgttgttttttatttcttgtatattggatgtacagctggttgttgttgccgtttgtggtggtttttatttcacaataaactattttaagcttaaccctttcggtaggtattattgtatatccttcactcgtgtctgttatattttcacattgcacttcaaacaattgtgtgaataacaacgatatgcagaatttgcaacttgaataacgtgtaaattaaaacatgatttgataaatatgtgggttagtcattggtacaatatttttgtatttaaatatgtactgtgataatgtcgttgctgccgttgttactacccatcgcgttttggatagagaatcagagttggtttcaaaaaattctagtaacaagcattgtgccccagcacagtttagaggccattggacactgaagtccatatgttgaatatataaattcatatattttcttttagtattttgcaacaacaagttctcttttaacaatgtaaatatatgtatataaggttaataaagttgttttgggggcttttcgggtttattttaatgtgtttgtttattctcgtcatttgtttcacttatacttatcaatcataaatataaagtttaataataataataatggtaaaacatcgattttcatagtggatctttttataaaacattaaaaaaattcaaaaaacgttgtgcgacttcaatgttacaagcctcatacatttaggtgttgctgatagtgattgctgttgttttcaccataaaatgtgctttagcctagcgatttacgacatatccttttgttttcattgaaatcttgcataatcataataatagaatagaaatgtaataacttcaacaataataggttcatgtgcttaaaactaaagataaaattgtttgaattgttgaattgtttctccatcgaacatattcaatcctttcttctgcactcatcatttagttgttctctaaaataatgttataatataataaacttgcaaaaatgtcacgtactacatatatataacatgttttgaaagtgtaatcgttcatctttttttttttggttattttttgtaatgcttgctttgcttagctctcgaaactaaggtaaaaataaacaaatctgccaaacttttccagcaatctgcttcgtattttttttttttgtagtaacgtgtagccaaggtccaaccaaacgccttagtaggcgtggttggccacgaacagggatccagatccggcaccagcgctgccggcaacgtacttgccctgagcagcatcaccgttggcctgggggagggtaaagaaagcggggaaaattgattaatttcgttgtgagaaatgcctactcctaattattacttagttgtaacttggcgagccgcagcaaaaaagtttttcggccagcatgaaaaagttttcacactgatttttgctgcgctcgaagaacttccgccactttttccacctgcggcaattttctaaaaactttccacgcatccaagcgcacgaatacatgctgcgtactgcggaaagttttggaaaatttaatcttgcaagttctttggaggaaaattatgattcgattaaatatatgtaacagctctccgaacgaattttacgttgttttcaacttaactgtcaggtacagatattccgaattattattctaattaacagtaggaagtttgcaaagggctttcatgaataaagttagacaagacatttttaattaaaatgtatttaaattaaattaaaaggtaaaataaaatcgaatttttgtttaaagctaactaaagtaaacaaaatcataagcaaggtattattagaaatatataatttatttctgttcgccaaaaatattttctttaaggtctagtcagtttattcggtaaaatgtaaaaatgtataaaaggaatatatttgcagttccattgttggaggaatataaatgttgcccgtctcactccagctgggcctcgatcagtaactcttgcggattatctggattcggcttgggatatagcttcgctcgattgtgactcgggattagtgcgtggcatttaggacttagtatttgtgctgggcgacaaagaggttggcattgccggcaaacgacggaattgagccgggcacgtaaataccctgacaggcctgggaattggcctgtggaagcgggaggagagcgggattttggttgggattaatcagattttgggcttttgtggattaggtttagagcaagcgaagcatgagtggcacgaggacagtatgttaaaggcgtttgcgataagtcggatttggtgaaaggcggctatgattcttaagttaccccatgaaagcttgttcatcgccatcttaaggcagcaattcttcaatcctttgatcaatacctgtggtcatccacatgcaaagtatcttttccagcgaaccccttaaccgatccagctgtatagttaccacaagccgcctctccgttagcctaggcatgattaatgtgtggttattgatgatgaaattaatgtctcacgtacaaaagcaaaaaaaggttacaaataatggtagggaaatgaaagggataagattagaggattagaagaacattgtggtcatttgggattggaaatggaatcaatggctgggaatatgctgtatgttatattatacatgtataatatttcttagcccaaggaatacttccgaagcatatacctgacactcttaatacattcaccacttaaattgctaactgcaatcaatcgtgcatagatacaactatccaaggactcaccttggcgcgcttaagcagctcgttctggccggcagcaatgttctccttcttgccagcccaggcacgcaggacggaggcctgcagggcacgaccgtacgagaaggtgagggcccatgggcggatcaagggaacgttgttgatggcactcaggttgacggtggcctcctcctcggactgacctccagacaggaaggtcacgcctgtagacaaacaatcgattagataggattcattgcaaaaacaaggtgaatgcattccaatccagagattacagttggatttgatgactcaccagtaacggcggcgggaacggtgcggcgcagagcctgcacggtggccagggcgatctcctcgggggtgttcttcttggccgactgaccggcggtgaccatgttgggcttcagcagagtaccctccaggtagacgtggtggtcgctcagggccttgtagacggcggccaggacggtctcggtgaccttctgggcgcggtccagatcgtgatcgccatcgggcagaacctcgggctccacaattgggacgatgcgctgcgactggcagatggaggcgtagcgggccaggacattggcgttctccaggatcgactggtaggatggggtgttcttgccgatcttcaggacgcaacgccacttggcgaagtcgcaaccgtccttcttgtactgggcgcaacgggcggccaggtcatccagaccctgggtggtgacctcatcctcagagccgaacagtgggacaacacccttgtcgaccttgatgcccagaatgattcccttcttcttcaggatctcggcgaagggggtgccatcatcggccttctggtagagggtctcgtggaacaggatcactccagagatgttctcggccagcttggggtcagtgctgaacaacagctgacggtaggcacggcggttgtcctcggtgttctccacgccgatgtcctgcagacgcttgcccatggttgggccggactcatcggcggcgaggattcccttgccgggggcaacgattttctgggcgatttcgcgcagctcatcctgcagctccttgctggggtagttgaagtaggtcgtcatttttgagattcgagtgtagttctgcagcacgaagatccatttacgtttgatttggtgtggtgttattttgttggatgaaaaagagtagcggacattgtgttttaataagctagctatcgaattccgcagcggcgcggatgattggaaaccattgcgtaagcacagaattttgaaatatttcgaggtaaaaaataaaactaaaaatttggactaaaatttcgtatacgatccgcacagtctgacaaccaaaatcaagtaactcaaagttacatatgttcctactgaaaaagataacaacggctacagagatagctatcaatcaagtgttggattattttactgaactgacctaattattatttccataaaataaaaagaatatttgtaaaggtcaagttatttaaagtggaactctgagttaaccgattagagccattgagtcatatgctgttgtttaatgatgcggtattatataattttgttttcagtgtcaggtcaatgtcactggtgttttttccaatttaaaaatatttttccattgaagataataaatgctttgcatggtagtgtatttcacagctgattcgatggcaaagagcgggtgattgaatgagattaaaggcgcatgcacggaaaacgtgcttttctctatatctgcagctcttcgctctctctctctcacatttttttttttctaggtttgtcctacactctcaacattcacatataaaatgttgccttttaatagagcttttttagaggttctcacaaacatcaatgaaaattcacattttagaaaaatcctcttggattgtactatacaaagttggaaaagtatcactgcactttttggaatgaaatattatatagtgtcttattttatagtgtctgtaatttgctaaaaactatttgcaaaaaccgaacaattgttttaagcttagatcacaaagaaaaatccgaaccaacctcgacgatgatgtttttgtaactgagcaaagtcacggaaacctcggcaataattccctctgatgtaatcaaagtcatggaatcttgtgtctcactctaaccgaatgcagctgtcttcttcacacccgcataatgcgtgacgtggtaactttcacttttattgccgctgctgctgcgctgttcctgcaggcagcgacgccaacgcagggcgcatgaattttcgcttgacattgaacaaggtcaagcaacaagccttagcaacaaatgttgccagcgaaatttgttgcttacgaaatgcgaatagaaattgttgaaaaccgaaagtcgtgtggcgcgtgtgaagtgcgatagagatagctagtgtccagcaatatgtagatacagatacgaagtcatctgcgatgactaaaaacccattttatacttgtttgacattgacagtgagccaaggactgggaatggcataaatgtcaggttaagagattagacctccgcaacttatcgcgaaatattgtttaccacatcgaccccacatttcccacgccatatatttaacactttgtacacgcgtgaatagcttgtggttcctaagaacagatagatattataaaagcttgatatatgcatatattaaaaatactgcacagtttaagaatatattaatatatctctagaatacaaatcattttttcatctattaatttctaaacagttatctaaacacacttcacagaacgacactagatatgtatgtacacccttatctatagaattatctatagatgttgcggattcactcagcagacaacacccacctacacttgccggcaatcaatcgaagactgaaatgtttcgaaaactaggcgaaatatatacgatgacaaaaaagaaagaggaacgaagagcagccaacgcatgacaacaaaaaacaatcaaaataaatttacgttcctatcaagagaccgtttataaaaataaaccgccacatgtccgtctatatgtattcgtgagcttgctatcagtgaaaattttgaatcgaaaacgacgaaaaaacgagcccccagttgcgttttagttccaaaggttttgcattatcataacgagattttaggtccggcctccttgaacgcagacagtgggtcaaaagaacatccaacagttgagataatactactactactactacgaactgacgtcaactgattagccgtaaacatgggtggtaataattgtatacttgtctgaaaataggaaacttcgagcactcccatacttctatctatgcccttattatgtgaccccaaaaactttgttgtggtaactgtttactagataagccaatgtaccttatctagtcttatttcatcgattagcttatactttacaatgagaatgtatacctataattccattatattcattataaaatttcccaaagcttgatataaacgatcaaaggaacataaattggttgttttaaatgttcaaaactcttcttaaaaatcctaatcaggttgatcttgaaaggaagtcctttggagtaccaaaacttgttttctgtaggtttcaaaacaacccttaaacttctgcccctcttttctcatgtactctctacaaactatcggtaaaatgtttgctctccttcattcactgaaatctcaattaaatggtaggtataaaatgcaatagacaaaagcatattgcgtctatcatgagaagacgtcaacaatctgatgaatttacgatgacgttggctaattgaagtctaagcgagagagcgatgggaaagtatacatatgtatatcgcgatgtatagtacatacatttaacatttgcgccaactatttataaagaaaaaccgcagcggcgactacaaattgcagttgaaagcctgccaacaagcaaatgaactcgaatgaaagagcggatgaaaagtaagagagccggttgagccggtagagaaaactactactcacgaaagtgagccaaaagtcacccgataaggcttcttatcgcctgcagttcgcgtagcccccccactccttcaaccgcggtgcataggtcaacaacactcgagagcctcgaggttctagaacttgtcataaaagtggcgagcacgcggaaatggtaagattagagaataattaaactatattcgaatacgcactcactaacactaacacgcctacagattcgctgctgctctgtagatttggattacgaaacacccagagaaatgggaacgattacgcgacttttcaactgcactgccgccaatggggggaaaaatatctgaattttttttaaggggctcaggggttctgttcactgcgtatgacgcccactcaccgaactggaaactgaatctgggatgtggtgattagctgctggctactggctgggtccgctgctgctgctgcactggaggagagcggttaacgcttttattttcggcccgtgtcgctgctactgccgctgccgatgcctctgctaccgctgactgcggcgtcaacgtgaaattccaaagcgaaataagcgagacatgccgagcgagaccccaaaaggttgtttggaggtcgtcgccgacggtgttgggcaaccgactgagccaagcgctttaaattcccagatccccaaacgaaaggtatccaaaataaagctcattctgggagcttttagtgggggatggaacctaacagataagctgtaaaacttattagacagctttgagaagctttagctttcgtttgggcggtaaaaatttaaatgaaatgtgctcaaagcgtattaacataataaataatttatcttaagatctcaaacactatacgatatatattgaaatagtattgaaatgttaaaaacaataaagtgccacaaacttaatgtcgcgtcttgctggatatagtcatcccaaatcatcctcatcaagtgaactatatgtcttgccaagctttcttgcccaaaactataaaaaagcattaaaaatgaagtgttatctttgcaagtatttgtatcttttaacctgtcaacaacatttcctattctacttatgcattgaaaagagggtagaataattaatttggtgtattttaaccttaattacgagcgacctgctttacttggggcggtcaatgaatttttcgtgaccatcagcatcaggcgctccagcggcagcgcaacaaaaacgaggggtgccagaagcagcagctaggataagcgactttcacgccatgcctgacctcctgcaatgttaaaggactcaaccccctggcactggaaacagctgattgagagcgcaaactttgagaaaatatccccctattctgccatacaatctgttcgagcgaaagagaaaatcgtttcgctctttaaaatgtcctaatatgactttggcacagttttctgaatgaaaagaatgactgtggaacgggttataacatttaaaggattttagatatttcatagactatctatgcttaggtttctttagttaaagtgatacagttgctagatatatatgaaataatatgcttacctaatgaaggaaccttagccacagtgctcttcattgtcctcgctctctttgtgc

SEQ ID NO: 27698 - DNA, 1989 bp, DROSOPHILA
acaccgtcggcgacgacctccaaacaaccttttggggtctcgctcggcatgtctcgcttatttcgctttggaatttcacgttgacgccgcagtcagcggtagcagaggcatcggcagcggcagtagcagcgacacgggccgaaaataaaagcgttaaccgctctcctccagtgcagcagcagcagcggacccagccagtagccagcagctaatcaccacatcccagattcagtttccagttcgatgacgacctacttcaactaccccagcaaggagctgcaggatgagctgcgcgaaatcgcccagaaaatcgttgcccccggcaagggaatcctcgccgccgatgagtccggcccaaccatgggcaagcgtctgcaggacatcggcgtggagaacaccgaggacaaccgccgtgcctaccgtcagctgttgttcagcactgaccccaagctggccgagaacatctctggagtgatcctgttccacgagaccctctaccagaaggccgatgatggcacccccttcgccgagatcctgaagaagaagggaatcattctgggcatcaaggtcgacaagggtgttgtcccactgttcggctctgaggatgaggtcaccacccagggtctggatgacctggccgcccgttgcgcccagtacaagaaggacggttgcgacttcgccaagtggcgttgcgtcctgaagatcggcaagaacaccccatcctaccagtcgatcctggagaacgccaatgtcctggcccgctacgcctccatctgccagtcgcagcgcatcgtcccaattgtggagcccgaggttctgcccgatggcgatcacgatctggaccgcgcccagaaggtcaccgagaccgtcctggccgccgtctacaaggccctgagcgaccaccacgtctacctggagggtactctgctgaagcccaacatggtcaccgccggtcagtcggccaagaagaacacccccgaggagatcgccctggccaccgtgcaggctctgcgccgcaccgttcccgccgccgttactggcgtgaccttcctgtctggaggtcagtccgaggaggaggccaccgtcaacctgagtgccatcaacaacgttcccttgatccgcccatgggccctcaccttctcgtacggtcgtgccctgcaggcctccgtcctgcgtgcctgggctggcaagaaggagaacattgctgccggccagaacgagctgcttaagcgcgccaaggccaacggtgatgctgctcagggcaagtacgttgccggcagcgctggtgccggatctggatccctgttcgtggccaaccacgcctactaaggcgtttggttggaccttggctacacgttactacaaaaaaaaaaaatacgaagcagattgctggaaaagtttggcagatttgtttatttttaccttagtttcgagagctaagcaaagcaagcattacaaaaaataaccaaaaaaaaaaagatgaacgattacactttcaaaacatgttatatatatgtagtacgtgacatttttgcaagtttattatattataacattattttagagaacaactaaatgatgagtgcagaagaaaggattgaatatgttcgatggagaaacaattcaacaattcaaacaattttatctttagttttaagcacatgaacctattattgttgaagttattacatttctattctattattatgattatgcaagatttcaatgaaaacaaaaggatatgtcgtaaatcgctaggctaaagcacattttatggtgaaaacaacagcaatcactatcagcaacacctaaatgtatgaggcttgtaacattgaagtcgcacaacgttttttgaatttttttaatgttttataaaaagatccactatgaaaatcgatgttttaccattattattattattaaactttatatttatgattgataagtataagtgaaacaaatgacgagaataaacaaacacattaaaat

SEQ ID NO: 27699 - protein, 361 aa, DROSOPHILA
MTTYFNYPSKELQDELREIAQKIVAPGKGILAADESGPTMGKRLQDIGVENTEDNRRAYRQLLFSTDPKLAENISGVILFHETLYQKADDGTPFAEILKKKGIILGIKVDKGVVPLFGSEDEVTTQGLDDLAARCAQYKKDGCDFAKWRCVLKIGKNTPSYQSILENANVLARYASICQSQRIVPIVEPEVLPDGDHDLDRAQKVTETVLAAVYKALSDHHVYLEGTLLKPNMVTAGQSAKKNTPEEIALATVQALRRTVPAAVTGVTFLSGGQSEEEATVNLSAINNVPLIRPWALTFSYGRALQASVLRAWAGKKENIAAGQNELLKRAKANGDAAQGKYVAGSAGAGSGSLFVANHAY

SEQ ID NO: 27700 - DNA, 3726 bp, DROSOPHILA; identical to SEQ ID NO: 12505

SEQ ID NO: 27701 - DNA, 1283 bp, DROSOPHILA
cgtctgtttgcccagaaatccacgtcacacgcacactacaggttccgagcagtccagatcagcgattccagcgagatgatgatagccagcagcctcgccgtcttatatggcattgccatcgtgtcgtcgatgggcgtgcaatctgcccgagcaggttagaggaattctccgaatccgcgtcgatgggatgctaatgctaatattggtgtacattattgcatgggccagactacgccgacgactgcaccacaccggatggcgatcagggtcagtgcatgcccttctcctcctgccgcaccatcgaggagcgcctgacggaagcccagaaggccggacagaaggtgccagccgactacgccagttacctgcagaaggcactctgcggcgagttcaatggagtgcgccacttctgctgcccctcagccaacattcagcacaactccaaggtgatgagcctgttcaaggacgaaaactttgactgcggcaacttcctcagccaaagagtgtccaatggctacgaggtgaagctctcctccagaccctggatggccctgctccgttatcagcagtttggagagtccagattcctttgcggcggagctatgatatccgagcgctacatcctgactgctgctcactgtgtccacggtcttcagaacgatctttatgagatccggctcggcgagcaccgcatctctacggaggaggattgccggcagcagggacgcaagaagaaatgtgccccgccagttgtgaatgtgggcattgagaagcatctgattcatgagaagtacgacgcccgccacatcatgcatgacatagctctcctgaagctcaacaggagcgtccccttccagaagcacatcaagcccatttgcctgcccatcacggatgagctgaaggagaaggcagagcagataagcacctacttcgtgaccggctggggcaccacggagaacggctcgtcgtcggatgtgttgctccaggcgaacgtgccgctgcagccgcgatccgcctgttcccaggcctaccgcagggcagtgccgctcagtcaactttgcgtgggtggtggcgacctgcaggactcctgcaagggcgactccggcggccccctccaagcacctgcccagtacttgggcgagtatgcgccgaaaatggtcgagttcgggatcgtcagccagggtgtggtcacctgcgggcagattagcctgcccggtctgtacacaaatgtgggcgagtacgtgcagtggatcacggacaccatggccagcaatggcctgtga

SEQ ID NO: 27702 - protein, 335 aa, DROSOPHILA
MPFSSCRTIEERLTEAQKAGQKVPADYASYLQKALCGEFNGVRHFCCPSANIQHNSKVMSLFKDENFDCGNFLSQRVSNGYEVKLSSRPWMALLRYQQFGESRFLCGGAMISERYILTAAHCVHGLQNDLYEIRLGEHRISTEEDCRQQGRKKKCAPPVVNVGIEKHLIHEKYDARHIMHDIALLKLNRSVPFQKHIKPICLPITDELKEKAEQISTYFVTGWGTTENGSSSDVLLQANVPLQPRSACSQAYRRAVPLSQLCVGGGDLQDSCKGDSGGPLQAPAQYLGEYAPKMVEFGIVSQGVVTCGQISLPGLYTNVGEYVQWITDTMASNGL

SEQ ID NO: 27703 - DNA, 5236 bp, DROSOPHILA
catcttgtcgtcaaataattgtaagtcatttgtcagccgacacaataaaatttgtgaataaaatatatagagacacgagtgatacgacataaacgaaacacattaggtatacttaaaaataaataatctggaaaatagagaaactctcattttaagatatcaaaaagtgtctcatatgaaattcgatcattctgtcaatttgtaactcgccaagtttggttttaatttattcatacgaggtatcaagtagctgagcctgtataaagtgtccgtattaattaagctaattgaataacttgcagcttaatctacattaagacaagacagcgagatttcagtcaagcctttcaggtcccaaacaaaaacattaaagatagaatttcatttttcgcatgctagctaacaggaaaatctaatgaggtcaactattatgaacttgtcctccggacaatgcaatcgtatagttatagaaacagagagcccgtaatccctataatcccctaatctttaaacgtatttgcgttgggtttttatgtagcacttgtgcgattagactgaaaatatatattagtttccatatggattataggaattcaatgtggggtaacaaaaatctgaaattaaacaaaatccgtaatcaaaataatagaaatcgttattcattcgattgtggaaaaaaaaccaaaaaccgtgacagatacagacaaaaacgaaacagcgattacgattagattgaatgaaggtggcagcacaacaacgataaatttgcaatgttcataaatgaatggggaagtgtgagagaccgacaaactttaatcacaacaaatataaccttattgccccactcttttgaaatgaagtagcaaggtcaagtgtagttttgctcaagagcctaggaaagtttctaaatcacataattgccaatatcgcaagctcccaatataaatcctcctatatcttctattatattaattatgcaatagtatctaacgggttaccgttaccgtcgatggatttcgataaaatgtaagcaaccatcgataatatcgataaatttatatccaatattacataccctcgagttgcgagccttgtcactggatgatgccgactccttggccttgggcctttccgccttactggtggccacaatgggcaagccgccgttttcgatcattgtcaccacaatcttattgttccgactgcttacggtgccaccaccaccaccgcttgcgtaggatgagttcgccgccgcagctgaggctgcatttgtggccgctagattcttctgccgcagggcgttcgatagccgttgcttgcgttccgctcgggcctcctccttttcccgctgcaacttggcaatagtggcgggcgtgtggctcttggagcgctttagaaatctcatcagttggctcttaacattggtggcggcacttccatttccctggcttgtggcatcgcctatttcctctgccctgctggatcttcgggatatttgagccttggtgggtacctccaggcgacggaagaccccatcggccattcggacgaaacagccctccgacatcttgtgaaaggagtcggatggcagtttgtgaaaatcgccattgggactgcgatagtagcagtgatccgtccgatgatagccatctcccacaatataaaactcattgcgcccctccttgggcgccacagctgctgctgctgaagccgaggattcggcagccaggtcgtcagtcttggcacttcgatccacgggcagttggaaggccattagttgggtgatgctactactgctcccaccagcagcatcctctgctgtaataggcaggacactacccgaagtcccctgcccggtattaactggtttcagctcactgatcgttaccggacgacgttccgggttcttgcgcataatgcttccattgcgcagaagtgaatctcgcaggagagagagctcatccttacgcaatggttgcaccaatgtggggtaatgtttcgaagacgaagtcgatttgcgggtagaggttcgacgatttccaaactgtgaagccggttgtggtggttcctccttgttgttgttattgctactgtggtgcatctgccggtgactggaagtctggcccatggtaggtgctttggtggttttgcggtgggtggttcacttggttgtttcgtggttgggttgcggtggtatttcttcgttctcgacgcgactcggtgttcacggtatacggattattggcccagttgcaacgaaactgagacacatattccctcgttcttcgctttggcaattatcacagcgaatttcgtgtgtaaacattgagagatgcgcgcgtatacgtgtgcataaaagtatgaataaattttgttcgttttgtgtattttgtggcacaacaatcacaattcaggcgcagctttgtcgcttttatttcgaaaagaccatcttgttaaattctattagagcacaatgagtgaacattggagaagcaatcgcagtaaaagtcacagtctctcggtcactaaattgcaaacacattcaccgtgccaatcttactgagcacaaataattgggattcgcaatgcacagagtaaaacaataacaatcataagaactgataggtccattaagcaagccgcttattcagttaaagaaggtatggagaattttgaatagcacaactaaattttcttgttgaatatgaaagtaccacatatatctttgaatcttatatgaacgtatctagtcttgtcattcacaaatttatggttatatgacaattgtaaattcttttctgaaaagtttaaaattgggactaataagtgttgctaaatatttgtgtctctgtgcatgaagaatatgttatctttgctttcttctaggatatttgtaaacttgttgcttacatgacgcgtaagggggttttaaaaagtgaagggtgggtgcttttagataacaacacatgtctcttatcagttatcgcactttacacatctctctccgtgtgagtgtctccgttttttttttgtggacacaagacactcgcgataagttccacaaccgttccagctgggtttgcttttgaatggctaaatgtgtatttgagagtccgtcgctgtgcggtttgtggatcgtaagccttggcacgcccgatacagatacgcagatacacagatagtagaagaccagcaacaaaaacaacaacaacaaaataagcgttaaagagacaacgatgaagccccacacattgctgttgctatttctgtgattccctctcgctctctacgcttccccgtgtcactctttccctctgtccagtagttgttgctattcttctgctagttacctcgtttaagcgttacttacacgcacactagcgcacagcgactgttgcttttgcgcgtgtgtgttttgggtaggaatttgttcgtttttttccttttcattccgctttcgttcttttcgcttgcactactactgtttttcttcattttttttttttttttgtatttcttgtcataccgtactttataattaaattaacttatcacccgcaattggctcatttctcaatgtatctgcgagttgaagtggttggctcaaaaaaagctggatacatttcactggaactgcaacacacacacacacaaacacacacaaacacacatttatatgcgcactcatacacagcgagtccaagctggaaatttataaattaaacactatttaaccgaatttatttataaacacacgtgcgtgtgtacttagtcagttagagtgtgagagcgactgtgacttttcctacgtcaattcggtttattttaagctgcgtactcatgcccttgatttcattctaagtgagcttagctgatcggattagccagtgacgttgttctttatcgcggatgttgtaacgcctgcgatttggattcggatcacaacgatgacaactgcgcttcagcttttttgcaatctcttcgccttacttctgttgtttttttctttatttttcgcgttttgtattgtttgacgtaacgcccttgtgcttgtgcgataataactggtcacaatggcaaacggcaaattataaattgaaagtaacaaaaataacaacaagaataccaggggagtcaactcatcgcggggcgataacgatacaggctaggcgatatagcaacgatatcggcggagagcgacggttaatgacaacagaaaacagcgcgacgacggtgaccacacgaatgaagtggaacttaatactaaaacaagctttcgaccatcgctgctgtatgctggctacttttgccattgtggctgccgccactgtggattgtaattctgtggatgtggcgagcgagcgagcgagcttggcatttttgccaaagttctgcgtctgggaaggtcgttgttgttgttgttgctgtagctactccaagacaacaacgacacaccctatgaaaatcgtatgcaatctgcaggtaagtgcaggtgattcatacacccacacatgcacacttactcaaaaaaactggtagaaaccacacatatttctcgaaaaacattgaaaaactttaaagagaaggagagagaactcggaagagctttggcaaagggatccccagtttgggaacctgtctgcgagccgagcttaaagcccacataaacatcaactcagcataatttaaaaagacttccactggaaattccaagatagagaagtaaagattccagtatgtagcttcttaaggaatcgaaatctttaaagatttgaaaagaatctgtcaaaaatgaatattccatgcgtaaaacaaatcattttttaagataaccttaaaaatgtaatttttgtaatatttttagtgttataaaaacaataaaattgaagttaaaacaagatagaaacccaacaacttttgtaaaacttcggataagtatatgatcatcttgatcttcatcacactaagaagaaggaattaaagaggatataactagccaaagaaaagacgttataagttagtcactcacgattccacacctaacgtccacaaaggcaactagttaagcttatttacctacaccacgtaaactattcaagtgtatgcatgtcggatacaaacacacaaactaaggcaaaaaattatttaaaatcaaaacagttatatgattgtgcggagaggagtacgaatcacacggatttgttgtggacaacaaagataaaggcagagaaacaga

SEQ ID NO: 27704 - DNA, 1538 bp, DROSOPHILA
caccgtcgtcgcgctgttttctgttgtcattaaccgtcgctctccgccgatatcgttgctatatcgcctagcctgtatcgttatcgccccgcgatgagttgactcccctgcgacaaagctgcgcctgaattgtgattgttgtgccacaaaatacacaaaacgaacaaaatttattcatacttttatgcacacgtatacgcgcgcatctctcaatgtttacacacgaaattcgctgtgataattgccaaagcgaagaacgagggaatatgtgtctcagtttcgttgcaactgggccaataatccgtataccgtgaacaccgagtcgcgtcgagaacgaagaaataccaccgcaacccaaccacgaaacaaccaagtgaaccacccaccgcaaaaccaccaaagcacctaccatgggccagacttccagtcaccggcagatgcaccacagtagcaataacaacaacaaggaggaaccaccacaaccggcttcacagtttggaaatcgtcgaacctctacccgcaaatcgacttcgtcttcgaaacattaccccacattggtgcaaccattgcgtaaggatgagctctctctcctgcgagattcacttctgcgcaatggaagcattatgcgcaagaacccggaacgtcgtccggtaacgatcagtgagctgaaaccagttaataccgggcaggggacttcgggtagtgtcctgcctattacagcagaggatgctgctggtgggagcagtagtagcatcacccaactaatggccttccaactgcccgtggatcgaagtgccaagactgacgacctggctgccgaatcctcggcttcagcagcagcagctgtggcgcccaaggaggggcgcaatgagttttatattgtgggagatggctatcatcggacggatcactgctactatcgcagtcccaatggcgattttcacaaactgccatccgactcctttcacaagatgtcggagggctgtttcgtccgaatggccgatggggtcttccgtcgcctggaggtacccaccaaggctcaaatatcccgaagatccagcagggcagaggaaataggcgatgccacaagccagggaaatggaagtgccgccaccaatgttaagagccaactgatgagatttctaaagcgctccaagagccacacgcccgccactattgccaagttgcagcgggaaaaggaggaggcccgagcggaacgcaagcaacggctatcgaacgccctgcggcagaagaatctagcggccacaaatgcagcctcagctgcggcggcgaactcatcctacgcaagcggtggtggtggtggcaccgtaagcagtcggaacaataagattgtggtgacaatgatcgaaaacggcggcttgcccattgtggccaccagtaaggcggaaaggcccaaggccaaggagtcggcatcatccagtgacaaggctcgcaactcgagggtatgtaatattggatataaatttatcgatattatcgatggttgcttacattttatcgaaatccatcgacggtaa

SEQ ID NO: 27705 - protein, 375 aa, DROSOPHILA; identical to SEQ ID NO: 24717

SEQ ID NO: 27706 - DNA, 2743 bp, DROSOPHILA
attttacgaggattatgagactgcgttttgtagtccaagaaagctgattaatgtttagagtgttggtataaatgttaataggctcattaatgtaggttttgacaaaagcgaggtatttgtacattttctcattgtattatttggattcacaaatttatgtttatttaatcgggtttctcccagctaaaaacaatagaaatcttttcaccggctgtgtttgttttggacatggttatgttgtgatgattgataatttcattcacattagtttatttatagaccttttttatttattgacaatgatttgccctacctacctcaactttcgagcaaatgctgcataaacaaaagtaattcgcccttgaagaggacatgacatgatattttcagcgtaggaagtgggcctacgtaccattgtggttcagacggccttgtatgcaataaatctaattaatatatatatatatatatattatggtagtcttaacgctacggtttcccacacgcgattttcatgaagctggagtgtaagttttttgtttttattcaaaacttaaaaatccactttgcatgtgtcataaataatgagtcatgaatcatacccttaattcactttaataagcataattagttcgttgaaatatctctattaactacttctgcggagtagataaacgtgatttgctgttttaatgcgcatatgtattaacaacatattaaatgcacaattaaactgtggtcataataaattattaatatttagcagtgattaaaattcattcttaaaaagaatattggctaatttaatagttgtatggttcttatcttaaaattacaagtttttgatctaaatatattattattaatatataaaataggaattaaaacataattttgcaataaaatatttaaaaatcgataatttatcgattgacaacactgcgctgccagggacgccaaaaacagtgtgcacagtgtgtattgattgtgtgtgtgtgtgcgtaccgtgcggcggtgtgtgggtgtcactgactgatatttgacaagtaagataaaatataaatattagggcgattttcgcgatccgtgctaatcccatcaacgatttgccgcccccaactcagatgatagcaatggacgagcagcgcggcgacaagatctacggcggatgcgagggtccggacgccatgtacgtgaagctgatttcctcggacggccacgaatttgtcgtcaaacgcgagcacgctctcacctccggcacaatccgggcgatgttgtccggaccgggtcagtttgccgagaacgaggccaacgaggtgcatttccgggagataccgtaagtagtttggctccaccaaaggcacagcccagtggctccgccggcagcagagcgcttacctgcacggcgaccagtcatcgcaagtctgtgtgacctaatgaccggcgacaaatttgcacagatgtacggtacataccctagacgtacgcagttacatgggtacatgcatgtacgtagagcaaagtccacggattacagatcgctcggtatgattcaaatctgaccgttttacacgtaatctcgggcacaactacgcgcattagattagcacacagttcggcatcgattgcgcctagaaatcagattgatggtgttatttctgtgtatattctgattgatctgtacctaaagtctataatagcagtcaaattatgcggcaaaaagccagtcaactcataacttcttaagctaaaccaacttataaatccaaatgcttaagaattcgtgcatttgtgttctgtttgtttaagtattattgtttgagtggtattcatatactatcaaaagtcgtttctttaactattaacgttattaattcttttcagatcccacgtcctacaaaaggtctgcatgtacttcacctataaagtgcgttacaccaacagttctaccgaaatacccgaattcccgatcgctccggagatcgcattagaacttttgatggcggctaatttcctagactgctaaagaaaataatattggttaatttgaatttacattatttacaagtgaacgaagaagggccagactgcgtaaagcttaatttgcccatgttaatttggtaataaaacgagaagattgtccctgcgagaaaataaatttctgttgatttcctaaacgatcagttttgtaatgcgcttttttttcgaaaaaacattgatttttattaaacatcaagacaaaaacaaaagtgcagagcgtcgcagttctatttggagtgcttggacctggatttggcggcatttttgttgttcagcatggcgaaacgcatttgctggatgagccattggacaccctcgcccagaccttcgccggatatagcgctgctggagcagatgtgccagggtttgtcctttatgttctccaatctgagagctgcatacagatgatatattataagcaacatgtagttattaacttttgagtaaccaaagcgaagcacctgctgctattttcacactggatagcgagtcctccatgtccattttgttgccgtagaagagaattggcacaattcggttgcacaagtccggatgctgtagcaccagatccaactcatccttgaccaccactaaaattgaaacattgagcgatagacgggcgttgttaatttgcatattcaataccaaatctcatgcgatcgctggaatcaataacgtagatgatgccgtggcagttcttaaa

SEQ ID NO: 27707 - DNA, 665 bp, DROSOPHILA
cgtaccgtgcggcggtgtgtgggtgtcactgactgatatttgacaaatgatagcaatggacgagcagcgcggcgacaagatctacggcggatgcgagggtccggacgccatgtacgtgaagctgatttcctcggacggccacgaatttgtcgtcaaacgcgagcacgctctcacctccggcacaatccgggcgatgttgtccggaccgggtcagtttgccgagaacgaggccaacgaggtgcatttccgggagataccgtaagtagtttggctccaccaaaggcacagcccagtggctccgccggcagcagagcgcttacctgcacggcgaccagtcatcgcaagtctgtgtgacctaatgaccggcgacaaatttgcacagatgtacggtacataccctagacgtacgcagttacatgggtacatgcatgtacgtagagcaaagtccacggattacagatcgctcggtatgattcaaatctgaccgttttacacgtaatctcgggcacaactacgcgcattagattagcacacagttcggcatcgattgcgcctagaaatcagattgatggtgttatttctgtgtatattctgattgatctgtacctaaagtctataatagcagtcaaattatgcggcaaaaagccagtcaactcataacttct

SEQ ID NO: 27708 - protein, 71 aa, DROSOPHILA
MIAMDEQRGDKIYGGCEGPDAMYVKLISSDGHEFVVKREHALTSGTIRAMLSGPGQFAENEANEVHFREIP

SEQ ID NO: 27709 - DNA, 27433 bp, DROSOPHILA
tattgttcaaacatttgatgactagttagcaacatccaatattttttatatcgcccatatttacttataagcctcgcggtggaattaaaagcacacccagagacataaatatggtttaacgagcattacagaatcgttagtattcccagtgtgactggaagtcgggctaaatgaaattactttaattcacgcaaactgaaattatactttggagacaagaatgtctcggttcgcacccaaatataattcaaatgtttctacatatacaatgctgtatttatacatatgtagccgctatatatatatgctatattgtgtgacatcattcggaagcatgagattctctagtgactcaaagggtgtgcgccattcgggagattaagcttcgttttttatccatattaagccgggatattgacattgacccatggaactactacatatgtacgacacatatagggtatatatttctgtgacaatagtaaattggcctttaattggggcgaaatatgctagattggctgacccatctgttattgtatttgcgaacattggtaattctacggcgaaacccaaacaggtttggtaattaatgcattcttctggcctggctcattcccgtgaccaccatattttcgtaaagaatagtatattcgtcataggcacttgatatttctaatactatatatatttgcccattttccaacggaccttgattggtcgagagaacgatttccgaatcgaatcacgcactttcactccccaaaatcacagcacaacaataaagtaacggaaccacgcaccttcaccgcacggagatatttactcactacaaatatttatatctgtagctcaacacctgactgctatcgaatgttttggtatttatttttatcgaagtattttgccgaaatttgtgatttgccagccctatttcaatgtaaatatatcgataatcgcccgattttactgaaaaatatttcgataagagcatcgatatttcaaacaaatatcgacccattgacatgcgtcaggtttgtccatccctaacaaaatcgtagtacgaaatatcgaaaacgaaacacatcacgcgggcgaaatttcgtgaagttcagcatttacaaattgtaagcagtggttttatcgaacccattgaccaattagtgggcttctaaaattagtgatagactttattaaatgaaacgagaaaatagaggcgaatacacccgtacagcaaattgaccatcgattttttcacggcattgccggtgacgagaatgcgacgccgttcatacacacacacgcacggacacgaatgtgtgtatatggcgcggcgcttgtgtgtgaaagtgtattcgtataaataatatgacataatcgacgtgtgcggcttaattgacatagtttttgtgcgaagaatacctaaaagtgcgaagagagcgccaaaaaaggcgttttttgtttgtggtcaaggtggcaaaaaggacttgcaccgctattttcccctgcgctttgctccaaatattcgttcctccccatacactctctcgcacacacacaagcgtgtatatttgggcgttgcaggatgaagaactctctttctctctcccactttccttcgctctcttctcgtattctcttgaacacttttgcgcaatttgagtgatttgcaaggcaaactaatgcttttcgattgtttaccgaatttagttaaccccgtttggaagccagtttgtctggaagttacttcagtttagttgttttcaacatctccacttgacgttgcctaacactgcccgccctctctctctcggcttctttgccactgtccgtgcgcagttctcttttgcgcttcattcgtgctctgcccgtcggacgtgtccgtacgattttggattaagttctcgtaggcaattcaacttgaaatatttattcgctgcggtgcaactaaaatttaattcaaagaattaaaagtgctaagtgctgttaggagcggcaattttgcaaaaaaaaaaatattaacagttatttggtgtagtgcaagaagcccaaaagagaacaaaattatttattttaaacatattgcattcaaggcaataaaaagttaaatctattaaaattttctaccctctccctccccttttattgatagtctccctctgtggcgtatgtgtgtttgtacgaattagcggctgaaaaccaaaaaccgaggtgcgagagcgagaatacatttataaaaaacgcgtgcgtttctcctctaacacatacagtgagtgtgaccgttgtatttgtgacctgtgcctgtgttagcggccactggaggatcaacgaatttaaaagaatactaaaagtaccggtgagtattcttgcatctaccggatgatgtgttataatcccgttaaatagtgaatgtcccctcgtgccctgcattcgttttaaccgttatgacgatgagcggcaattcggccggtgacgccatcttttgtgcttctctaataagtgttgtttttgttttttgggtttggtcaagctcacgcaacacggcgtgtgtgagtgagtagtgtgtctattttgttgttatgcttcatagacagtggcgaaactacagattattattcaggggtcataaatgtcatttaagatcaagaacatattatatttaaatttatccggaaatatgagcaaatgtttaaggtgtagcaccacattgacccccattcagacgccactgtttgagcttctagttctagccacttttcttctctctttctcttttttcgggtgggtgtgattgtgtgtgcgtgtgcttttcctttccatatgattcatgcttctttctacctccggctttctatgcgcttgtcagattaaaaaaaaaacccattttccaattctcgtcgctgattttattcatcttttatttggcaatttgttgcgaatgccacttgcaaatctctagccgtgtgcctaatgcacttgggcaataaatccgcctgctggcgcgcatctgtgggcaagtttcatgacccacttttcctccttggtctctcgcctttcagcaaagtaaatagtgaaaagcagcaacaagtgataaacagatttgtaaatattgaaaacttgtttatgccatttgtcagtgcaacccaatgcctacaaaatagactttataggtatcggaggtagttcttgatactcagtcagttcgatttttaaattttttgttgtcattcagagcccatcttgatatttctgtaatttattgtaatcttgaacgaataggaattgataaccttttactttaattattctttaacccaattcaatgcgctatgcttaaatgaaacattacgcttatagaatttaatataatttaaattagcaatgtttcctataaaactttgttttatatatagccttctatagatgttcttatgcaagtcataggagttcgattgtgtgtgtgctctcccgcaatcttatcagaaccttcgcgctggttacgttttcttgttagattgctgtttctatacaagtacctacatatccacattacaacaagccaacaacattcccaatttaagttataaggaatttctcctttgccaccaactaactacctacctatttacaacattcttcgatttctattaccttacttcctgttctatatactcatcatatcaaattcgagcattccatttgccttagctacatattttgcgatacatgacgtcatttcgcacacattgcttataaaaaaggtaaaaaaataaaataaaaatttgctctttttgtttgctggcttttgttgctaattcgaatttactcatagaaatacatgggcagtgggctttatttattcattgcttatgctgcctccccctttatcaccccttatcaagcttttcacttgttcctcttgctctgttgtccgttttcaattcgcaaattagacgtgactcgttggttgagggtttcaattgaggttttttgcacaccgcaagttgcatttagagaattttcgaaaatcgttgaggcattatttgtattgaattccatttgcactacgaatactgaaaaggtgaagcagactcagtgtaaaaagacaacaaaaataatacaaaaacgattgcttccgctaaaaaaaagtgacacataaaagtatctacacagaaaaaaaaacgaaatatgatataacctaaacaacataaagtaaagtacgaaatctttacggattggaaaattctgaatgttttcgtagtcaacgggtcaaccaaaataaaattgactgcctctttttttctttgtgtgcgtttcattctcacgggaggaagtgcatagttaaaactgtaaacaattgttgaggaaactaaacaacaaaaaatgttttggaatggaaatgagacggaaattcgaaattgtgagcccccgaaaccataacaaataaaacaaataagaaaaacgataagaaatgcacttcaagtatacgaaaagactaactttctaacctttattgaggcgtgtccgtcaatgcaaatgcatttgatggggccaaccagtcctaatgacttttgatttgggaactgaaaattgtttactcaagcgtgtgcttatcaaaattcccactgacgtcacatcacttgtgattaattgatttgaaaatggttaggattaagctgaataattttgattaatgtggctgcagtggagctcctctgcgagtctggcaactctggctaagacgaaaaacaaatttgtccaagagcgaatgctcaaaatttatggctccctaaaaactgaaaaataaattctactctgtttctgccccaaagccaattgacgtgaagatgcaacagagtgagacgggaaaatgaaggggagatagccagcctgaaaaccctcacacataaataaataaaagaggcgtacgtgccaagcttcaaaacagagacacataagcaagattaaaaaaaagagagatgttgctgctggctaaacaactgcagctcatcaataaaacagcaagaacaacaataaaccaggcaatgaaacccagctaaagagatagacagagacagcggcatgcacagcgacaagcaataacaaatgtacagttgcagaagcagcacggccgcatcgtgcaacaacaaactgctgcaacacaacataaatcttggaagaaaagagagaaaaagagttgtcagcatgtcgaagcttttacaccctttaaaggttttgcttggaagcatataaaaaaaacttaatttagtaaaaaaaaaaaacaatcagcatctttgcggttagtctttagtattaaatatatttcagttttgagatagatttatggatattaagtaaagttaaaatgtttaaaccgaacagaaaagcatccagcatttttcaaagctttctgaactctttgaaaaatatttaaatccacatcatatgtaaaagataaagatctccctactcaaacaatgccttgaagtgcagtcaactgtgtttgtcactgtttgctgttgttatttcagctttaaaagctggcgacccgcagaaggaaagcaaaacaatgtggataattatatcgaaaagttggggagcgaagcggagaaaaatgtagacaatttctgttaagatgggaagatgatgatgatggagctgtgtgtctgcatttcttgccttcttcaacatttcttgcttgcatttcatctgcgctgcgcttgaacttcaattgaattgtattctctctcctctctttcattgcatatatacccctctctgtcgaccgaaagtgattgaaagcctgttattatggtggtctgatccgactgaactaaatttaaactggaatttaggctaatttcgttctccggttgtgtgggcgtgggaaatgggaaccagttcttatgttcttatttttttcctgtatcttaaaattaccacactttgttgtaattaatgtaaatactatggaattaagtgtaatttacatttgtggctgtacaaacgtgacaagtggctgaccataatacaataaatggcactgcaattgctgcttgctgctcttccgtcaacctttaattctaaataccctgtcagatgattttcctctttttaaatgctaacccatttttgtaccgggcacaaatgtcgataaaaaaaatctggtttttcgaacacaatctctgcactaaagcattgccaaacacgagggcaacacaataaagctctataaaaagaccatcatcattatcatcggcatataacaatgagctgtgagctgagctgaagcaacaataagcgcaaacgtgttgccgcataaatgaattcataatgcaaaaaaaaaaaaaaagaaatattacaaaaaaaaaaaaatgggggaggttgaaaaaagcgattgtgtagcgcacgaaagaggcggcttacataatcgtttatatcctccgagtttgtaaatcaacaccagaagcggctaaactgcattagcaatgctgtttcgttcgtgtctgggctttcacgcataaacatttagagagcatttattggccaatttcattagactgcaattgtgcgtggcaagtgaaatgtgcaagatcacctgagcgcatcgaagaaaggtgttattaaatcaaattgaattgttattcggccatacccatatgcttatcagctcgtaatgcagttagtaatttatatgcaaatttttctcgcttttccatgtagtgattttcctctggcgaagaattccagttatgctttctgcctgcctacccgtcgataattaaattattttattttgtttgctgggagagtcgtctcatatgattgtattgtttactatctactcgtgtgtgtgtgtgtgtgtgtctgggcgaaccgcaatataaaataacgagtagtacgaaaatcttttaacgtgctcgaactaaaaatattcacatgacatcatcgaaaagaggcgctgaccgccgaacagcagacacagcatctcaataaactctctgtttgctatgaaagacgagaaaatcggccgagaaaagggaaaatgctctctgctcggggaattcgttatagaatatgtactttgtcatggaaagccaattaagtacttactttttattaagccaaaataccaggaagttgacagtatagaattttgcacaagttgttagtttgttgtgaaacattttgataaaatattgcttttaattctgttaacttaacgttttcttgttgggattgagcaaaaaaaaaacaaaagttacattattacataaatatcgtactctattgaactttaaccacgtttactaatttcaaatcgtttttcatgcttctttgcagggacatcaatataaaagtattataaccacgcaacaaattcaattttaaggtaagttttagtcttgtgcacgcccatgagtcaagtgctaagcaagcaaacaataacagaacgaagcaaacaaactcgaaacccctctcttgacttattttatattttatctgccggtacatatttgcttttggtttttgcaatcattttgattgaggctctcgttcgtatttattgactcttgtttgctgaggagaggtttgagttaaattcagagagaagaggaaaccacacctcactcaactttgaacttttcgcttacgccacacttgagcgatatttaattatattccgggtttttattctatttttcattgttttttctattttgtattgtttgccaaactaattgagaactaatcgaggacgtgaccgtcaaagagaaataaactatttgtacggcactcaagcggagatgttttcctctttttgcatagatttactattcataattttataatcaacaactaaaggtgatgtcatgggggcgaggtttcttaactttttgtgtgataagctgtttttatatgacacactgatatagatacgcatgtaacatgcgttaacgggaagcaagtcgaaaaagacctaccatttcacataaaaaatctgaaaagggtgaataattaaatttgttattatacgcagtaatagtttaatttcttctgtcagatttcagagaaaaaaagctgaattgccatcagtgctcctagatctctttacatgccacgcataacttcacctctaattcaattaaggatgacctttgttttactggactttttggtactggtacatcatacattctttatgctctctttctgcttcgcttgaaattgaattaaaagccacttaagcgttgagtctgcttggcgctttttataccgactgtttcatttacgaccatttgagtatgtgcgtaatgttatatgtatatatatatatatattgctatatatatatcatatctatgtatgtacaatgtataaattctgatttacccttcgggcatggtacactggctttcagtggcaaataaagggagcaataaacagaaagacagcaacgaagattggattgttttgccttcatctagcactttcataaatgggtcattgaaccaaaccgaagaccaacttcggtttccatttcttttttcattttggcaatcggggtaaaaagtttcctgttagttttgttttacgatcaccgcaaagccaataagaaaaatgtagaagcgggaaataatgaatcttcgcttggttttaattaaaaattcaatggggattcccaattgtagataagtgttgattgcggttgtaaatcatttctatctttcaaaacttctaagatagtttctaaagttttatagcagcaataaatcttatgttcccgttttaaaattgttcatatagttcaaaacttaaaacaaccttaaaaaggttcagcaacctgtaatcatcattatcctaaggtcctgtcgatagtattcaacccttcaataattgccaaacgaaccggatgttgtagtctgtacgtggcagtgcaattaaaaccccatttaatattgcaaatatgcggtcgtatcaagattaagttactgtcgctaaggacatgtgtgtatcgattatccgggcaactcaaactaaccgtaaacacgcagcgggctgcgatcgcgtgtcggggtcaccagagttcaaccaccaatcatccacctcaatgccggggacaagtgaaatgaggcgcgattccttgtggaaatacctgtcccgcgacacgcccaagtttttattgggctttcctattgtccttacagtgttgatactttttttttgttcggcttttccttttcgtggccggcattttcattatcgtcgtgttgccatgcaattttgatggttggcggcgccacaaaatgccggaatggtggcgccaccaatacgatttgccggccgggaaatgtttccacgcggctcgtaaaaatatccttggagtgggcgcaatgtgggtgggaggtggtggtgcttgtgcctcggctgtttatgtttgcgtttcgttttgagttaatgacaggaagtgacgtcatattccaagggggatgaagttttatttgagttgtggtggggaaagagggtgaaggttttgggtgcgacaatgtcctggatgatgtcatactttacaaacaagattgttttaaggacttaacttgtgtgatgaggaaatacaataacaggcaacttttatttgacaaaagtaaatctaaattaatattttcggtgccaggagctttgccattcatattttaacattcactatgcgcaatattaattaattatccaccatgcacgtcaaacaacctcaacaactgtgcagatttcaagtttatttggcaattttacaaactaaatttatgtgaatcaaaaagacgaaaattgtgcaaggtttttttctggcctttggccaagtgagtcaaagacaccaaagcagcgaaagaaatacatttggttggactctacataaaggggctttttcctacatcaagggcagataaaaagcagaagcccgaaagcaaagcaaacaagtcattttcctttcgttcaacttgaccacttgttgttgtcatttaacttttgttttccttccaccagaagcagcaattgtcttatttatgcacttttatttttttgttcatacacaatgggcgttggcgccagtttcgatgagatttatgtgcggattttgtaattcaagacacgcgactcacacgcgactttcggtagacgttcagtattggatctctggactctgagaactagtaaaaaataaactaaattggcgagagaacaggggagaaaagaagaacgtacgggtacggaccagacaaaccggcagcttgttagcaaaacaaacaaaattagcgaggggcatgtgaagagaaaatcccctcggctagaagatctgctaccaccttattaagaaattccacgcacggacggcagaatgcctaaatgtgagaagagatgaagctgcgcagaaccacgatgaagacatttcggtgatgacaggtcgcagatatgcccatgaatgacagaaagcgtgtcacttagcttatctttatttaaaagcttataaatacattaaaagttgaaacgtcggtggcacgagaaaaatataaatattttcttgcttacgaaaagaaaaaaaaaagacacatgtttccgcccgggatcgaaccgggggccttctgcgtgttaggcagatgtgataaccgctacaccacggaaacagttgaacccatagcagccaaagcgagaatactacatttcattcataggccccatgtggaacgaccggaaactaatgaaacattttctttcgttttatgcgattatagtagcaactttcacatcacactatagttgacggcagcagccctatgaatttatacgttaatttgttcatggttcttacgaacggagttttgaaaaccaaatgtttcttttgaaaccttaaatctgatttccatagaaaaatatgaaattcttttaacttcataccttaggcttagtttaaactgaagggtttgtgatttgagaaaaatgatttcttataaataaaaagcataaaaaaagtatctcatgtttccgcccgggatcgaaccgggggccttctgcgtgttaggcagatgtgataaccgctacaccacggaaacagctggaaatcgggagcccaagaccgaacagttttagtgcggcaaacaaaatatataaaaataataatgcaacaaaaacatcatgtatgaatgaaaaagtgcactgcaaattatttatatatgcaaacatttactagtttcacaaaagtaaaatatacacttcatcgcagccggtaggattcgaacctacgctcccagagggaatctgatttcgagtcagacgccttaaccactcggccacgactgcttgtgaagcgaccgcgtccaaagtgaaatataccaactggcatcggagcagctcagccctcttactcattcgtagtgcgttagtttgaaattctggggatggtctggcgcgaaactttctactgcgggacttgctaactgtgcgagttcctattgacaatgtttcgcagatgaacacgtatatattttcacggtgtgcgcgtcttcctagtgatccacatcgtcaattttatacaacaatctagatagatagattttcattatctaggaatttttaaaagcagaactatataatgtcagaacaatataaagtttgacagttttatttttaaaatgagcagtagtaaacctccagagatttagaatctcgatttgtacagtttttttagtttgcctctaaaagtgaagcgactgcctacgaattatagttatttacacttgtcactattttactgctctccgtttcagcaactttttcttatatttattgttatcgccaccatatgggagtggtctagtcttctttttttttttttttagcttaaaaaatctttccacatgatcatcattgttgaatctggccatatgctccactgactgactgagtgacttgttgcattattaaaactgaatgaactcatttgcgagcgaccttattgccttgcctgccttcctgccgttcttacatctcgcacttgaggcgatggaacagctgtctggtctgtgctcgattgagtggaagattacgtaagatctcttccgttgcgcgataattgaatacttgggaaatttaattaacgacggcgtatgtgtgaaaaccatatgaatattgagggtgtttggctctctgggtcaattggcttgagctgtgcaaattgaagtgcaaaatgtatttcggtttaaactttaggtcgagaccatgatatgttatttatattcatagtttaaacaattcaggtaaaagatcatttccttagtattatttagtcatttggttacagtttatcttgtttaacttttatttatgttatcttggtgaaaatgttgtgtttagttgagtatttgacagttagacctgtgctatcggccttgccttcgtaacattctcgacgaaaaacgtgtatgtacatatatgtatgttttttgtttgccggtttcggagccggcacactttaaccaatgaaagacatgggtgtgtcccgcagcaaacaagtgtgatgtaattgcataatgtcaacaacaattgtctgacgctgacgcgccggtggcgacgatgatggcgtcgctgtggcattagctgctcctaaatttaattattgtcttccgcataaaaaggtcgcagagagagaaaaaatatcaagagtgatttggtgaagtcgtctgacattgcttaggttcaataaaccaaatgttatgcaggtttagatacgatttcaaatttacttttgtccattgacacttttgactacataaggtaaccccagttgcgattttttttttttttttttttttgttttgggctattcaacattttttctgtagcattaaactgcagtgcaacgtcaatcgttttacaatgtaatactgcattaagaagttcgtttacccagggtatttaagttgagaacttttgaagtctattgcaacgcgtgagaaatcaaattgtcgtaggaactcttcttctcttgactttaatcaaccttttgccacctacgcaacaagcaactccaatcggaggagtctgaatcagcccacgcgggaaaattcaactctttggctcgttaagtttattcaacgccgacgcacacaaaacttcctgacccgtctgcatctcgttttttctttttattttttgtgtggacacttaaaaatcgtttattcagcattatttggttttatttcaggcaaaaccaaaaacttctcccgccacccacgcacattgcggtggagttctgtttggcagcaaagttcaattaccctaacatcacgatattgttgttaggagcaaactaaaatatgcggcacgcgttgcctgcctgcctgccaatacgtcataattagcaaaacggcaaagtcagcagcgaataaagcctttggcaatgcacttttgccatgcatttgcattgtgcctgcctctttttgtgagcaggttttctttccctaagctaataagctgactacaaagaggtgccgcccacgaatgacagaaacataaaaaaaatgttaaagcctaataagtaatgaaaagtattctttctttattattttatttgtgctgaatagcagagcttcaaataaaactgttataaccaaaatgtttttatttaaagcaaatataccggaattttggctgtgtgtagtttttcttttccagaatttttcctcttttcattccattgcctctagcaatttcctctccaagtcggcacattttatgcctttaattacgcgcagaactaaaaaattgctagtgggtgtaattgtaaaaaatcgggtcagcaataatgcacattaattatggtttattgttgctgcaagtgtgtcatcgtgtaggaatcgaatgaagtagtcggttcgtttttagttggttcgggttgcatttttttggctgagccaagaaattgtttttcgatttatcttagtcgtgttgacattatttatttatctttagcatttttattcgcacggggaatgttacaacaatttgaaggttaaaatttgtggtatttgtacgcaccacgcctaaagatttaaagagcaacacacaatttggtttgtttattttggtttctcgctctttcgtttcgtgatcgagatagctagtagttccttcttttcgttttgattttcgtggcattaattttgggttttctaaaaagccaaatggatctaaaaatagtttcaccgattctcgtttatgctgccgctgcttcagcacgtgtatatggggaaaaatacggatgtacatatgcgtttttcccctaaaatctagaacttattttggccaaaattagaaattaactaaagtggaaatatgcggcagtccattctgtcgccccgccactttctctgctttccccaaaaatactttttgacattcacagggaaacctgtcagttttccgctctctgagagtcattccatatctctctctattggttgcattgcattctcttcgttttccactctctcttgtttgccaccccctttttggtgctactgccctgcagtttttaaggtcagtcgaaaattttccagctgagcgtcaagttgaagaagaacttattctaaattcgggaaaaaccctttttctccatttaattgcagcattttaactgaaatcatgactgaagttgagcaaccgccacagaatggcatagatcccactgccggcgaagatgatgacaatagcaaagcacgtcccgcggatattgaacaggtaagtgcaggccgtcgaagtcccaactggataacaacccctccaccaaacactcaccaccaccactttactttctcctcctccaggatatgcgcgaaatggagcgtcgcaagcgagtcgaggctataatgggctcgaaactgttccgcgaggagctggagcgtatcgtggactcggcgcgcgatggaggtgctggcgctagtggaatcctgcagcagctgtcggacattgtgggcgtaccagtgtccagggtgggcagcgtcttcaagagcagcaactgcatggtgccaatcaacgatatacgcggcgtcgagtccatgggctatgccaagggcgagaagatactccggtgcaagctggccgccacattccgtctgctcgatctgtacggctggacccagggtctgggggcacagatcaccgcccgactcaaggtcgatcaggagtacttcctggttaacccatacggcctgctttaccacgagatcactgcctcagcgctgaacaaggtggatatgcaaggacagattgtggagcagggcaccaccaactttggcggcaacaagagtcgtaagtggctgacaattgaacctataattgaatatatcaaatatatatttatctgtttttaactgccttgcagactttgtcctccattcggtggtacatgctgcccgtccagatattcgatgcgccatctatatcggctgcagtccagtcgtggctatttcctcactaaagacgggtctattgcccttgaccaaggatgcctgtgtgctgggcgagatcaccactcacgcttatactggtctattcgacgaggaggagcgcaatcgattggtccgcagccttggtcccaactccaaggtgattctgttaactaatcacggtgctttgtgctgcggagagaccatcgaggaagccttcttcgccgcctgtcacattgtacaggcgtgtgagacgcaactgaagctgttgcccgtcggtttggataacttggtgctgattccagaggagtcgcgcaaggccatttacgagcagtcgcgccggccgccggaggatctggagaagaagtttgccgccgtcgccgctgccgaagatggtgctgctactgctgaaaaggatgcagccgaagcagtacccaaggttggcagtccgcccaagtggcgtgtgggtggtgctgaatttgaggccttgatgcgcatgctggacaatgctggctatcgcactggctatatctaccgtcatccactgatcaaatcggatcctcccaagcctaagaacgatgtcgaactaccgccagctgtttcatcactgggctatcttcttgaggaggaggaactcttccgtcaagggtaagcgaatgcacttaaattgtacctaaacaattccctaataaaatctatttacttttaggatctggaagaagggagatattcgcaaaggcggcgatcgcagtcggtggctcaactcgccaaacgtttaccaaaaggtcgaggttctggagaccggcactccggatcccaagaagattacaaaggtagaaatcattactttcgaagatatgaagcaaaccaaaaccaccaaccttaaggagattgagggaaaatagttgaaattgttggacaccgaatccttcaactctttacagacattccacttgctatccccatatataatttccatttcgttagcactcagttttagtttcaactttgccactaagctgcaactatattcacgcataaaatttttagagtttaagtaaatgaaagtaatcaatatacaaattctatatatttatatactttggaaatagaattaaaactcgggctaaaccaaaattattttacgtgctttgctagcaagcaaacaaatattgtgtaatgtgcattaatcaaataaataaaataaacaagaaataaaaatttgcatagatgattttgtgcctcatttagggatttcgctgcctcaaaaacaagacaatagcgctaaaacaatgcaaagaaagagaaagaaatttgctatgaatactaatcactatgtaataaataaaacattttttaatttaccgaatcaatgatttcatatttaaccgcattatttttcattcataaaatttttctttgcatgttttatggtatctttcttttattctctttgtgattggttttcattgttattcaaggcacaaaatcatttatgcttgttattttagttaatttatgtttatttgatcattgaaaagtttgatatctaggaacatattcttatgtatgttaaaaataaacatttcgaaaaacacttgcattggaatgcctacgatgtaacattaattttaagactggtgtaaacgaattcacataagatcacacgtgtaaaaatctatcgaacagttgaatgggaatgtttgtttataattaagaatcttcccatattgatatgaatcttagtattcactccacattaaaatcaaatttctttctctttcttttctatttgcattgatcccaccccaccctcaacacacaacacataatttacaatataaaacaaaatatgacagtgggtggctgagggttcccccacccactcaacgccagtgaggatagaagatccactccagtttgtgcctgcaggaaccaatccaagggaatttaagcgtgtccagcaactagtcagtattataatactcttagtcccaatgaactttgttaacaagtggaagctttttcaaacagattaaggacaaccgccgggcagataagatttcagccggaccacagtcgcatattctggagggcgtgacatgggacgaggcgagccgactcaaggatgcaacggtctcgcaggccggcgatcatgtcgtcatgatgggtgccgcctccaagggaatcattcagcgtggcttccagcacaatgccactgtctacaaggcaccgtatgctaagaacccattcgataacgtcacagacgatgaactcaatgaatacaaacgcacggtggagcgcaaaaagaaatcggtgcatggtgaatgtaagttagcaatcatacaaaaccaataaccaaatagttacttataatgcatacaacaacttttgcagataccgacacagacttttcggaatccgaagcggtcctgcaggcggggacaaagaaatacccacaaagcgaacccgagaccggtatgttaactatttagaaactatactgattactggaaactaatattatgtggatattctagagcaccaggtcattgagatccaaacacagcaagcgccagtgccaaggcaggcggaagtcgtgctgagcgatggtaagtccagttttgtactaaaaaatgtgatctacttgtttttaatttttatatatgattaaaattacttcaatcatgcacactataaaacatttcaagtacacttgtccaagagttttgtcttacaagtcattatgtgatcgaaattttatagttctattttttatgttccgttattttgtttatctcatttttatttcttttgttttacttttgttttttgttaactatttgtttaataatttattaataatttaggtctttaagatgctgctatatttaaaacgtattttgcgtagtttttaaataataataatttccttgtagtattattttcctagttttttttttttggtattcttattttatttgattcctaacatttattaacatttttatgccatttccctcttttcgtttttttgctgtattttcgcattataaatttaccaaccacacacaaacgcctaaaactacacacatttcaatggaaaccaacactttcaaattacttaatgaagtcaacaaaaaaattcttgtagcaattgatactatcacaacttcctttctgtaaaatcctcaaaattatttgctgttttgttaaaaatcttaagcttctaattagttatgttttattagttaaatattgtgcaatataattcacatttacacaatacttccaaggaaccaactgttgtacggcgttcataaaatgatttataatttcaacgttcaacaatacgacagcacatcaatcccaaatgttacaacaaaaagaaactttttatagtagaaaagctgcagttttagttaatcctttgttttacaaaattttcgtttaattttccgaatttggcaatttgtaaatcaaaatttgacctttccattatttttacataggaaaaaagaacaaaaccaaataaattggcaaattgaacaggaaaaatgcgaattaaaagcactagttagtattgatatgaaagcgaagtgtgtgtaggctaaaaataaaataaaccaaaaatttataacaaaacgaaagaccagcaaccaacaacaagaagcaaccgaagttctcaacagaacacaaaaattctactactacactaccacaactactacatactaccttttctactactacttctgcggctgctgcgctctataacacaaaataaaaataactaaataatatgcagtttaaaaagaaaaacccttttgagttggaggtgagtgcagccccaaaggtttagtgtgtagtcaaaaaaataaaaaaaaataaataaaaaatcaagaaaatagtttatagaaaaaatgttcagcataacaaaaacataagccacctgcacactaaaccacattcaacatgtcatatcaacttttgctgaatgctcttagttgaatcacaatatgcgctgttagccaagaaattaaattgcagcttgctgttttgttgggttttctccgtgttaaccgcaattttccataaatttttgttttaaactgcagctgttttctgttgattgcttctttagttgcccagcagccatttcgtacattagtgaacacaactaatccgtataccataagtttaaggcatgcttgatcgatactaaactctaaaactcatgcaacactacgtatttatagtttaaggcaactgattacgtctgtctcacaattgtttagcgatttacttgcgatcgtctgtcgctgaatatgattttataattttatttctcaatactattttagccacacttagttttataaacggcgaacgctctcacacagccacaaatcgcaagccgccaactggccgaggtaacgaacaagacccatttgaaagatactccacagtacttacatccttcaatgtactcaggctaaacgcccattgtatataatatcgttgaaacattataataccccatataatccactagcagttcgttgttaatggtgtatactcaatataacccttatataatccacaagcccatggcaaattattgatgcaccacaactaaacactagctatagtttgaggttgatatttaccattgaaataatttattgcggttttcttagttcattacattggttttgggtgaaacgatacatcgtcaactcttttgcacaggaaactcgttgttttaattcaaatgcccttaaaaactgctcgtttttccaagctcgagatatttttaataggtcagacttaagtacaaccaaaaatgggatatgtttttcagatttatggatctgtaatccagtacgtattggcattatgtatgtatttcgagagccgcacttatctaagatgctggctccggactttttatagattgtcacatatacttacaatttttcggcttttcttacctcccacacctgcatttaatgtcgctttaactagacgatagtaagaataatgagtatggagacgacatggagaaccaattatatgagcggaacaggaacgtacacaataacagcaagtgtcgacgtgatctgtttgcaacaaagcgcagggatccccatccatcaccggagcgtctgtatacctatgtctatgctacagctgcctctgtgggccagtgcgtccaaccggaggtgtgttccgctttgttgcgggctctgcatagcgagcagttgggctacctggcgagtagctatcgcggaggagctgggaactcaaatgccaccaccgccagcacatgcactataaccagcgtcacgggctcctctaccgcatcgcgcagaccattgcaaaatgtgaatattatgtatccgcagccgtatcgcacgggctcccattttggattcaattcaccacgccagcagccacgcactgagcataagcatgtgcccagggagcgagactataatgccttgggctaccgaccgatgcaacgagggatcagttacgaggagatcttcgccacacctcgctatgaacagttgtgccaggtgtgtttcgacaaactactgcgccttaagcccgagctgcaaaggattggcagtggcacggctactagtagttgtgcggaggagcaggcaagtacagggagcactcccttgcaacgccgccaattgccgactttgcctgagttatgcgatcatcgtagggaaatggaaaagttgccagaacctccgagggtccaacgtaatgcgtacacacagacacagaagtgttctccatcctcttccacctataatttccttagtcaaatcgaaaagtttaacttctcggaagaatcgacggacatagattatactccacgccccattaacagtgaaagtagcctgttgggactgattgtggaacaggcaacctcgagtgctggagcgagtgccacaagtgctccacctcaaagaatttactgtgcagaacaagtggacattacagaagtgtggagttttgggcgttggttggaaccccaggaccatatgatagcgagtaatgcagatgagttttcccaacagccgctgaccgagcattgcatcacattggagtttaatcaacaatattcgactggcgacaatcaggtcgatcgccaattgatgacacgcgaagagcgtcagcgtcgaaagtctgagttccaggagctttggcaagatcatgtcgagtactttgaatccaaagaacagatgcatacccatgaaaatatccaggaagtcgcgactcttagtgcttatgattgcttagaccaggatataggcgagattgaagacggattcaatgatggaacaatcgctgatgcaagtgatgagttaccgaacattctgcagatgttcgaggatagtcttacattagccggcgaaaacctagaaaagctggtggaaagtaccaaaaaactacaagcaattcacagtgaaacatcaccagcctcttccaatagttccctagccgaagtttgtaatctctttcggtcgagaagtttcgagagcattcctgctatcgatgatactgtgtctgtacaggaaccactttacgatttgcccataaattcaagtatcgaagaagatgacggactgcaacataattttgtacaggaggaaaagcgtgacgacgaaaaacctcttactcccatttcaacggagccagaggaaccttcggataaggagaaggatcttgtcgacgagaaagacatagacgaaaatgaaaatcacgtggaggctgagttccaaaaggctcttggcgaaacaatgcaagtaaccgtccttatgccaatggaacacaaaacccccctgaaagatacagatgaaaatgatcgtttggttgagactgagatccgagatcctcaagaagttagctccttagagacagataaccagtttttcacaccgctggaacgcgaggttctgcatcggatcgagaaagaaagacttgacgaggcggagcctatatttggaaagattgaccatagtattcgcaacaagatgacgccaaagaagctgcaagacttggtcagcgaagagatatttcgcacacaaacgcatgtatacacgaatctaaggacaccgatatcgaagaatatacagcatgacaccactttgactcccagtggctcatccctgtcagctcataatatcagtgcaccgtgcagctcaatggcgcacactcatctagtcacccgaccaacaccccgaatgtcgcgatcctggtccgaagatcagcaaagtgaggatgacgatcaaaagaagaacgaagcgggagaacggggatacattgacaatgacactcccatagatcgagtcatctcgtctacaacatttgtgtgcagaagaagtccaaccagaaagcgcaactttattcaggagaatattcgcaatgccagcagaccacgaattgcagccggttcgattagaaaacataaaagcaacatcgtaacttcccctagagccaaatcaagcccatcctcggtgtatacttttcagtgtggccaacgggatagcggagcacgcctatgggttgccttgccaacgtctccacgtggtcaaaacgatgagaaatcgtctactgcagctcgggctttgtacaccgttcggggtaatcccccatcaccatttgccaaacgtcgtagacccttggttatccttccaccaatgcgtaataaaaataaagcccataatcgcgagatgagctcatctaatgaatctctgcacagaactctttccagtagcacgttcaatgtggacgatgatgaagatcctgcaaattcggataacatttcaatgagtacctttcagttggaggaaggtcaagaagtatcatctcctgcaactcaggataataggaatgggactaacagttctgtgtactacagcgcaaacgataccacgcgagaagagagagaatcttcacagccaagcagggacgaagcagaagagaatcttggagtcatggaatttatgcccgaatcaattccacttttggaaataccagatatctgtaaccaactcgatgaagacggatcatcgttagaactcgcacgcttagcaggcggatttgaagtgggtacaacagaagacgaccaagtcgaagaagtggaacaacagaagaagagcatagataacgaatccaaaaatgttctgcctatgggaatagaagaaattaatggcgttcaggacagcatttgttccatgcaggcggatattgataaggatgatattgttaataccgatgatcaaccctcgacttcaaaagcggcaatgaaaaaaattcgcatatatggtggtgcggagcccgaagagactcctcattgcgaagatgaggatgtggtgacgctggaaacggtttgcattgtgcgtggtctggagatgtttgtgcgagaggtggagcccataaagcaagagacttcagaggaactatcagagcttgggggactttttgaaaatgggttaattgatgaaggtggcgaggaggccatgtcccagtagcagtgaaaccagaagttgatgaagaatttatgaaaaaatattgaggaacgaaaggataacactaactttgaacacttttttttttgaacattttatattcgtttatgattttaacattgcttgtcattaccattttttgtactatttttcatatatttaacattgtaacattgaaaactttcttcttttgtaatgtaatttatagaaccattaaaaatgtgtgaattattggttttgtactcagcaaatttatgttaagttataaagggtatggtgtttatctttacaattatgggttaaaaaaaatcgaacattatgggtttatattaataataagacattgtttaaatttaattattagtagtaaatattccatcataatgtcttagaatatgtcatccagtgtttcacgtcccttgtcctgcgtccagtgtgtaaattatgttggtcgtgataatttttggaggttcaggtgctcagaatcatacttacattactttctatatccacatcacccgccatttgatatatatcgattctagcacttgtctctcaactggctcaaaagtatgcgttcctttattcgcctggccaatacatgtatgcctgcatgaaaatggctccattaatgcataaggtttatgttatacacaaggtcgagcccgtcagcaagcacaactatccgccagttaacgatggcaatatgagtattcatcacaacgaaagtggagccggattcatggcccaagagtccagcgttattagtagcacccccgtacgcaatgccttggcatctgtatcattgccggaagagaggaatcattctattttgggcttatcatcgactccgtatcgcaccatctcgcatttcgggttcaattgtccgcttattacgtcaccaaccattctcctgcatcccgaacatcgatccatttggcaacgggtggccgagcagcgcgagaaggttgtgtccttcatagatctcacaacattgagcttggacaaccgcaagctgctcaatgtggtgacatcaacgcatccaacccagtgccaatcgcaatcgcaatcctttatctctgagaagcacattcagctggaagttacgccaccgaagcgaaagcagcgtgtctacagcgccaccatcagcagtggtctagacgacagcctcgatgagctggactccctgatgagtggcctagccatcaatatgccgcgcagtcgggagcaggacagcggtctgtaccgcagctacacctttctacccagtaatcatgctctgcccaaggatacagatgccaataatagggatcaaacggatcgggagcgaccagaagcggagcaggaggaaagttttcactgcgcaggcgacagtggtattggcgattccaccggcaggcgtccgcgtctggccaccaccagcaatgattcgtctattcaagaggccgaagcctatacccagggcaagcacgtcaagttgaccttgagcagctcacccacgccgacggccacacagtcacctgcaaccatcgaaattcttatcaacgtatcgctgcgcaatgccgagtgcgtccaaacggtccagacccatgagcaggagtttcgcgccaagttggagcgagtaatcgacgaggagatccactatatttcgcagcaactcgcatttaaacagcgacaggcagagttgcatgaacaacagactacatcgcgggctccaatcgctacgccttctttcacaactatgcatccgccggcaccggcttcttcatcatccatggttcaccgcagcaactcggcaccagaactgtgccacacctatagctatgtggccgtgggcgatttgtcgaccaaacaggatcaagcctctccccaactgccagcggagggtgagccgttgaatgatatactcagtagtttggagaaggaactggagcgtctgctgaatagcgtggtgacagcccacatgctgcacaacaaggccatcatacacgagtgccgggctcgcttctcgcagctggccgatggaattgtcagctcgtagatacatattatgattttgatggaaaatttacatcttcgcttttgttgtgatatttgaaaatcgacaacagtgaaatgattgtataaagcaactagattaagtttaatgatgataatttggaaatcttcaaatcgaactaatgcattttttacttctttgttctcttaatttaaatgttaagactgtaacttaagcacaatatgaaaatgcaaagttaaaactgaatctgagccaaccattgtacatttaaacatctgtgaaattgttaagtttaatttttgtcgaatcttgattttcgtttcatatttttataattaaaatataataaatatagttttcattatgtttaatgtttttaagaaagttttaggttaagtgttcatacttacgaaacattaatttcaatcagttaactttaatcagcgcccaggtaaaataatttcatttattatttatgtttgtgttttgtactgcatgtctgcttgctttttaacatatattgctgatcctgctgcatgtcctcgtgtttgaatagcgaatcctaaactccatctatgtacttatacatccacaccaatcaaaacatttaatacatgtacatgttttagttagattattattcgtgcgtgtctcatatggtgaaagtaattacgaaattaatatcaaatattttgtgtgcgtccactgagttacatttgtaggagacccatgccaaattacactgctatacaaattactaacgacattttcgacccttttgcaacaggtgaaaacgtacaaaatggcgatcattcggaggcacacttgagcaccttctcgcagagcagtaaagaggtaagtacatccgaactgatcctgcgatccaagatctacggatctcttcttcaactcgaacactcacaagcagtaagctgggtggtaagcgattagcaagtagagttgctacatcgacaagacaaccagttttaaacaacatcatcatgcattgagctaacctcatttgatttactaaccgaagcgcaaccgatattctcactgcaaatttctattacggttccaggatgtctccacggacggatcccccaagaaagacaagaagaagaagaagggtctgcgcacaccatcgtttttgaaaaagaagaaggagaagaagaaggccgaggcctaagctgaccatcagcgtgatccgtaggagtagcaatcttgaccaacctcccaccatcagcgggaaccgagaaaaataacgacaatgataccacgagaaaatggaaactttagccagatcagcaaaagaagcattatataaaaaaaagagagaggcctaaacaagcaacggatgagca

SEQ ID NO: 27710 - DNA, 2172 bp, DROSOPHILA
ttcaaacaaatatcgacccattgacatgcgtcaggtttgtccatccctaacaaaatcgtagtacgaaatatcgaaaacgaaacacatcacgcgggcgaaatttcgtgaagttcagcatttacaaatttctccctctgtggcgtatgtgtgtttgtacgaattagcggctgaaaaccaaaaaccgaggtgcgagagcgagaatacatttataaaaaacgcgtgcgtttctcctctaacacatacagtgagtgtgaccgttgtatttgtgacctgtgcctgtgttagcggccactggaggatcaacgaatttaaaagaatactaaaagtaccgggcacttgtctctcaactggctcaaaagtatgcgttcctttattcgcctggccaatacatgtatgcctgcatgaaaatggctccattaatgcataaggtttatgttatacacaaggtcgagcccgtcagcaagcacaactatccgccagttaacgatggcaatatgagtattcatcacaacgaaagtggagccggattcatggcccaagagtccagcgttattagtagcacccccgtacgcaatgccttggcatctgtatcattgccggaagagaggaatcattctattttgggcttatcatcgactccgtatcgcaccatctcgcatttcgggttcaattgtccgcttattacgtcaccaaccattctcctgcatcccgaacatcgatccatttggcaacgggtggccgagcagcgcgagaaggttgtgtccttcatagatctcacaacattgagcttggacaaccgcaagctgctcaatgtggtgacatcaacgcatccaacccagtgccaatcgcaatcgcaatcctttatctctgagaagcacattcagctggaagttacgccaccgaagcgaaagcagcgtgtctacagcgccaccatcagcagtggtctagacgacagcctcgatgagctggactccctgatgagtggcctagccatcaatatgccgcgcagtcgggagcaggacagcggtctgtaccgcagctacacctttctacccagtaatcatgctctgcccaaggatacagatgccaataatagggatcaaacggatcgggagcgaccagaagcggagcaggaggaaagttttcactgcgcaggcgacagtggtattggcgattccaccggcaggcgtccgcgtctggccaccaccagcaatgattcgtctattcaagaggccgaagcctatacccagggcaagcacgtcaagttgaccttgagcagctcacccacgccgacggccacacagtcacctgcaaccatcgaaattcttatcaacgtatcgctgcgcaatgccgagtgcgtccaaacggtccagacccatgagcaggagtttcgcgccaagttggagcgagtaatcgacgaggagatccactatatttcgcagcaactcgcatttaaacagcgacaggcagagttgcatgaacaacagactacatcgcgggctccaatcgctacgccttctttcacaactatgcatccgccggcaccggcttcttcatcatccatggttcaccgcagcaactcggcaccagaactgtgccacacctatagctatgtggccgtgggcgatttgtcgaccaaacaggatcaagcctctccccaactgccagcggagggtgagccgttgaatgatatactcagtagtttggagaaggaactggagcgtctgctgaatagcgtggtgacagcccacatgctgcacaacaaggccatcatacacgagtgccgggctcgcttctcgcagctggccgatggaattgtcagctcgtagatacatattatgattttgatggaaaatttacatcttcgcttttgttgtgatatttgaaaatcgacaacagtgaaatgattgtataaagcaactagattaagtttaatgatgataatttggaaatcttcaaatcgaactaatgcattttttacttctttgttctcttaatttaaatgttaagactgtaacttaagcacaatatgaaaatgcaaagttaaaactgaatctgagccaaccattgtacatttaaacatctgtgaaattgttaagtttaatttttgtcgaatcttgattttcgtttcatatttttataattaaaatataataaatatagttttcatta

SEQ ID NO: 27711 - protein, 479 aa, DROSOPHILA
MYACMKMAPLMHKVYVIHKVEPVSKHNYPPVNDGNMSIHHNESGAGFMAQESSVISSTPVRNALASVSLPEERNHSILGLSSTPYRTISHFGFNCPLITSPTILLHPEHRSIWQRVAEQREKVVSFIDLTTLSLDNRKLLNVVTSTHPTQCQSQSQSFISEKHIQLEVTPPKRKQRVYSATISSGLDDSLDELDSLMSGLAINMPRSREQDSGLYRSYTFLPSNHALPKDTDANNRDQTDRERPEAEQEESFHCAGDSGIGDSTGRRPRLATTSNDSSIQEAEAYTQGKHVKLTLSSSPTPTATQSPATIEILINVSLRNAECVQTVQTHEQEFRAKLERVIDEEIHYISQQLAFKQRQAELHEQQTTSRAPIATPSFTTMHPPAPASSSSMVHRSNSAPELCHTYSYVAVGDLSTKQDQASPQLPAEGEPLNDILSSLEKELERLLNSVVTAHMLHNKAIIHECRARFSQLADGIVSS

SEQ ID NO: 27712 - DNA, 16114 bp, DROSOPHILA
atttatctgttaattgctctgttatgttacaatgcattgtatggatttatagcttctaaataaataaatataaaaaaaagttaatacgttgtaaaaaggctacagtgctgttaagtaatatgtaaagtaaagtaatgttgacttgtatgttgggtacatttggtgatttaaactgcgcttgaaagtaggcaacgatttttatccacattaagcacgactaaaagctcacagatatggtaaaactactccgtcagtagaaaaggacggagtatacaattttgagaagaattagaatttataacaagttttgctattcagttgtattaagttttgatatacagactaaaacgttttatatatcagatccaaaaataagtaatactaaactcaatgcatagtttaatacaatctttatttagcgttcatattaaatggatcagagctacgatattaattctagacttctacataggactaactgctaaatgttctattaagtgggttggtggggaagtgcggaatactcataaaatatttaagctacttgaacaagataatgtttatgataaagacctaaatggaactacattataaacgaagcgataatcaatatctgtacatacacatataacttgatggataagcacatacatatagacgcagatttgtacaacaagaattgctattagttatttacaagaaataaaaactaagtgccattcaggcagctcttaaactaaaaaaccccatttgcgacccaaaattcaattaaacatagctaattcatgatagttagctagaactaagctattccgaaaatacgtttcagaaagtcacacaattagctaaacttaattaaacgaaattgcaaacaaggccgagtagtactaatgtctaaagtcttttcaatgccatgattccaaggaaggcttcaagtgagggtgcagtttaggaggaggaaggagatcacatcacagagccagtgtccagatttttaactttacgaggtggccatcagtttggctgcctggatgacgttgtgctggtgatggtagccagccagttcactggccgctccgccagccatggcggttgtggttgcagctcctcccagcgcaccgaaggtgcccccaaagtagcagttgttcacatagtcgtagttggtggcactcgcctctgtctttacgccgtaggcggccacagcggcagcggcatggaaatgatgatgtgccgccgctgccgtcacatggtgtccatgggttccgccgaggtggtggtggtgctggtaatggggcgagggagttccgttgctcagggccggcgtctccgcactgtgcgatgtgtaggcagacgcactgcctccgccggaactgctgccgggcgtgtagagctgcgttcctgccgctccgtgaaggtggcgggcactcagatgtgcctgtccagaggatgatgtcatgctgtggccatgttgctggtgctgctgttgcgtcgtcgtctgtccgtaaaggggaaagcattgttggtgtgccgattgctgctgctgctgctgctgttgctgttgttgttgctgttgctgctgctgctgctgctgcgcgctgtgatgtcccatcaaggtgctactactgctggtgccgctcttcatatccgtgtgcagcttactgaggctatggcgctccaggctgagcgagggtttgagatctgtagatgggcaaacggtgatgagtgtctgggaaaatcttgagtgcttcctctcatgctccacttaccatgctcctccttgcactccttgatggcctccaaagtggagcctgttccggatccagtgcccgctcccaccgccgaaccacttcccgttttcttgggctttcgtttcctggtctgaatgccatccttcctcatggccagtggtctgttaacaccgtgcaacttgtagtacagtccgcaggcattgcacacgggttcgccatcgttgttgcgcctccaaagtgtggtggtccgagtgccgcagttggtgcagcacaagcccatcctccgagtggcagtctaaggtagggaaaacgaagattagcacttaaatcttccgaagatgaaaggggtctactcactgcactcaccaggcgcttgctaggcttgatcagcggccggttcattccgttcatcttatggtacagtccgcaggcgttgcacagatagtgtccggttccatcccgtcgccacaacggagtcgatatggcaccgcaattgacgcactcgcgtccctcgccaaactggaagtccatagcgctctcgtagggcgaggatctttggaagcccgacggatcgtaggcactgcgccacgagcccatcatcacagcggcgtttggcgagtagaactgtgcatgcgccgatccgaatccttccgtggtccaggcattctgcgccgcagcgcttccaaaatgagcggccacgtggttgtactgtcggttggatggcacgtaaacgggagcgtttaccgcctgctggtgatagccggacaccccgactccgactccggcgcttgcggcactaccggcggcagccaggtccgtgtatgccgcaacggcgctactgtggtacatcttgacggcggcgacgtgggtggcagaagcggatgcggatgtggatgcagaggcagccgacagcgtcacgttctgatagtcgccgctgaagtggggatagtcgcgagtcgactgctgatccgatgtggactgaaagaataaaggacaaacatatataagctttatgttaaaaataatgttataattaaaacatatattttaatatatttaaaatatatatgaataaaatatataataaaatgggtgtcgcctgtccgtaatgtaaatttattacattataactaaatgttctgctttaaattcgcaaaatattaataacttaaaagtagaggcaatttaaggtacggcatctttcagagatcatcttcccttccatccctttaaatcccttttccaactccctattccatctctttccttcagggactgtcattggatgctctgccacttgggcaactccccttgcttggcagccattttggatttggttcttgctgcagctcctgcggctgtctcaacacccctgctccgaatgatgccccctcctccacgacggaacccgttttcccggactgcgccctttcgagttggcaactcgagttaatggcgctctcagcgtcttgcctctccacactgctcgtgtatctgggcatccgtgagtttgtgcatctgtatctttggcttcgcagcacttatctggtgcgtaggcacttcgatttatgggggggagatgaagggacatgccataaagtgtcatttgaaggcactgggtacttactttgaaataaaaaattgggataaaaaagtacgcatatatatatgatttcatgaagaatcagtaaaacacgtatacatttgcttagctactatctaataacaatttaaaggtactattgccaaatattttcaaacttaatcaatacattggatattcagcgaaacaattgctttttattttactacagttcttcattgttcattcaacatttttgcaccaaatgaggataatgttttcaagtggcgtttgctattttcccccacatacacttacatttgtattcctatttcagaaaagttcaacagccaaagaatcaaaagcgcggacaaaaaaaaaaaaaaaacaacgtaactcgacagcgatcatcgaaatctgtgcttcacatcgccttcaattaaggcgccaattgcatatttttatttatgcggatatattccaatatatttttaaattgccttcacagtcagcaccaacaaaaatcgaaaaaagaggggaaaacatttgacgtctttatcttatcccacaaatttaatgcgatgatgtatgaaatttttaattttcctcattcacattgcctcgagggggccgcaaataaattttacttgtaaacagatggccacttaaggggcggggtattcggaatggcaaagtttggcaatattcatgaaattaaaaaatttaaattgcagttgaatgtaattgatggcaggaaagttgttgggcaagaattcactgcaatggattagtggattaaaatgccgtcggcaactttgatttagtataagacaattcgaagatacctatagtacctatttattataaatatgtaaagcttatatgaacataaatatatattattgttttaaatggaagtatttgtgtacaatttaagttgtttttatcagttctcataatcattcttaagatccttttgttgcgtatatgtacatcgttatagtacatttaattttaaaatatatatctgtttaattgacatgttaatttttagtaattaatcatctgactttagctttaatttcccaaagttaaatcaaactgggataatccaacagattgatcgagtgcaacgtgacgtatgagcaataatatttaagactcaacacgcaactgtcaaaacaaattaattgtgtgcatagaatggggcgagggaaagggagagggagagggagaggggataggtgagtatcggtgcatcattttcggctgcaactccccaaattccagcggagcctgggtgcgaaagagacggcgcgacggtggcaatcaaagagttgaccacgcgtgcataatgacgtcgctcccttcagaagatcactcgatcaaaggagcgccgagtgagagatgcgatggcgatggagtcaaagtcggattggaagttgctgggcgagatcaaaggaggcggcgaccacacgaaaaattgtcaacaagccggtcaaagcgaaggaaggcaaagcgatgagaggggttacctttactacggatcgaaaggatcatgacgtatgggatcccaatgggcgagtcgaggagaggacgcttggcgcttattaaaaagcgatcagcaaaagggacaagtcgcgaaatcccccaaaggaggcgaggaattcaaattaacagccataaaaaaatcaatttaaaaaagtgcacttagcgaagttgttgtcggaaaagtgctaaaatgttaatatatttgtacataccaaaaattatgagaagtgtaagattcttttaacaaaataattcatacgtatcatattttctttgaggtaaatcgaatatttttttttataaaaaaatatgaatgaatttatttcaagtgtagagcagacgtgaatcaaaagaggataccgaaacctatagctataccaagtataacgttaataatttgtcaccgcaaatgaaggaacaaaaacaaacagagaaaaccacttgagcgggaatggccgcgcaaaacaacaaacaaaacaaaggccgaggagtcagaaccaggatgagaagaaggaacccatagtggaggaggaggaggaggaggaggcatcgggggccggcggataagtggagaacgaggatgagcggcgctttgagtgcttgtatcttgttttcatcccgctcttaagctggcgctctgccgtcaagtggcggatcctgttttccactcaccactccttgccacttcagccacctccacttgactcattcattcattgatcttcgctattcctggctctcaccgtgctttctactgcccctttcttcccactcccctccgcggatccttcaccaagctggcagcttgtttcgattttggattttgttttggcctaatcgctaagccatttaagtttgccgcctgtcgaggctcatttcatctatggatagtcattttactacaactaattgatgcaagtagattaaggagttattaatgtcgatgcgatttgaatcaactatttgaatctgatcaactattcagcggtatctaggcaaactaaagtagagtctttaagaagtatttacacttttctgttaaataaataataccatacatatatgaaatcttgtattaatcaaaaataaagtaaaaccattagttcaaaaaaagaatactttaaaaattataaagtattcttatagtgggactcaagtatattatttgtattatttgtcatcaacatactgccaatttaaaaagtagtttttatgattgaaagactacatcaggtttggaacacgatatgccagcccaaaaagaagctgtagcacaagttcggtggcatattaacaaaaacgtgaaaaacttggagtaaacttacatcgccatcactcagtaagatgcccatgatttatggccaaaaaattcgcgatcgcagctcgtttttggaatgattaatgggccacgcaagcagctcggttcaagttgaggttgaaaccgattcggattgagcttccgatttggatatattcgatttgatacgattctgctgtacagctagttatgttattgatatggacggtcgcgttgggaagcgtaaataaataatcgtatcacaaatgcattcagattaattgcaacaagctccgaaatgttttattgcacttttacacgacgtttgtttattatttatatggcattcattttatgggccttgttgtaagacatttgattaatgtggtctataaagcgataaatttcgttttaatccatttacgagcacttaaccgattccggtgcttttgtctctgttttcttaattttcgttgtctcctgtttaattatattttggagagcgggagcacaacgatccgacttccttgaggcgaacaaacaaactaaaaaacgccccgaagtaaacaaaaacttaatcccaaatatccagatccagttccatccgttgccgttggcgctgacgtcgacgccgactgcggcgctggcagcggatcggcaagaagtcaacggcaacaacataaaaagtcaatttcatcaatgggcagtccgtcgtcatcgcgcctctctttcccgctcccttcgtccactgtcacaatgtcacctaatctccacgagtgtgagcgggatgcacttggctgacaggtaaaaatttgtaggtgcatttcggaacgcagacgctggcagcgacgtcggcagtggcgctgactcgaaaattagtcaatttcatgtaagtcttgaaaaacgatgtcccgcacacttgagccgggaaatcgaggcaggtccgcacttgagaccggagaacggtaggcactctaccactcgtcttccctaatccgcttttccaaaccccgatcccgaatcctataccatttcttatcctattcttacacagagagaaaagccgtggaagatgtacactttgtttgatcaaaaaaatatatgcaaataagcattcctaaaatatattatattttatatttaaaaatcaaaaatgtttttatgaactaagatttaaaccacctaatatagatacgtttgtgaagatattcagttacattttcttacttttctattcaattgctatttatttgatctcaatatttacttaatattaatgtcattttttcctgtgtgtgtaacgaatcagaaaaccgaggcgatattgtgggtactgaaggtccagcccattgtcagcagctcattaaatggactgggcgtgtgtctatgcccgagaaaggatcacaggatctagacaggctcgaattaattgatcgctcagcacagtgtgtgtttatatacctcctaatggtaggcgattaattcagatgactcaaattgcaagtaggactaggggaatcacaatttattgttgaaaaatggacacagggtcgagtaatttaatggggttatacgcgacttaaatacttaaagataaaatagtttgaaaaatattttcttacgatgattaaataacaaatatatgaaatagcacacatagaagcatgaaacagttttactattaagtgcataataaatgaatattaggaaagaatattaaacacataaatgtacttcaaatcaaattatttaaggcaaaacattttataaactgaaatcttttgagataatttgtagatttcaattcgtcaagtcctgagccattagtttcctaattcagatcgaccacaaatcactcgcaaagcaagcggagaccctaggagtcgtcattaatcaagcaatttgccttagtttctggcaatcggccaaaacaagaaaaggttctcggtgagcgaaagagcggccagatacactccattaaaatgcaaagcataggtggcagaaaaggaaaaagagaacaaaagcagggcgaggaaagtcagtcagtcacaaagccagtccatggtaggagaagatgtcaaaacaaaaaccgcagggatgggcttttcggagaaggaacgcggaggaggcggacatgcgcatatttcaatccgcgctgacacatcctgctgcgctaatggaccttaatttgtgaacagctttatatatcatgcgccagaccgttaatgtgatcatccacacgatctgaaagcgactgcgaacttgaagctggagttggcgataaagtttttatggggcttatcgaacggaatggggttggcacgcgctttcctggaaattggaaaaacagccagacgaaaggctctggagaaagttcaggataggcactctcaggcccattctgagcccattgataacgtgcagacaaatgataattgccccggctccactctaatccttctccagccatggaaaaatctttcaattgactccgttctcggggtcggggaaatgtcgccagaattttcaaagtggcgtcaccgcttatccgccccggccgacccctttctccgactatctcctacccccgctcgaagggtacccagtgaagtctaactctcgggtactttgcatctcgatgatcacaattcccattgatcgtcatcgccatcatcgacgtctttctaccccgctcactgggtacatggatctccctctcggcaaagatgaaagcgatctttattggtttttgtagtgattttaagtggatttgtggttcgattcttaatgccgaagtgcgccaggccagcctcggattcagagatccagagattcggattcaacctcaacctccgtggccgtggctgcgatgtctctgcggttatatcgtttttattcaaatttgtatgtttatttctttctttatgcgtaattatgagaatcttccagctgtcgtcggcagacgaagacatacttggcccacggctgttgagtgttttaggtcgtttgaggcttgtaattatggactttggttcgtctttaatgtcgcaaatgcatctagccgggggagtaaggatggaggttcagatgagcagggttctttgaacgcatttccatcacaacttgggaaaggccagtgcggctattgacgagttatccggcggaatttagtgaggagaaagcgttttatgagtacttgcagtcatcatgacacattttaatttataattagaattattaaaagttatataggacattataaattatgttcttaagagatctgaatttgttaataggactaaatagcattgacttcttatcataaatttcacgtatttcaaagcactacaaatgcaaactagtttttatttactgctagaaaagtttagttattttcctagcgccacgaaagttgcgatctggtttcgttatcgcagtaccattaggggctcttttttaacaaccgccgcagttacccatcaaagtaactccccgagctccagttttcattgcgccaaccccactccccccgcctctccttggccagcccgcactcagttcaaggagacacttgacatggcaactaaaacgcagttgaagtgcgacggctacttacaaatttccgaacaacaaaacgcggagagctagcaaagaactcaatttgaatatggaaagataagtgagcccccagcccctctctgtaatgattgttccaatcgctgatttttagtgtgtgtcagtctataaacatcgctttggatagaggcgcattaatgcttatcaccgtgacttcggcagggaactgatggcggaaatggggacttattgcaactctggtactgataataatacatttgactgtgcattttgttttataattaattacaagggagatacgcgtatccgtgttcggtgagcgcactcttatgttgtcccattttttgtaccttttccatggagcgtgtgaataacgaaagactcaagcaacgaactttattcgggtatccttagtagccagcatagatggcgtctcaatcggatatatttgatctctgccgatacaacgataccaaggaggtgtccccatttctccctaatatcattttctacactgaaaaaaaatcctatcactctaaggttactgaatgttaggtaaaattatgaaaatgtttaagattttaaaagtattattgctgtgcgaaggcagtgacaagttttcggcacgcggtccgacatattcagattctcgaagaatttgcctcgaatgtgtctctcgattgggcccccactccgccgttcgttctgtcggctcctgagcaaagcttttaagtgtcttggcgtcggcgcggcttatgtcttcacgtctcgctccctcttgggtgacatttacatttgtgagatcagagagaaacacgcagagaaagaggggcaccatggggaattaattgctgtggaaaaatcaagatttaatcggcgctcttgactgtgaaaagatgtcgcctaattttctctagccattaattaattaattatggccacctaatgacgaagaaggccgatgtacattcgggagtattcgaaagtttttaattagccttttggcgccgaccccagccacagatgaactttaagcatcagaaatatcacgataaggttcaactgcaggcggtatcgatatcagttttctccagcagaatttattgttggaggtcgtgcaccacagcttcccctaagacccaccgatatgtccggagattatggctcccttgcgtgggttccacaaggccccgattggataaatccgccttgatagcaatatcgccatgaataaggcgagcttatcggactgactctttgtattcagactcaaaattataccatatatgatttatgtggaaatgcgataggaatttaatcttgcgccactggtaaacaatatttgcggataaggattggagaacagtgaccgaatgtttcgattcgtgcttgacatggatccgagaaatattattattcatatttaaacaaaaacaaaaatgatctgcagtctatttcctaataacaatattcaaaagcaatgaataatttattgaaaaaaatttacttaaagaaattctgttagtagattttcaaaatatagcgcatataacccacacagcaagcagctcagactgctgacgccaagttcccggctaccgagaagtaccaggacctcgccaggatctcctatctgctggtagggtccttggctaacacgcaattagccgtcgtctcgcagagcacggcaggacttccatgacggtgggtcaatgggtatccagtccagggctgtacttcctattgggctcagtgtttctggcccgttgacctgctcgatgcaaagtgcagccagggcatttatcatccgcctgccagttgtttctgccgccgatacactttccacttgcgtgctgcattctcggagccggctctacctgaatgaatatggttatggatatgtctacatgccgggttcggttcagtttggtctacttgggattgtgctgtgtgggctggtggtcagcttggcgagcgagtgttgaaattgcataattaggttgggctgtgcagtttgcgttttagccaagtttgcctgggggttgctcgagcagagttgccatgtcgctttagaaaattaagaaaatatttatttctgagccgttgacctttttattcaaagttacggaaaaaaatgaatgaattactatattatacaagcacaagttagaaatgtaatttttctgtatgcaaatattttcgtactttaaagatatatatattttggttgattcttctgtattagatatcgaataattgactcaggtgcctggtaaccctacctctcgatgacctttgacttggcctcgccaagcaatttgggttacgatttatgatgcaattcccgaaacattctttcgggccatagctggagacaaagtcagagccatttaactagttttgttttgccttttttcctgatgcttgaagccaatttcagttttatgggtttttgttggtctcataaaagtgtcataaattaaaaggcgcttaaacacgcacacagatccaccatccaaaaacccactgcaaatggatggaatagggatcatgtaacctgtgccactggtcacacgcagcgcttttgactcatgacctcctccgatggcatagagggccatgagattggctagcctttggcctgcttttatggcccctacggacttgcctttactgttttccacctaatgattttatggcactttttgcaatattttcctgcgttcgggaatctgccgtcatgttgtgtcattgtcaacacggtccggccctatgggattccattctccggcctctcggatgtctgggtcatccattctgttgtccagttagtggtggcgccagcagttaattgctttatggaatggcacttgtaagtgccttaagaaggacgacaaatgcgtggcctctgctcggaagtgaaagtgaagcaaagggttgcaaggtaactaattggcctggtctaggataagtttaaaaatgatagggttgtcaaggttttaacagttcaaggagcatgaatttatttattttttttttaagattttttttccatttgccatggcttttcttagaaattgacaattcttcttaattgttatgtcccaatccctattttgcacaaaaattaacaatattattaaaaaattgttatttctttaattattaccattaccattttaatattgtagattttgtttgcaaaatagaaatatacacgcagagaatatttcatatctacatataccacaaatggtaggcgataagaccactttaagtgaaaccaaatcatagataaattctattcaagatgcctaattgtaaccaagccatttcatttctattctttttctctaaaaccccctcgctaccttcattgtcagctgcttacaccttgttctaatttatgtgcattaccaaagagttttggccatgtttcgagcggtgaggagtcgagaccctaatgaatagtgataccagttaatgttaatgttaattcgaatgttaatgactgccgtccgttgttctcgcaagttttgcactggagtcttttgttggggttggcccgagtcggcaatatatgtatctgcagtgcaattgtgcgagtaattatgccaactactggcactgcaagtgagtgttgaaaaattcatgaaacaagagccagtttttcactgttttcaacggcttgtaacattcgactgccgtttggctggctcccatcaataacgggcaagcaaatggaagtctgaaagatttttgacacttggtctttcaaaggggagctaatcgaaacaaaactgcactcatgtcaactgccaatggacgccaagttcatatcaaaaccccggcgacaacccctttcctttgctctctgacagctcaaaagttgatcggaaatttatggcatttcttgctatattttatggcagttaatgccagaatataaaacgcaagcgcataaattacaattcaattaaattattgataaatacaacaatgcccgcggcagtataaatttgatatatgcccagccgctaatggcaccatcgaaaatgatttagttgccaatttttgtttgaaaatccaaatttacaaccctttcaccccgttggcttctgggtatatgaaaatgtatcttaaatgatttccaccagctttgtcgtagactatcgcgaacgagtttatttatttagatcattatcttaacgcagtctttacacgttcaacattagtcccatgctaatttcattgttgatccataaagattgtgtagtggtcgagcattagcttagctaattgatataacagatcatattgcttatgtctaagttaagctgtaactgttctcacacaaagttgcagttcgccaatcgttgaaatagatcattgaatggcacttaacagcggtctaatgagtcgccactggggttgaaaccagttttttaattttgtgatgttcaaacaaatggagatgtaaaaattaagaccatttgataaataaggattgtattatagaagaattttttcattgctgattagttataattattggacccttgaatttttaaattgaatttcaacagggattgtttcaatggaggatgtgtactccgttttttataaataagtttatgttttaaattaaattcattaatagccacttaactaagagtctttaaaataactttaaacttacattaatcagtaaagacagagagtatctgcttttttctgtccgtttgattcgtctgcgtatctccaatggctttgtgtgatttatgctaatcaagattcgtatgccaattggcagttatggcacctaatggccttttcgtcgagcggttaaacagaaatgtaaactgcttttaaatcgcatttattgttttcacagcaatcgttttgtgagtttttgttttgtgtgcgcggtttttgatttgattttgaatgccggagtccaaataaaagcgccacaaatcacacgaaatccacaaatatttgatgggtatgaacaaaaaaggcaaagatcacagatcactcacacatacactattgatttcggcagctaaagatggccaatgaaacagcggatgcgagaaccgaaacccgcttaattaatcaaattgcgagctattaaaaacggtcagttttccagttttcaattgatgaatgatagctgtttgtagatcactactatttttgctttttggcgacggcaattcgcgttccggtcgcttcattcactgcgtttcgcgtgtcgcgcataaacgttcggaatccaactgaaggcaaggaatttcaaattcgacggggactccttgtcgcaccgcctgcaacagtgtgtgtgcgcgttctgattggaatggggaaactctggcacacacttacgtggtatacggtcacacacgcgcgtttcttttgggcttccggttggatgtgcgctgagagagcgactgactgcactctcgcgggcaaacaaacgggttttccatacgcactcacacacactcacactcgctatcgataaaaaaagtgggtgttgccttgccatcgcgcgctcttcctctctctcacactcacttagcaggccgtcttgctagctcgctctcttacttaatcaaaatgtggccatattaaagtaagcttgatttgctgtttagatattggtgagcgaaagagcaagagagatgagagcgagagagagagcgagagacagcggctctctggggacagcccactttgtgctggctaacgcggcgtatgcgcaatgtttccccttcgcagtttaagcccattatatgcgctaataaaaggaataaattaccaatatcaaagccataagccaagactcctttttccgctggtaaaatccacactttatgtgctctttaattggcaccttcataactcttctcccatcgcaattaacagccatgctatatacacttacttatgtacatatacttacatatacatgcgagttcgtactagtactggcctgcaatttataggtttaacgcccacttttgatttatttatcagataatgtcttcattaagttgatgtaatttacatacattcaatcggaacgaacttcagaggtgagaataaacaaaatctttctgatttacaaattagttgtgccattcatttgtcataatgcagataaagcaatcagttaacgctagtttcgatgaataaattttaattacaacgctgcaaaaagatttctatgcgaaaattatttgattgcaaattacatacgttgacttatgcggttacacttgaagattttcttttaaaattatacacgacttatttattattattaataatgac

SEQ ID NO: 27713 - DNA, 2282 bp, DROSOPHILA
ctgttgcaggcggtgcgacaaggagtccccgtcgaatttgaaattccttgccttcagttggattccgaacgtttatgcgcgacacgcgaaacgcagtgaatgaagcgaccggaacgcgaattgccgtcgccaaaaagcaaaaatagtagtgatctacaaacagctatcattcatcaattgaaaactggaaaactgaccgtttttaatagctcgcaatttgattaattaagcgggtttcggttctcgcatccgctgtttcattggccatctttagctgccgaaatcaatagtgtatgtgtgagtgatctgtgatctttgccttttttgttcatacccatcaaatatttgtggatttcgtgtgatttgtggcgcttttatttggactccggcattcaaaatcaaatcaaaaaccgcgcacacaaaacaaaaactcacaaaacgattgctgtgaaaacaataaatgcgatttaaaagcagtttacatttctgtttaaccgctcgacgaaaaggccattaggtgccataactgccaattggcatacgaatcttgattagcataaatcacacaaagccattggagatacgcagacgaatcaaacggacagaaaaaagcagatactctctgtctttactgattaatctgcgatcgcgaattttttggccataaatcatgggcatcttactgatccacatcggatcagcagtcgactcgcgactatccccacttcagcggcgactatcagaacgtgacgctgtcggctgcctctgcatccacatccgcatccgcttctgccacccacgtcgccgccgtcaagatgtaccacagtagcgccgttgcggcatacacggacctggctgccgccggtagtgccgcaagcgccggagtcggagtcggggtgtccggctatcaccagcaggcggtaaacgctcccgtttacgtgccatccaaccgacagtacaaccacgtggccgctcattttggaagcgctgcggcgcagaatgcctggaccacggaaggattcggatcggcgcatgcacagttctactcgccaaacgccgctgtgatgatgggctcgtggcgcagtgcctacgatccgtcgggcttccaaagatcctcgccctacgagagcgctatggacttccagtttggcgagggacgcgagtgcgtcaattgcggtgccatatcgactccgttgtggcgacgggatggaaccggacactatctgtgcaacgcctgcggactgtaccataagatgaacggaatgaaccggccgctgatcaagcctagcaagcgcctggtgagtgcaactgccactcggaggatgggcttgtgctgcaccaactgcggcactcggaccaccacactttggaggcgcaacaacgatggcgaacccgtgtgcaatgcctgcggactgtactacaagttgcacggtgttaacagaccactggccatgaggaaggatggcattcagaccaggaaacgaaagcccaagaaaacgggaagtggttcggcggtgggagcgggcactggatccggaacaggctccactttggaggccatcaaggagtgcaaggaggagcatgatctcaaaccctcgctcagcctggagcgccatagcctcagtaagctgcacacggatatgaagagcggcaccagcagtagtagcaccttgatgggacatcacagcgcgcagcagcagcagcagcagcaacagcaacaacaacagcaacagcagcagcagcagcagcaatcggcacaccaacaatgctttcccctttacggacagacgacgacgcaacagcagcaccagcaacatggccacagcatgacatcatcctctggacaggcacatctgagtgcccgccaccttcacggagcggcaggaacgcagctctacacgcccggcagcagttccggcggaggcagtgcgtctgcctacacatcgcacagtgcggagacgccggccctgagcaacggaactccctcgccccattaccagcaccaccaccacctcggcggaacccatggacaccatgtgacggcagcggcggcacatcatcatttccatgccgctgccgctgtggccgcctacggcgtaaagacagaggcgagtgccaccaactacgactatgtgaacaactgctactttgggggcaccttcggtgcgctgggaggagctgcaaccacaaccgccatggctggcggagcggccagtgaactggctggctaccatcaccagcacaacgtcatccaggcagccaaactgatggccacctcgtaa

SEQ ID NO: 27714 - protein, 52 aa, DROSOPHILA
MGILLIHIGSAVDSRLSPLQRRLSERDAVGCLCIHIRIRFCHPRRRRQDVPQ

SEQ ID NO: 27715 - DNA, 35498 bp, DROSOPHILA
tattaactcttacccataataataacttaaagtggaaaacaaggccatcatatcaatagtcctcgttacttcagagagttttcaaagtgccttgtctggcccatcgatgcgggaaaatcgagtagatcctcgtcaatccttcgttctgggaacgtttgccactttatcactccactttggactcctctaaattcagcagctcatctcctattccatttggcccagctttacgagctgctgttcaaatttaaagctcatcaagggagaaggatgcgaaatgcgatggctgtcttgtcgaaatagtttcgcattttataactcacttaaaggcgccgccaggcagcgggccaattaaaacgggcagacgaacagcagctgattaaccttggcagctgccgtcccacaccggccacgcccactgccaacggcactcccactcgctcgcacacatatagagtatatttaaagtgaagcccaagtgaccgtcgccaggtcacgtcgccgtcgtctttgctgttgttgcaatggtaattgtgcgagtgcagcaatgacgtcagcacacacacacacgcccagtgaaagcggcgggtgggtgtggcgctgccacgcccctgcccactagggggcggagccagtgagttgccacggtaattgtgttcgctgctccacgcttcggttggcaatattgttatgaccaaaaaaccaggtcacaaaggatccagcccccgtctccttttcgagcgacgccactgtcttggcctcagctttcagcgtgaacgcgcgcatattttatttgatttatttatacaaaaaaaaaagggggaaaacgaataataaaatagaaaaggacgtcataatttagtaaaatgttttgcaaagtaggcgggctctagtgcgaatttctgaaggcgcaaatccccgccggcagttggggatttctcggcttcaactcttgtgctattttgcatttaatatttatgccactttccctctgttttgcaggcatgcatcgggctctccagcgcgccagttatccagcctctcagctcagccgctcaacttgtcgactttcggcgcgaaccgctgaccaggccaggacctcgcaggatctaagtttccaggacgaaacagaacagaacgggacccggcagtcctcagccatggctgctgaataattaatgcagtttcggtaagtgcatttgagaaatacgttcccttttagcagtttcggttttcagttctcatttctcagtccgcaggttagcttagccttaggttagttcgagaaagtcaaaatgcaggacgtctcatttaaatgcgcactgagaatctaaggtcctacgcaatgcaagtttgagctagcgaggagtataatagatttcaaactcatgttgatgtagaactgaaggtgtttgaaagcgtgcttcctttcaatagaagacattgttgtaagttctgaatagtttcatcataacttaatgtgaaatacttgcagtgcatgccaggaaatccacgcacttgctccgaattctccctttccacagctaagcctgacaaatgaagtgttcactgctcgctgccttcgaggggcgtggcccaatgtcgctcacgaccaggctcatgcataaaccaatatgcgacatagcttcgctttctcacttcttttcatttcacttcagtccagtccagtttagtcagttcagttcagttcagttcagcttagttcagttcagttgagttgagtggagctcgtttcgcgcttcgctttttctttggctgcgttaacgcgccggaaacggaaattgtccaccaacaatggcaacaaaatggcagcgaccgaaaagaacgaccacccacccacaggcgattggtatttggtggcataggggggcggggcaggctgatagcggacaggcggatgggaatattgtccactattttcacacatttggagagctcaagagttgcggcagtcaaatgtgggtatgctttttgggttacactcgaactcaatgttattagtgggtttctggcaggatttcactggagctaaccttatgtattttaaagtttccatatagtttttgattcttgagaattatttgccatcttattttgttgccatcttatttcctaacgaccagagtattatcaagaccgcattgccttttctcttctccccggtcagatctgcgtaatttatgtcctgatgctgttgctgggtttatcttaatgctgtcctgatacaacattttcatcgttgtcatcgctcatcgtagttgttgttgtacttgccagcttattgccactgctgttttgtgctgtgtgcgaatgcactgagagaaatctatatccttttgcttactttatttagcgatatttataagcatgcataggtaaaatgctaaggaaggcttatttttttgtaatgcttcctgttagatagctgcttaaatggctctatgccatatggcctaatcagatttcattcccaccaggtttttctctgcgtgcgttcgtgcactgcttatccttatccacaacatcgccttgtccttctggttctccttcgcctttgcctcgctgtccgtcgtttgttttgtcattcaattcaatgaggctaatgtccgctaaggcccctgcctcgcccccctgaggcggcacccccccccccccctctgcgaccatgttctgggtttggtggctcttctgcgtccattgcttcatgctgttgttgaagtgccattaagtttagttgtcacttagcctctttgcttttatatgcctctctttctttcgcccctattcctctctgtttcgccccagttcccgctgtctctgtctctgtctctgtgctgttgctgtccctttctctgtgtcctgtctgctgtccgcttgtcgcttgtcgtctaccgaccgttgttgttatccttttggcttgaacgtcttaagcgcctaatgccagggccataaaaagtccaactaatgctttaaagtgtgccatatacacacacacacagagaggtaactacacacagagaaatattccaaggattggtcacatatgaaccacaatggattctgtacttcttggcttctccatccgagtgctaataatagcgagtcaatatgtttttcgctggttttttggtgctgcaacttaaacatttggctgcaggacagctaaaaatggtaacttctgtttttctcgacttgcaggacctctcttatctggccggctttatcgatcgttttgtgtgttgtcttttggctgtttgattttcggctttaagcgagtccatccttccttttgccgcttgccacttgtctttttttatttttatttggacttttattcgcttcgttttcgcttgtcggcctgaaaattgcgtgttaattttcacacaaacggagacagtcgcatttttcacgtattctgtttgtgttatgcggttttccagtcgaaacgtttgtgtttacaaacagctttcgttgaaacatttgcatttttattgtctccgttgctttattagccgattacctgatagctgcctcggattttgtatccttctgcgtatcctttggcgcattgtggccaaaagttcatctaaattaagtgcaagccattttcaattaactttcgacgaattcaacttgcccgaaaacttgcagccaaaaatgctaaaacttttccagcaactttccggcacttttcgtttttgttgccgttgccgatgaattttcattacgctgcatatttgttctctttgccagtttttctccatgttttttttttctgttttttttttttttttttggtttgcatgtaaacaagccgcgccaatttgttgccctctaacaaaagcaggcagagaattttcgacttcaaaacttgtcaaattctgcagagcagaaacaacaaaaccggttctgagtggcaggacatggggggtggaataatttcgagttcgagggcaagtggaatacattttggcctttaatggtaggaagaagtgcattaaaaatgcagatacaatgccccgaaaatgtctgacaggcccgaaaagggggaaatcgagcgaggaaatggctctgggggcgtttctctgtgtgcttgtgcaaatttcaagttgtcaatttatgattatggcacctcatgaagcgggccaaaatgtaaattatacgccaacatcgcagcgcaatgaaaactcgagcgagtaacaggccaaattgcatgtgcaaaagctcgaaagcgccgtgcagaagagttactgccttgctggcagccttaaagttgtctggttacatttaacgctctttaacgccgaattgactccactaactgactctgcactcgctgtggagtcgttgttatgtaaatgaaaatcgcgattttcctactaccacccactttgcgccgccatccacccgaccatttcactgtatcgacaggcagcgcaggtgcaatcaaatattacgtatacgccgcgttgtgcacaatagttagcaataaagtcggcgtggcaagagggggcaaggcagcaagttggctagcaaactgtcaatttggtcgttgcctcaaccgttgttgttgccgcctttattgctctttaccttataacaacgttaagggctcgagaatattgaattactcgaaatgtgtggaaaatgagcggaaagaaatggcattgcaaggaccagcagcaggaccaacagttcattgaaagttgctgaaacttgagcattaaaattctatcattttgtatctctaaggatcggtcaaaacgaagcaaaactacattgtacaattaatattgattaattttccgaaaactgccttcaaagatagctggaaaatcgatccgtctcgcagtattgcatttcaattcccgtaatttgacttggtcgggctctcaattatttttttccggccaatagttgttttgctttggcagcggatggcgggtgtgcgcccgtacggtgtgcactcgtttgcgcggaaagctctctgcatttggtgagcagtgctcatgtggggggcataaaagtgattgaaaggtgtagcctactttcggcgcatataaaatgcatgtaatcaagcgaaatggcagtgggccaaatgagatcgtcggcaggggcggcatatgggaaatggggaatgtatagaatggggaaatgggagaaagcgggaaagcgggaaagggggcatttgcatttgcaaacaacgccctcggacaataattgaaatttgatttgattagtttcgatactgcggttgtcgttgatgttgcgcccactgtaattgccgctgtgtccgccatttggttaaatgaaaatgtcaaattaatttaattgtatttttgcgcggcgcttaaactcgacgcctttgcaaatccctttataattaagtcgaccatcggcggaaaggagcggcggcggaatgaaagtcatttaacaatatgaaaagcagcttcgctcccaccataattgaactatttggttttcataattgaaatttcccccagacaattcaataataattatacagagatgctctgtctgtctcctgcggcacgtgaaaaatttcattaagtaacttattgctattatttgcattcctttctgcggcaaagataattcgcagtgtttttttttttggcggagctcgtgcctttgtccacgtcgtaattaaataaatattaaatattttccgaacgaaagcggcaaaaactacataatttaatacttttcccctctcagtttttctcaaccaaagttgctcgatattattgccgagatatttgcgcatatttgagcgctttaatggaaccacatcgatgggaatggggttgggggaaaaccggggacagcccgaatggtaaatgatgaaaaatgctctgcattttccgcacctttttgtgtggccaagcggaataaaaaggagcagagcaaagatccaagaaataaagaagccaacgcacaaatattggctcgctattttttcgaatgaattatgactgcgtcgagggtcgttgggtgggcggaaaagcggtcggaaaagtgggcggacagtgggtggtgaagcggctgctcagtggcgcggcgtggcggaaaagagaaattttcaagagggtccatggattggacgagtggccaaccaaaaggtgttccaaggtagttgagcaaatagttttattgaaaccgatattagcatatgccacgaatcgaagcgaacaaacgggggaaatcgaagaatattgggggaaaactgacagattgtgtggagctaatcaggggggcgaattattattttaatgcctgagactagagacttcctttcaagatctttcgagtctgaatagctttgactttggtatttaaggtacaaaaatgaaatcatattcgaaattgcgctgttctattgtcaatttgcactttaagtttcttacgataatttcttcttgatgataattttcctgagtgtagcagatatcctggagaaaccccttgctatcgtacgcctctgatttctttactccactcttattttagcatgccttttgttgtttttctttcggcacgcgttggcctccttgttgtttgttcgcttttccccttcgcatttcccgcttctcccgctttcttcgcgttctccgctttcccgcacatttcctcagctgctcctgcttcttatggccaaccattgttgttggtttctttactgacaacataataataagttttctcgctccccctgtatggtttacgttgcttttcccgctcttgttgtattgcgggcaacactttcaaaggccaacctgcagctgctgcttcttcttctttcccatttctcctttctccagatgttgttgtagttgttatagctcttgtggtattgagcgcaaaagtttacgaacgctgcaagcgggggggtgaagagggtcacaaaaaatataatgcacgcacatacggcacacttaaaaagatgggcatgcaataattttggggcagtattatcaataaaggaaaggtctttttatgacagctccaagaaaggaaataaatggtttaacagagatctcttgaataaaatcagtacaatcaggggcgattgatttacagcccttttaaattgcgtccaaaagtaaaagagtcagaatagttcaataataatcctattttacactacttaatattaatgtttcatcacctgaactcattttttcgctgtgtacgcagggcaaccgtgcataactgcatgcttcgcgctgtgtttgtatgcgtgtacgaatgtcctttatatcgctttgcttgtgtgtgcgtgtgtacgccaacttggatttgccttcgttcagcgctttatggcgatggccgcccaatgtttttcgcagccgtgtcctttacacacactttaaattatttatttttacacttttgctgtaacacactttccgccgctggtgtgtgtgtgtgtgtgtgcgagtgtgaattgttgttgcagcctacgagagctgccaaagttcgctgtatgtattcgtacttgccacatgacaatccgctatccccaccctcgcgctaccccatgcccccacccacccgctctcggctgcagaaacttgtaaattatttgccttttgcctttattccttacacatacgcgcacaaattgtcttgagtttatgtgttaaactttacatcccatccttgatggtggtggggaggcgggtgagcggtaggtcgttgggtggtgagtcattgtggtgctccgtctttcgttcgcatacacttttcgactttacaaaaaccaatgaatgagcacctaaacgagtagtagtaataaacaaaatactttttatagtagaaacagaaatatgtagatttgtgcttgaaaagtaagcgatcacaagtaaggagcctctttttttcaaacgatcaaaaaagttatacaaccacgagttcttggaagcaaaaaatgtatgcaaattagaatttttattgcgattccttgtgcgaaagatttttcgcagtgccgctggctggcttggcatgtaaatgatatgttcccttcggccacgtccaagctcggaagatggaatcgcagaagacgacgacatgactgccttttattgctcctacgcctctgcctagcccctccgttcccattttcccacgcccctcccttttgttcagctgtcgtggccgttgaacaaatgaacaacataaataattgcagaggcacacacactgacacacacacacacacgcgttctgaggaaactcgcacgcacactgacaaagagtgggaaaatcgcaggactcccaaggaacgtttgcagccttcgaattgagattaatgagcagcaaaagtgattcaaagtcagcatcctcgccagcaacaatttgtgcaccagaacgttaaactatggcgctttatctgaacacattaggtggatttattgattgcagagctgagaactatttcacagagatagtggtcacttgtggtatttcccatccaaagtatatattgacttcaaactgaatgcctatatttactgataataaggcaacaaattcgttatagttatatcgattgaccttgcctttcaattataaattataagctgaatgccaattggaaactccgatctataaatcatcctatgtgactaatgcttactggcagggtaataacgtatcaccagctggagtgcatattgctatcaacatccacataattgcaaatactccagaggcacgcgctactggcaactcccacattccctcccatacgcaacccattccaatttcgatacgatttaatcggcactcgagagttgacaccccgcacactaattgccgcaacaccctcgtggggcattaaggtcttacctgataacagaccgcaatcgaaaccgaaatcgaaatgggaatcagaatccgagtctgaatcggaatcggaatcggaatccgaggcgagtcacaatcaaaagcccgagagtcgcgtaattgcagatgcaaatgcgattacactaagtagcttgtctcgataataaatgtgctccccaaaatgggtggtggctagtgggtgggtgggtgttgaataacctaatcgaaatcgaatgtaagccttgctttctctttccgctcgccttgccgcagaacattcaagttcgttttgttctcgcgtcgtatacgtaattaactacatggcgtatgctaaatgcatattgtggaatatggaaaacttgtttgtaggagcttctagcagttacttcacttacattggcaagttttgaaatgcagctgctttgtttaactatgaaaaggagttcatgtgaactaacactgaattgaagggttccgggaagcataaacaaaagtagttataacacacatattcgacgcaatgtgagatgtgaaactgacatatgagttgctcagtatgcattttccagaatctttgtaagtgtattccagtcgtcgcttggaactctcttccttctgctctccgacaccgctattgctttccctcttccgtacccatcgcattgttttaaacgctcactcactctgtcagtaagcatatcaccaacaggttttacggtttaatgactctccggcttacgctctcccagtctcccactcctctgggtagctctcttccgttcgcactctccgcaccttcgattctccacttttcttctgcctaacgctcagttttatctggaactttgccgccgtcagtcatttccaacttccatgcggcgtgtttcgggtttatttttcgtctaggtgtaaacatttctaattagtgttgtgtttggtgcagtagttcttccttccaatctttgttatcagtcgcgtagtgctaatcgactctatctcaagtgcgctggtaccgtaaaaggtctccgttctttttttggccaatcacttgtatcaataaataattaggggctatcgctccgtgtttatttcgagacataatttaattccagaaagcagtgaggcggcacataagaggtaagccgatagctcagggagaatgtgtctttaatcttaatgcatctgcctccctctcccgcacgacacatctctttcactccgacaagtggcaataacatgtcacaagagcaagtgcaagtgagagggagacggccagcgaaggagacaggaacagagaaagcggtaaagttgaaagaactcgacgagataaagcaataaacgaatattgcagcaagtttgcgcgtttaaaaacaattgcatttccatttaattttacaacgaaaatcacgatgctgcagcagcaccaccaccaccaacaacaacaactcaactcaattaaaaaccttcggtgaccggcaaaaaaagatgaattgaattgtgcaaacagagagacagcaaaaacaacaaacacaaacttcaccgtcgcttgtcattactctttttttttcattgggtttttgctcgtataaatcggatgcgattacagtaaatatcgggtaacacatacaaccggttaagcacaaaaaacattctgttgaagcaactttaaaaaataaatcattacaaatcacgcgtcacggtaattgacactcatgtttatgcctttaaacttaaatatactcctttaaatatttatatgtttcgtgtgaactgtatgacttatgttattattaagggagtatttatacacaaaataatgtatatattgtgtaaattcaatttcataagaatatctagaaccgtatcaaactcaactgataagtgtaatttacaactcccaagctacaaacataaactttatgaatgacaaagtttgcgttgatgccgagtggtttttgtttgcggaaggcaaatacaattacagattgcggttaattgtggtttattttctaaggtgttatcacatcaatgccaagtgtttctttaacagcgtacttttaaattatattgtgtcacttccagaaaattgcatcataaaattaatatatgcacatttgattatgtttttctggatttaatagatgacttttaactagctgactagaaatatgatgataggaaaattattgatttaacatgacatgcaaaaagttaatctctttcttattggatctgcacaaaagtaacgaagcgaaatcggaattttaattatggaatttataaaagctaatcttaactctgggctaattactcacttaattttcggattttccaaatttgttaatgtttatcttaaccaacatttattgtacctgtttttgccaactttcggatgtttatgatatttatggcccttccacgcgactaaacaaatgccatccaatttattggtgaatctatcagaacaattgcctgcacattttttactcaactttattaagcgatattttcgagtggttttaatggccaacaaaaatttatgtctgtatgtaatgaattgaaattcgatgacgggcaaatgtggaatgtctgcaaattgataaacagaagtcggttgcggatactggcacagaatttccagaaggcggttagaattttatgaactgcatcgggattcctattaaaagtgcggattgattggctcagggaactctgggagtttgacaatgttttcaattctggaaaccccattcgggtattcagagtgcctcgatacgcatctaagaagaggatagccacttctacaccgagaaaatagggagttgagttctatataatagaatcacatattgtgataagataactagtatccggttgaatttttgtaccaaactggagtaaatttctatgacagttatgagtttattctaaaaatatacatcgaaaccataactgactggctttcaaaattgtcaagccacttgccgattatggtattatattttctgccagtttagtgcaatttcctcgcttctggcttctggcacacctgctcaggtggagccaaactgcagcagtttcctccaaacatcgaatcatgaaaattgcattgaaactatttcaagttttccggacaaagcgaaggcgggatgaaaagtggaaaagcggaagagcgggaaaggctggggacttggtgttagttgctgttttctggcaactgcagagatgccgctcaaaaattcatgagtgcgaaaagccacagcaggaaaagtcgcatatagaagcagttgagagggcgagcaaagtttcgacaggcaaacaaaaatcataacggaaccaaggaggattgtgtcggcggattcccaggaccttttctcttcccgctcctcctggccatgggtttgaatgtttattaaaagacaatgtcactagagaggcgaaaagaaggctgcaagggcagagtgaaaaggacgaaggcaaggacagcggagctcgcgaccagaaaacctcaaaatggcatgaaatgtcagtgatttgacgctcggggagattcgggtagttaggtcctctatcccctccaggaattgctagctgctcatatgtaaagttacagtcgacactgtagtgtaaagaaatagaatccatattagctactcaacaaatcgaagttgggtagttcaagtgtaggatttcatttttcatacatgcacatttttcagtgcttagatttggttttggtgtgggttagcttattccgagattccactgtaggcaaatgccagaacttggagtgaggacttcaggctgaagtcattgtcgtcgggcaacaaaacaaactgcagcggcgcaagaaacacagcagaatacgaatccgaaaactgggaaatgggaaatgggaaaacggggcagacttttgcttttcattcatacgaaattacctgcggccaagagcttaatgccagttggactgcaaaatccgcttaggaagttgatacaatcagttcctctctggccagagatgcaaccactccgagcctccacaacccacatcctgctcctccatttcccactgcatcctgtggcctgcatgtggggcgaggatgaggacgagaacgaggatgggaaagtgaatgtggatctggctgtgcatgtggatgcagatggattcattaaaacgaattgctgcgagtttaaaggcctgccctgcaacgatgcagacggaaaataagaacgtttcttattgcattctcaaaaatatatacgttcagtgcttaaataaatttaacacacattatattataagaaataactaggcctaatagttctctgttctttattatcctttttggagatatttctccctgtgcacatttatatccctgcctgagtgtgtggctgacgtttgtgtgtgtgagttgtttttggggttttgtttcgggactcattgacgtgcaacatatatggtgagggggcgtggccggtctgcggctactggggattggttttgtttgcgccgcaaagtatggaacggctgctggctgcaaggttctctgggacaggatctaaaaaggggctccaatggggctggggctgaagagctggatggatgaatttggcttggctgccttatttcggttaaaagtttagccccatacataactggccacaagtgcagaacgcattaaaactgcaaattaactggagaatagagctgatggtgatctagaaaccccaacgcctaattaggagaagaggttccgcccttcgacttgcattcgtgagcccggctctgaggtctgttaattatttatgctttacatttaaatgcacagcttagactaaaacacacactccaaaactgggcgttccacggcctttgagccgctttccactttcaagtggaaagtggaggggcctgctgctgctggggcaacacttccgcatcgggaaaatgggaaagaaagcagaaagcataaagcatacagctacagtacacacacattcgcatatggcataagggctgctccacacccacacactagcagaaacacactgagaaagccagataggctggcatattgtgcttacgcatacatttgcgcagacaaacacagacccaaagagcatcctacatcctacatccttcatccttcatcctgcgtcctctatcccaaatccgaagtggaaccgagtcgagtccccagaccgactgaactccatgtaacatgttaatgaactgcgccaactgtgtttgcacagaacttagtgtaatgtaatccaggctgggcacagaatcaagctggaaccccacgtgcactgtgaaaaatgggagataaatggacttaaatagatctcagttttgcaaggcgggaaagcttcggtacaagatagttattgattcatcagaatcttcagaaaatcgttttaatggtgccaaaatgtaaatgatataatgctttcttcagtttgaccgcagtgtacgtacccacgcacacccacacacacacttacacacactctcagggacgcactcacacctcaacgcccgatgtgtcgaatgttacgctaaggagtaactttgacatttaccattcaaggcttatgagtgccaccgcagtggaatggtgctgcggatcctgaaaggggaaggataccgtgttgcccgcccgggcaattgccttatggttattttcatagccctggcctggccacaaaactgcgagccaagtgtgacagcgacatggccagggatgaggacccagcagaggacctggtaacttgaatggaggctgggcgctttcgcagtggttggcaaaaggacgaaaacgaaggacgcaggctgggcgaaggaataagtgtgagtttgcaacggcgacaatccagctgggattttctcattttctttttcttggcgtagaggttttcctgttggtacttttgttgtgatagtaagggagacgtgagtgcaagggcctcacacacaggacatcatcaggtggaaaattaaattgcatttaaggcaattgacaggccaagacgacgggccacatgtgccgatgaatacttctggaaggtggaaaatgccttcgccaattattggacgcaaatctagcaaaaggatgagcgcactctctgcaatgttgaatagagcttattggtggaggcagcagcttgcagcagcggaaagtgcaccgccttctatttttctatgtgcaaatcaggtgcagtagttagacgtcatgattattcatactgctggccgaaagtcaggacgactgggtgataacggagaatgcgaggagcgaggggagagttctgcccactgcccacttgcacttcctgcagtgtcatattaatttagtcaagtggccactcaaatttagccaggactacaacttggctggagcaagagtgtattgggggagggagatggcaaggcaggactgtgaggacgttaaatgtgcaaatgacagtgccgtctctttcttcgccactatctcgcctctctctctctttatctgctcgcctcccgtcgcctgccgtctctttcgctctttgaggctgtagtgtctgtgtgagatttgcataagtgcaggggtattagtttgggtagaatgtcactgacttttgtcagccgcccgtcaaatgggcgcccaaaagtgtgcaaagcgaaagcggtgaaagtagaaccgagtagtaggcgaaatgggggggggggggggggggtgcgactttccggggagagaggggaatagcggaaatgcctaatgattacaaattgccaggggcaattttaataaccgcgacgaccgcagagcaataaataaaactcacaataaacacattgcaacaaaggaagtgcggggtggcaggcaggcaggaaaagctagaagctaaaagcggctttaatgcatagctgcgattaatattaatttcatgcggtgcagcgctcagttggaggccatctattcatccagccaagtcaagtcggctaagcccagccagctttgagtgcggtatacggccggggcaatgtagtcgtgcagatgaagatgcagatgcagatgcagatgcagatgctgatgaagtaaagttgatttctctgaaatgggcgggaaaatgggcggtgaaatggggctcaagctcgaggacaatgccgccacatcatgcgcatcattagccgggatgcagagccaactttgaagactccctgatttacacgcagagaaacactaattagtactgcagtttttacttgttcttaaattttaatcaatttagaaactatgcagatggtctatgattcgagaagtccctattaggtacacagcatctcaccttaaatttaaaagaaaactgtgttttaagcatccacttaaattgcgtaaaattttgcaccagtgcactcgcatttagtgcagtctgtttcgccttccgccatcgcattttccagctcatttcgactggcagagattttccttgttcggtctgttcatgtgcttaagcttgagctgtggcttcatcccaaatcgctgctctgctcgatgccagataaccggcttctaattggtatcataactctggggccacagcccgaattcgatatactcaagagctcttgtcttgaaacgccgctcgccagaaaactcggttcgcacggttttcccccatttgcatattcattttccacataatcatcatcattattatcgtcaggcccgtgtgtgatccgcactgatggaaaactatcaaattcatggagtaattaacagagctgcggcggggcaaaatggaaaatgggaaacgagaagcggacgggtttaccagcatttgggagcctaaaaatagaatttaatttgacttttgccagttggcagacgtacgtacacctgtgcggaaatggcggaggatggtgatggtgatgggggagggatcgaggaccaagttcccccagtgatgtgctgacagcattaatttaaatgcggttgtgtgattttgccgcttggcgtgtcagccagttgcttaaagcttaaagacaacattgcaaattaattcggcaaaatcctttaacctgagagagaattaaccactggtcaatacttgattctgcttagtaagagtacttattttccgtcagttgttagtactgttaacttctggaaacattgaaagttacaaagcactttagcaattttaacacaacaactgcagtgttaatgcacgtagttttaaaggcattattgtttcaaaaaagaacgcaactttggctaaaagcaaatattaaagctggtgtgctaatggaatcaggtgattagtgctaggaatgcacagtcccctttgaaagtaaattccatgttgaaaagctgcagtctgctggccccattcacttatttccccttttttttctattttgcagctctccggtgctcggcaaacgacaaaactaatttatggcattaaaaatgcatattttctagcagtgcgtcgacagtttttatcatttgccagaaaggcaaaaggcgctatccaccagcagctgtgccagaaaaggaagctaggaagacacgtcggtcgagaattggatttgactgcggaggattttgaatccgagtccgaaagttctttagtcagcaaccgaagaagcgtaggataattcacatttttctcacggcaactggcaacgaaatggctttcctatgtgcaccggtaagtttcgctttatttggcttccttttatcccccaaatacgccatacatcatgactcgatactgcagtaaaaattataaggaaatggtttgcacttatggcgaacatcagtcttaacgtgccatacgtcgcgtatgcgtgatattttatccattaaacttttccgcgctcgtcactcttcgttcgcaagtgattttaataatgtgaaaaatgtcagatcgttatgcttaaactgccgcatgaagcgttatggtcccaaactcttgcattgatggattgcaggcggccaaattaatcatacgccgtgtgtgctgcaacagttatgccgctttaagagcgccgtataatgatggtgagtgcttctggggggggggggggtcagtgaaactgcggcatgttgacaaataaacatacgccataatacgtgcaaactccggtcgagaataacgaaaacaacagctacggatggatagatagaagccgaaaattgagagtttgccttgtattaacagctgcccgcaatgtcaatattcctcgtagattcccagccatcccagggatgcgggatgcggcgaatctgcgaaagcaacaagcagtgacaatggcgtcgtcggcatcccaaaagccaacagccaaggcaagctggaggcccatctgccgaactgtgggccactgagcatcctggcgataaccaatcattaatgtttcaaatgaatctaaaaaagtaaatccatcttatctttaaatatagaaatcttagcagatttctttaaatctgcatctatgcccgagagtatgccacgtgtcctttgaagaaaaagaatatgccttaaagtaggcacttataagtttttataactagactcctctgaccaaaagtatgcaaagattttcgaattttttttcaactctcctcagaaattgcaatatttctactatgtggctccactgttcgaaagtcgaatccctttacgccagtgccgtcgactgccggctgttgtgagtgctgattgtcaagtgctcgacccagacacgtgcttacacagctatccacagctattctgcagctgccacgccccattccgccgcccctctcaatatttgttgaatttcgagttaagcaaacgtgcaagtgtatttaatttgtgatatcatcgaggggctgaaggggcagcgagcggactgagggtggactgggcagcagtgaggtcactcggcttacccgatccttggccaagggcttcggtatggcagttctgtgtgtcctgtacgtgtgtgcgtatggccattaatgcagcatttaaggattttgcggtctgagctgcaggcacttcaatcggggagagggcgaaacaatgccacattcaagtgcatttgagcagcaataatttttgcggtgagcagagacaaaagcctattaatgaacacacaacaacaacagcatgcattctatctgcggttgcaggtgtgtgcgtttcatttaatcaatcatgtatttagtagacaaatcgcttaagacaaaagccccccaagaagccgagttaaaaagctttttatcattggactcgcacatgattacatgattacgtctccgaatagaaggatatcaatctctctataaatcaggaaagtgggggggaagccccctttggattgtgcggctctttaattgaattttaaattacacccatctcgaaaaatgattagcggcctctcatgcataaataagttttcgattctgtgcgctaatttgaattgccgtcgaaagctgacaaagggtatcaattatcgtggtcagcctagaattatgccacaaggatggcataatgcccgattactcccgatgggcaggacgagccctagtccgcccagttggaggccacttgtcatagctgccagaacaagccatgcttcggacttttgtcagtgaccaggcctccaacttggtgcaccgcaacaaaaaaaaaattgggaactactatgtcagaaggctctctagatcacaaagttttctaaacgcaaagtgaagcttaaaatggcaatgtttgaagcccaacattcttgtttaagacaaaccttaatcttctgtggcaacctgactaataacttttgccgttgactctatcaactttcatcttgattggccataaagtttggactctggcaggttatgtgtttgctactggtatgtgcaatttttggatatttttccgtgtatgaaggcggtctgcacttacgccctctccgcgcccatgaataactgctcaatgcccaaacacacacacattcgcatggctgactgcttgcgtcatcagcatcgtcagtggagtatcagccttggcatgcagtcaaaacgcagcttctgcccctccgcactcgcctgggctgtgcttcacaactatttttctatgtcaggggacaggatgcaggacgcaggacacaggacatggatgcaactgccccagactgcggcggaggccactggatgtcatcaactttgctttggctctgccgagagcctccgcaaaggcagggcaaacaaaaagcttaacctcagcacaaatttaagcaaatatttgcccggcctccaccttttcccctcgttgggcaactccactccttccccgcgtctgccttccatttccattgatgcaattgaagccggaagcagtttacttttattttgcccctttttgcggtgtcagcaaagagtttaacattaggcaggtgcaaggcggccacagagagagaaatcgccaattagttgcacttgggtgaggaaactttaagaagcaatcaattaattattcccaaattaagctttcttcggcatagatttggcttacaagagcaacagttatcttggcataattcctcaagatcgagcatatatattttcaaaataaagagtacagtggttataaatccacttttttttccccctgtttctgggattcacccgacccgtcgaggaaacgacattcgcctgatgcatgcacgattttaatcggttaaatgccaggggaaaatgggggagatgcaggccatatcttgcgagcagtgccaactaatgatgcgcaaaatgtttacaaatcattttgtcaataacgaggaagggataaaggacggaggatcctccgccatctgaatcggcccataatttgcccacatttcttgcattcatccgttggatggagcggccatgaaaaggtcattagtgtgtgcgtgtgtacgcaagtgtgtgcttgtgtgtgacacaaatggccattcaatatgccaagaaaggggtcgtagaaaggggggagcagttggtagcagaggggggaaggacatgagctaaagccaaagccataacagccacatgcttttttccacaacattaacgcaaattgcaaataataaaaattcaaaataccgaaccgtagaaaaagcagcacgtgttgctgttgttgtgtgcccactgcggtgtgtgtgtgtgtgtgtgtgaggcctcaagtgggtggttgggcgtgtgtaaggacgaagtggggtcctaaggaaaaaccacaacaacgagaagccatgggcacatttatcgcagccaacgaggcattttttaagtcctgcaaaggtttacatatggccaatgcgaaaaaaaagtagttggaaaggaatggggaaaaaagcgagcactacggaaaactgtgttgggtttcccagggtgaatttcctgcaattgagccctaattgatccttttgcggggaagccttgtaggaactgcaagttgaactttgccaatggccaagaagacagcgaaatgtaagagaattaagcgagcaatttgtgtaaaaaagattcagttacgctgccaacaacatagttcgattctttttcgtaaattatataaacaagttggctcttccaatagggtaaccggatatatcttcgcgttccgcggtactcgcttgattctttcgcttgccagggaatcaaaatggaaatctattttatgcggaggcacgcagcctggccaaatcctgcggatcgcccgcccacgtcaggggttttatgtgtacagctgtacatatatatgggcggggtccttttccttttctcaggtccgtgactggcgaggcgttggcgtaaatgctttgcgtatgcatccatgcatgcgacgccatctcgtgcagcctcctccgtagtccgtagtccgtagtccgcagtccttcgtccttgttctctcatccgccatcctggttccctgctctttggtccttggtccggggttgcggagctggcatacaatttatgtgcgaaatatggcgccgcacaccttttactttgcgctacctggcttttctccgcagcttcctttgccgtcagctttccttgcccgtttcttttgccgctgtttgtggccaacctgccacgtgcgggacaaaattaaaagcctttgcatgctccacttcgaatctgaacgagtcctgcggaagtcttattcattgcagctgcactgggcacaacttgcggggggtggggggtgggatgctccaagctcgaatgcccatttattgagtgaagcgcaaagactccatcattggtgggaaaaatcgattgatgcgattgctgaggacattataatatatcttaaaataagtatcttccatccatctaacggcatgctattcttctattttccccgcaacgaacatacgactgaaatagctggccagaataatgacatggcgaccattggtgacctttcgatgatctcaccgcccacgtcttccatttcgaacgaccaagatccgtttggacagctgcccccgctaccgccgccactgcgttccacccaagtgctccagccactgagcgtgtttccaggtgcccgccaattattttggaatttttcgagatatttcacgatttttttgaattactttctgcatatttgggtgctgtacatatgtgcgccaatgtgtgtgtttgtgtttgtttgttctccccgttgtttgcctgcagttcttcgccttttgtttgggcattatttgtttgatttccattttttttttttttgttgccaaagtttttgtgtagctttttccgcccattataaaagttactgttgcaccttttgtatgaaatttctgatttggttttctttgcttttctgttgtgccatttccaattgattgcaactttaattggtgtgtagattgggtctttgattggtcggttcgttgatttatttttcattcatccacacaccatacacctgcatacactcggcctgctccacgtgaccaccataccactcgtaacacgacactcatagtccacctgtacaggtgtaatactgtacgaccaccactagctacactcgaagtacaccgccaccgagaaccgcattttgccccaaaacttttgtttagcattttcagcagcattcagtcgatcaatcaatcaatcagtcaaatctcaaaaaccaatcagtcctacagtcgcccattaatatatatcgaagccgactttctctctctctctctctctcccacacacactttctatctctctctgtttgtctagttctatatatttgcttgccgtttgtattgccactttttgactatataaaataacagatttgtttgtgttgccacaagaacccggttgatttcaaagtttcgaattttttcaagtagtttccaacgctgctgtgtgtgttgatttttttttgacgagattgttaattagagcgcagccaaaaaacaaaaaacgcgtaatggctgtctcggccgctttgcaacaatttttgaacgctaaaattatctgtgtgtccatcacctttacatagctgcctttttgtgtgtgctgtccaacgtgaaaaccgaaatccagctaacaaactgccacattttgtgctctctctattcttccataaataccaacaactacaacaacaactatgaactacaaactacaacaaccaccaaatgataaatgaaaaatgaaaacgacaaaatctcgacaatctaaatatttgccttggttcccatgtttattttaatgtttgtcttattttaaacaatatttgtgtatcgcataaaacgtgtgtagagtgagtataagagataacgaaaaaagaaacaaacagcttgtggtattatttttgagtttgttgtgtttaatttcggttaagtttgtgccgctctctgttgtcctttatttgctgcccccccccctgaaaagagtgtctgattccctcgatttgtaattctaaaacaatttcccccccgaatggcagtgtccaatttgagcgaagattcctacgattatgtttttggtggtcgacgtaagactccgcccacaacaacgtctacacaactcaagctgacctcaccgccagtgcgtttgcgacccgaaggtgggtagtccttattgggaagagagtcctgcatggagcttgcattgtcctgctcacgctgcactcacgattggcattggatattcacaagcgccatgcaagacattctcttgacccccccagccacacagatcacagatataaccagaaccattctgttatttcaacactgccactctgtcggcgaacccatagacgcctatcgaggagccaacataaacaacggaaggttctatcgccactccttcagctacgcccccaaaaggcagcgccactcgagtcgggatgatcgagaccgcgagtctaggttgagatgtcatggcgaggatgaggccacactgcgccaattgctgctcgagtacgtagaaagtggatcctgaatcgggagtcccggggcacagagtcctccgatccgctggcaggcgagtggttttgacctcgtaatggacccgttgaccttcggggccaggagctcattacgggccattaatttgctggtgcgaccggaggactgggtggccggccataaatatgcgctttcagttagacaaataaacagcaattatttgtgtgcgccatgtttatttaatttattaaacaaataacgaacgatacgtgtttttagttcgggcgcaaataaattttaatttccgttttaatttgtgtgcctttcggtgggctcatcccttttttcggttttatttttttgtgtggcctgtgtgatatattaacgagcaaatatgcaatgtatatgtttaatgttctcctccctcacagatttgcgcaagttatgttcagttaagtgtcctgcgtgtgtccttagactgtcaattattcattgagggcctttgtgttgtgttgtttttgttgcgcaaccttcccgacaaaagatatcacatatagaccccgatatcaaaaatcaaccgcggccatacgacattcaccaaaccccgaaaagaaaagcgattaaaagcgagaagtgagcagagactttaagagcaactttaaagcaacttaataaagatataataattgtaaaagagactctataactaatcaatttatcgacggagtgagtccaaagaaaagcgaacaaaatgatgggcacaatgccacccaggtacataacaatagagttaatctaaaaattaattaactttaacattaacaataacaatagcgacaagatcgcgctgcgattaaaatcaattcgaacatcactcatccgccatgtatgcagagcacacgtttcgttttatactttcgtttcattaaccattcatcgatttgagctgattgtgtggcgcattaataactgtgttcgtgtacatttaaatggcttctcatcgttaattaaaaaatgttaattagcagcatttgtttgtcgtttgctgccattttgcttacaccagaccgcctttgttgctatgtcacgcgctgtacaaaattgcaattcaatcgaaacgtatttactttgcttgaacgtcaccgagtgattgagcacatgtgtctgtaatttgatttccaaactacctgtcaatcacttgagtacatactagggatggcaaatctacgggaatcggattgacaatgagatttcctgcgatataacatctattttagaatagtgctttcaaaatgttgaacaacttttataagtaacagggaaatacctcgaatatatgcaatattttgagcaaataaatattatagattaaatgctaagattaggtagcagaagataaagaagtcattgcaactagaaaatacacttaaataattattaaacctataagcttaaaattttacaatttttttaaagtgttttatgtgtaattctaaagtatcgacatatttggcatccctagtatttgcgtgctatgtattttctcctcctgtgaatatgtctgcattgcctgaaatgcattttgccaaacgcaaacgatgcaaaaccgaaggagaattcggaattctgatgaaatgcatttctcgcgtgcattcaaaactccctgcctcacattttgtacaatgtctatacgtgttctttatcatccaattcccgaaccgccctttgaaccactaaaactgccacaataactccatgaacaacaacaacaacaacaataacaacaacaactcaaccatcgaaaacaacaaaagccacacgcaaagtggcctggtattcacaccactcaatgagtatgcaattacaaccaactaacttcaattacgaaatctaaatatttttgctctattcccctcgtcatattgtaatgcaataataatccaatgatttaccccttttctccgcattttgcactgctctctattttggcactcgtagcccctcaaattgatttgttaattattagaacatttgcccgaaatccagtcactttgctatcccctttcgcatggattgcaattagaattcaattatgttcaaataaattaatttagtttccgaaacgtgctcatcatctgggtggaaaaaaaagagagagagcgttgtcagtgtgcgtgtgggtgtcggtgtgaatctcccattttttgggaccacttgacaaaaccctcgagaacagtacagagataaaaaaaaaaatggccagaaaaataagtagttttctatactaaagtagaatctcaatatgtgctccaatggaatgttggaatatattttatgttcttggatatttcttgaactctttaaaagtgtgatttgtagggcacttcggatataaaagttaaagtaattctaccgaaatgttataccgcaattaaaaagtgccaaaaaagtacggagtcatttatttttctctgtgctgttgccaggaggctgtgttttttatgacaagccgaaaagtgtttgagggccattaagtcgctgttcgcaccacacacacacacacacacacacaggcatacacactcacccatactcgtgcgcaggcatgtaaagccattgacaaacatcctttggccaggcagtcaatcagcctgcggttggccacttcagcagcgctcgctcttattttccgcccgccactttccgccccctgcatgtcatcaagttcataattagcttaacctctttaccccccaaaaaaaaaacccctttcgtgcgtaatcccctgccaatgcatcactcagtcagtcagtcagtcagtcacacaatatctgcaggatttttcaactcgtttactgtcccgcctcggtttttttttttgttgttatttgtgttttcggttccaatgtttcgttgctgcaatgaattactgtactgtacactttttatggtttcatgtttgtcgatgtttaaaagtttgccacagacagaacccagactaattggcgtagcggttccttcaccaaaattaaccgaaaaccgagagaaaactgtaacaagcagatactacagaacatttgttttccgttcattcgttcattttggctttgcatatatcttttaccgaaagcgaactcaaacaatttcataatccaaacaaaatgttaatcatgccaatcataaaatattgccttgcaaatcgaaatcaacgagagcacaaataaattcaaattgatttacaaatgccgacgcaacgcgggctgtgcagcaaaagtttatgagagtcgacacaaaaaacaggctgaaaaacaagtgtttgcaacgtttggtgaatgtcctatatgccaattggtttgaacaccccgttttcccggtttcctgctttccctcgatttccctcgatttccctcgattctccttgtttccccaattcgaactgattgatgaaccttgcatacagctttgcgagatgtatgagaacaatcgattttgattttaatttattcgctgaatttattgtgtgcactgagatctgaactgaactttagctgtaagtgaagcgagtctggagacttgacggatggcgaactctggctgtggactttcgcagggttaatgtgattgaaatcctgccaaaggataatccgcttttcttcttgtcaaaaatgtgatattcctaaaactgagcgcagctttttgacaaactcaaagcgaaaagaacatctcgattggaatcccgaatcccaaaaccagaatgctgaatgctaaatcctgaaatccgggaatcccttcagccggcgggacacgtacactgccggttttaatgaatgcacaagccggggagaaattggcagaaaatttattaaatgctcacgtatacaaatcccttgtacaaaaccgaaaaccgaaaatgcctgcatctgacaagcacacatacacgcacaggcagcaattgttttcgcagagaacaataacttgaacaggatgcgctcgaatatctcgtcctggttctggttttgctctcgattctgtttcggattcggtttcgccggctgatgtatgcataaaataatccttttatgctcggcacaacaatgtccgtgaaatgcaaaacaataacagtactaacgatagcatttccccgccttccccgcaggatgcccatgccctccttctgcgttgcattaacataatgcgcaggcaactcaagcagggcccacgtgtcgtatgcgcaatgtgggcggcatgggttgccattcatgcacccatccacccatccggtggcaactgtcgccccaacacttttgttgccatttgatttagatgcccccccctccccgcacaccaaacaaataaagcataaagtgcatcttccgatgcgaccgtcgatatacaatatatctaaactaaagcaacccgaacctataaggcttataatacattttttctaatatatagtgtgcttattttgatttcaaagatggatgaaagtgcaaaacagcagctgttgaattcattaaaaactcgggaaacctatctcgatctctaatgtggttaagttagtcagaaagcgcattcataggcattgttttaagttgcacaactttggatgcagagcaaaaggcgcggccgatttgttttcacagcctttgcggttgatgaaaatgtaaatttgatgcattccaagaagccagaaccagatatgaacaagattaaaactacaactttgtcagggtcgctccttccatccatccgaaagagttgccagcagaagagcggaataaatggggccagagttcggagctcatgcagcttaaatataaatactagcgtatatatgtatgtataatgccgtcaagtttccatcctcgtgcattgtacattactcttggcttaaccttaacgaaatatgccaacaatttactttaagttactttttatgtacttagtggcctggctcggttattattgttgttctcggtccgcccaacacagaaatcctttcttggacttctgcccaaggagctgagtgactaaggaactcgccgactggcgtgcgtttctgttcggtttcagtttcagcttcagcttcagcttcagtttcggtttttgtttctgctcctcggcttcgagccgtggcccataaaatttatgttgcttcattcctcaataattgcatagctcagtaaattttaatgcaagcggtcataaataatttcgttctgtttgtgtttgtgttttgtgtgtttcgttcacgatttgcgttttgccatttgcgtttactctgggccagagcgaaataaataacgtatacgctaaataactctgtctcagtctcgtagtggaataagtactttaaggaatgaactcgaaggcatttcacgaccggcgcacgactaaaatgcattttgtttgatattctctttggcctttgactcgacgcctgtgctgtgaccctttgcccttccactgacccaccacagtttgcaaaagcaagttagcgtgatgagcatgaatctgtcagcgaaactcgatgagctgcagcggggagatcgacacctggagacgacggtcgccctgtgcgaaatccgcacccagctccaggagctgaccaaatccgtggagagctgccagagcgaggtgtccgaggtgagttgggagtcgagaatcccaataatacctggctaaattgcttagaatttgtccaaaaattcgctgtacttatttatatgaataactaaaaaaaggattcgttgcttatccaggtgaagcgcgacatggtggccatcaagcacgaactggacaccgtgcagcaggtgaaggaggagatcgaggagctgcgcgaatacgtcgatcgactggaggagcacacgcacagacggaagctaagacttttagaacaagtttgtagcttaaattatttgccatgttgtgtaattaaatacttgaatttcatttctctattcatgtacaaaccgaaacaccaagaaccaactaccaacaacccagagccagacaaccacacgaccaaaaaaccacccagaactacccgaacatccatccacccagccacacaaaaccactgacggcagaaactgccaccatgacggacagatgcaaatgctcttcggattggcctcagtttctgtccacactcaaacaaatttatcccctataacgacttgaaaattggataaccgaatttcattggccgaattgcagtataaaaagtacttaacagagatttgtttgagtgtacggcacacgtacagacggcttcttcatcaacgtatattaaatattagctatctaattagttttgtattatttatttttataagttctgtagcaaaatcaaataaatatatgcgaaaaatgttaatacaacttttattttgttcaatttcattgatttgaagtatggtttccgacatccgaacactttcatccatcagaacgtatcttattgtttcgttacccctgagtttcaattagaaaattggccttatccaaagagaaagctttggtttccttgacgcacactcgtttgcaaagcgtttgatggacccgcccgcacatcccccaccaaatccccaccgtcccgccccgctcccccgctgaattgttcaccactaatggtatttaccaatcaaaacttccagggtctcaccttcttcctcacctactcgattttctcggcggtgctgggcatgctgcaattcggctacaacaccggcgtcatcaacgcgcccgaaaagaatatcgagaacttcatgaaggacgtctacaaggaccgctacggcgaggacatcagcgaggagttcatccagcagctctactcggtggcggtatccattttcgccatcggcggcatgctgggcggtttcagcggaggctggatggccaaccgctttggcaggtaatttaattgtcttatatcaatagttttataccaaactagatatgatatcattgcttaaatggtttccatttggttcgaattgcagaaaaggcggcctactgttgaacaatgtgctcggaattgccggcgcctgtttgatgggatttaccaaagttagtcattcctatgaaatgttattccttggccgatttataattggtgttaattgcggtgagtgattattataaactaataagttcaaatacttactaatgggtgcatggatttgattcgaaggcctcaacacttcgctggtgcccatgtacatctcggagatagcgccactgaatctgcgcggtggcttaggaactgttaatcaattggctgtgactgtaggtttactattatcccaagtgctgggcatcgagcaaatcctcggcaccaacgagggctggcccatcctcctgggcctggccatctgcccggcgatcctgcagctgatcctgctgcccgtctgcccggaatcgcccagatatctgctcattaccaagcagtgggaggaggaggcgcgaaaaggtacaactcctgtgtaatctataaactttaagctgcatcttttaacaaatccttgtgtagccctgcgccgactgcgagcctctgggtccgtggaggaggacatcgaggagatgcgggccgaggagcgcgcccagcagtccgagagccacatatcgaccatggagctgatatgctcgcccaccctgcgccctccgctgatcatcggcatcgtgatgcagctgagccagcaattcagcggcatcaacgccgtcttctactattccacgtcgctgttcatgagctcgggattgactgaggagagcgccaagttcgctacgataggcatcggcgccataatggtaggtttcgagaagccatcatcaaacgacctcagattctgagttatgtgtgttactgtatttttgcacaggttgttatgacgctcgtgtccattccgctaatggatcgcacgggtcgccggaccctgcatctctatggtctgggcggaatgttcatcttctcaatcttcatcaccatttcgttcctgatcaaggcaagtatagtggtgtccaggattcttgagtcctgctcttgctcctgtagagtaatgcctgcgaatgtcaatgctaagatgcctgccagtttgggtttgcatttgtttgtcccccgcccgttcagtgatttgcatatgactctgaaatcctagaaacgctagaacttatatcccatatcccatttcccatttactccaaacgagtgcgtgcgtttataaatatttgaatattaatatattttatgcatgaagttgtgttttaccccttcgagccctcaaaacatgaaaaaaaaaaaaaaaaacagaacataaaaacactcaccaacacacacgtaagagcatgacagttgtcccgcgcgtatatctataaattattgatgtgagatatatttgaatttataacaagttggatttatgactctcgcccagccattaaacaaacgtagcctttttgtgttttttccgtgcttgcgttgatgtattgcatttaagtcatagacgtatgtgtgtttaatttataggccaaaacttggtcactttagtaattaattacgtcctctatctgcgatttgaaaatatgtttacgcagattgtggcacatgaatgattagctttggaatgcttttgtgttagttatgactttttgagttttttaccgctttccaactttgtatacacagtttgcacgtggcttgccaatagatatacaatagttactttttcagttgcctaggctaagttgttgcgcctgtgagctggaccacaaatacctatttaatcaggcacttgtttatggatgtgtcaagcatttaaagacaagttcctgatttcaaatatcccggccagccccttgcgcaactgtcccgcccctaattagtgctattctcgacttggcaggctttcgccccacaaaacactcactcgaaatcggttgacgaattcgttctgtttatgatttatacgctttgttttccgctagaggcaatccacacagtttcaaaggcaagcaaaagtttcgacaaaaagcaaaaccaacacacaactgagcaaaagttttccgggcaccagttccaccagctcccccaaaatggagaaaaacatagagcagagcaccgcgctgaactcgctttagaggtgtcaccacctcccacacacgaaactctcacatagaaaccaaaacactcaatgtgacctcaagccataatttatactctttgtttggtaattgtgtaagatatagctaactttgcaactaagtacaacaaagcattcctaagcattctcagacccagaaagactcgagcagcagttcagaggtcaactctttgagaaccaagaaaacgagagcagccaacttcagctcctatcaaacttaatactttcgataatctaataaccaactcatgcataaaagagatcaggcttatctagggggttgtgtcttatattcattcgtattatttcgaagacagttcgttaagcgcgagtagaggaaaagcctacatcgagaatgcgagtactatgcattttgtataggagttctttggttatgtgcaggaaatgatcgactggatgtcctacctctctgtggtggccactctcggattcgtcgtcttctttgcggtgggacccggttcgataccctggatgattaccgcggagctcttctcccagggaccccggcccagtgccatggctattgcggtgctggtcaactggatggccaactttgtggtcggcattggtttccccagcatgaaggtgagttaaacgagctgagctttcatttagtacaatgctcgtcgtatttggatgtgacatattattcactttttacagactgccctggagaactacacgttcttgccgttcagcgtattcctggccatcttctggatattcacgtacaagaaggtgcccgagacgaagaacaagacgttcgaggagatcctggccctcttccggcacaacaatggcaggtatgtgtccttgcactagctcattctacgctcaaattctgcacacaaatcatggcaatatgtcgaatagttatccagctcataacttaaactcaactttcttaactgacacaagaaatgcgaactataaatactataaaatacaatacagaatctttgtactatgcccttgattaccattacttggaagtttattatgcggtttgcatagccaaactgatccagtgaaccgcttctcaaggatcggttcagggttcagaagttttgatttcctttcgttttgaaattttggttccattttgttttacgaagcaccataagttcgaaaataaccctctgacttgaaatacgttccatgtattcctccaaggacctttcgagatagtagactgtacgggtaagttgcatgaagccaccgaggacgattgatcagactcttaagctccgaatctaaaagatcccccattcaaaatcaaatattagatccgatgcgtttcgctctccaaagttccaccttaaatttgtagctcgtattgctgtactttatttagccactttatgtacaatttttaatcgaaccaaaaatactaaaaacaaagctaaccgaatcgaattgagattgtggattcctgcgctcaaaagtttctatgaatttttcggcatgtttgcttaactttgcctgtactttgttacaactcgttactttgttactacaactacaaaccataaacaactggctgccgtaaagcaaactaaataagactcataatagccaaactatatacaataaatacccaatattaaatatcaattttaatactctactctccaactctctctatgcatagctaagccgttacctatacttactactattaagagccgcatctcatctctttctgcccccccatcacgttatccgatgtatcagaatcgctatcattgcgtcccgtttcccctcatagctcatttacaaatcaaattggttggttcaaagtgctccatccatgcatttcattaaagccccacttacactgccacaccacatgcacactgattttgttgcccgatctttgatcatatagcgaggataatgccaatggaaacagtgttaccaccgcggactttgagttgtcgcagaacgatggcgaagagaaaggtggc

SEQ ID NO: 27716 - DNA, 2049 bp, DROSOPHILA
aggcatgcatcgggctctccagcgcgccagttatccagcctctcagctcagccgctcaacttgtcgactttcggcgcgaaccgctgaccaggccaggacctcgcaggatctaagtttccaggacgaaacagaacagaacgggacccggcagtcctcagccatggctgctgaataattaatgcagtttcgctctccggtgctcggcaaacgacaaaactaatttatggcattaaaaatgcatattttctagcagtgcgtcgacagtttttatcatttgccagaaaggcaaaaggcgctatccaccagcagctgtgccagaaaaggaagctaggaagacacgtcggtcgagaattggatttgactgcggaggattttgaatccgagtccgaaagttctttagtcagcaaccgaagaagcgtaggataattcacatttttctcacggcaactggcaacgaaatggctttcctatgtgcaccgggtctcaccttcttcctcacctactcgattttctcggcggtgctgggcatgctgcaattcggctacaacaccggcgtcatcaacgcgcccgaaaagaatatcgagaacttcatgaaggacgtctacaaggaccgctacggcgaggacatcagcgaggagttcatccagcagctctactcggtggcggtatccattttcgccatcggcggcatgctgggcggtttcagcggaggctggatggccaaccgctttggcagaaaaggcggcctactgttgaacaatgtgctcggaattgccggcgcctgtttgatgggatttaccaaagttagtcattcctatgaaatgttattccttggccgatttataattggtgttaattgcggcctcaacacttcgctggtgcccatgtacatctcggagatagcgccactgaatctgcgcggtggcttaggaactgttaatcaattggctgtgactgtaggtttactattatcccaagtgctgggcatcgagcaaatcctcggcaccaacgagggctggcccatcctcctgggcctggccatctgcccggcgatcctgcagctgatcctgctgcccgtctgcccggaatcgcccagatatctgctcattaccaagcagtgggaggaggaggcgcgaaaagccctgcgccgactgcgagcctctgggtccgtggaggaggacatcgaggagatgcgggccgaggagcgcgcccagcagtccgagagccacatatcgaccatggagctgatatgctcgcccaccctgcgccctccgctgatcatcggcatcgtgatgcagctgagccagcaattcagcggcatcaacgccgtcttctactattccacgtcgctgttcatgagctcgggattgactgaggagagcgccaagttcgctacgataggcatcggcgccataatggttgttatgacgctcgtgtccattccgctaatggatcgcacgggtcgccggaccctgcatctctatggtctgggcggaatgttcatcttctcaatcttcatcaccatttcgttcctgatcaaggaaatgatcgactggatgtcctacctctctgtggtggccactctcggattcgtcgtcttctttgcggtgggacccggttcgataccctggatgattaccgcggagctcttctcccagggaccccggcccagtgccatggctattgcggtgctggtcaactggatggccaactttgtggtcggcattggtttccccagcatgaagactgccctggagaactacacgttcttgccgttcagcgtattcctggccatcttctggatattcacgtacaagaaggtgcccgagacgaagaacaagacgttcgaggagatcctggccctcttccggcacaacaatggcaggtatgtgtccttgcactagctcattctacgctcaaattctgcacacaaatcatggcaatatgtcgaatagttatccagctcataacttaaactcaactttcttaactgacacaagaaatgcgaactataaatactataaaatacaatacagaatctttgtacta

SEQ ID NO: 27717 - protein, 481 aa, DROSOPHILA; identical to SEQ ID NO: 18

SEQ ID NO: 27718 - DNA, 4717 bp, DROSOPHILA
agctggtctatcagctgggcaacgaggaaggtgagtgcttcccacttggctaacttggatagcacggcttagccgcggcttggctctagggctcttgctgttttagttttttgtttttactttgttttacttttcgttttaccccctcttcccaccgtttgtgttgtgttttttgtcatgtggccaaaacacttaacgatttggattggggactgcacgagatgatgaagtgcctaacagttatgcacatgcgggtacttgttatagttgggtaatgcctgtcggcctggaagaaggagagccacgctgagaaaagtgcagcgaaatcgagtcgtttataagaaatctttccactaacctaaactaatatctgaataactaattggacgtagtttgaaagtagaagctcaaattatttgaacaagaatgaagtgttcttcaagcacaactagttaatagttgaaataagaaacattttctctcactgcatcgtttgtcgaggctctccttaatcgaccgaccacatggaggactttcgcgcggtgcacttatgattcgcacgctccagctgcgaccaagtgacataaccaagtggcaagcgagtcgctagcgagtcgctagcctttcgccaaaatcgtgccagatctgtcgacgcctcggcggcggactgatttattacttgggagcgatgtaggcgcattttaattgcggacctcgggcgcccactttcctggatcgttaggaggttttggcccacaaactaccgcgcttagttggtgtcctactcttgtactaattcaaattgatctaactttactctacgaaatgctatatgtttaccgttgtagtactaccagtgatgcattctaaaactaaacaccccaaaacaaagaaacgaaaaaactttgactagtgcttaaggcgttctaaggctaaatccccacacccagagactgataacccaccaaaaaaaaaaaaacaataaaatccgatcagacagaaaagaagggctaaatagacaactgtaagcccccgtacatctagttgttaaacatgctaatcgtaatcgtagtgttcgctaaaagtaactctggtgtccaaaaagcctagtaagtattgcgagaaccgtacttggattgctagctttaattggccttctaacacgaacggggtctgtgttttgtttgcatgcatcctaacaccaaacacataatcgtactgagaacgccactaactactaaccagcactaactaatcaatcaatcccaaagaccgcatgatctacagctgactgatatcttagaatgcattctcactggtgtttgtttttcgctcacaatcccccaccactcaccccatcgcttatcattgcctgtgaaccactgaatcagatcttcactaatggattgtccttaaacgcagatcgcacgccagatcgcagcacatggaagtggagccttcactcgggaagtaactcgactccaacttacctggagcgaaggaacgcctgccggaggagtgagatacgccagcggaattcaaagttcaagcggaagacggtggccaactccagttcctttgacagtttcaatgagtccttggaacaggaggaggaatcgattagccaggcgaagccctcgaagccactggccagaaataacagcctagacgatactgctctacagaaacttgctgctgctatgagatatcgcaaaagagatgctgcagtgaaggaggagacgaagacgccggtgaaggagccttgtaagtgcgaccaggatgcgaaacaggacgagcggattgaaccgtgttcctgcattctgcgggatcagcgcagtcgcagtgccaagtcacaatctcctgtcttcagctacaaggcactcaaggagcgcagcaagtcggttccccggatcggaggctttagtttggacgaggaggctgagagagaacgggaacaggacgaggatagcgcagcctctctgaggggcagcaagcccgatcttagcgagcgcaagaccaagggaaagggattctttgaagttaagcaatacaaccacaagacgatgcccaaaaagatagccaatttgaagaagcaacgaagtagcaccaccaagagctgctccaggttctacatggatctcagcgaattcgatagcagcagttcgactgtactcaagataaccgaatccaccgaggagctgcgtccagatggggaaatcgaactggcccaagaagccgccactctggatgagtccacgcaggatcagtattacagcccagatcacgagacggaactactgtccccagcagagaagtcaaagcgagatgcacagattgtccttgatttgctaaagaatagcaaggaatttgagaggatctacaacaagcaacagaagaggcgcgaaagtccagtgagtcccgtgagtcccgatataagtcgtggtcccattctgccgcctccgcgtccaccatcgagatctccaccacccttggaactggaggagcaggagaagaaaccagtcgaagaggtggattcagtcagcgaggagcccatttacgagactctgctgcgcaatgtccatgtgccctacaaattctcaccggtgttgggccgagccaagtcctcgcagatactgaagaagcgatcaaagactgctcccgcagcctcacgaccggaatcggattacgtgaccctagtctactcgcccgaaggagttctgcagcgagtgggcgaggaggtggtgcagagggatagctgcagttcctccaccacttcgacatcctcaaatggatcggggtccacgctgaaacgagacagccagagcacagtgatcaatcttttgatggaggcggcgcaagagcacgaatcacgtcccttgccgaagaattcagtttcaggatcggagagttctctgctgccacgggctctgaagtccatagacaatctgagcatggccttcggacgctccaaccgaccgccggagcgccgggtgtccgatgtgagcgagatgtgccgtcagagtgtgcttcatcgccagggcagcgaggcggtgggtgagagaatggcccatgtggattacgctgatcccaaggctctatttggactgggggtcctgaaccactcggaacgtgactcggtcttctcgctgacctcctcctccagtgacagcatgtgcgagcagcagcgcaagcgatccggcgtgggcgccaccttcgagtatgagcagcaggtggaggatagcttggagaatgattttcgcgactcggccatttacagcgatgacaacgagaagcgttccggggactacgatgtccatctacgccgtcccagcagtccgccaccaccaccgcctccgctggggccgcgtccccatcagccaccacagattgcgccgaagccttccaaggatcagctaatccagcagcgatcgggcgtcatcgtctgccagtcggcctcccgcagctgggtgcttcagcagattgagaacttcaacaagtagaggatcctagtgatgcacagacgagccgttgtacacgacccattgccataaatgaaattcctttattatttctacatgtacatagttataagtgtctgatacacactttgtatgcaatgctaatcttagatagtattagtcgactgttttatatttagagcttagttgcataaccgcagagtcatttaataaagttcgtaatcaatttgaaaattttaacgctgtgtaactttcaattttgttttgggatcgcaaggataataagcaacagcgtattaaaaacgttttaaaggagtttgaaaagtaacatttcttgtagcgtacttttacagcgctgttatctaaagtctacatgttaacatatatgatattatttgacatgttacctagaggctgtcaaatgtattttactttgatgtaccattttgtttacaacaaaaaacagcttttcaccttttgaaaaatggttgaaaagctttgtttttaataaacgataaaaactgaccaaaagtatgcaactataaataaacattgaggaagaatatttactgccaaaaggtaagcactaaaaatttttcaaaaataagtttaaatccttaaggtaaacctttgtgaatcttatttaagggtttgatttgattgggataaatgccttaataactatacattttatggtgcgcttttttatataaaatatttaattaaaatttaatcaaagctctttctttaattattcaagcttatttaaaatcctttttgttctaagtcagattgttttgcaaacactctcctattcttcgaaatcatgactagcatcagaatattatcataattcaaactcatttgaatgttaatccggttacctgctaaatggtctgattgacaatcactcgcctgataattacgacaaaattaaatttataattcaaatgccaggaccggtccgacatgttccatggcgtaatccacttatacagtccggaatatttttgggtgaaatatacggcagtgcagcagctttccactgattatgcacactttgaccatttctctggaggttccgccattgaacaatgatgaaaatcaggctgccatgtgccattggcgaccgttaacgtaatctgccggaaaattaattgcgatgtgtatccacacatatcaacagtgtcaacacggtgtttctaccttcaaacagcaaaaatccacgttaatttgtg

SEQ ID NO: 27719 - DNA, 2717 bp, DROSOPHILA
aaaagaagggctaaatagacaactgtaagcccccgtacatctagttgttaaacatgctaatcgtaatcgtagtgttcgctaaaagtaactctggtgtccaaaaagcctagtaagtattgcgagaaccgtacttggattgctagctttaattggccttctaacacgaacggggtctgtgttttgtttgcatgcatcctaacaccaaacacataatcgtactgagaacgccactaactactaaccagcactaactaatcaatcaatcccaaagaccgcatgatctacagctgactgatatcttagaatgcattctcactggtgtttgtttttcgctcacaatcccccaccactcaccccatcgcttatcattgcctgtgaaccactgaatcagatcttcactaatggattgtccttaaacgcagatcgcacgccagatcgcagcacatggaagtggagccttcactcgggaagtaactcgactccaacttacctggagcgaaggaacgcctgccggaggagtgagatacgccagcggaattcaaagttcaagcggaagacggtggccaactccagttcctttgacagtttcaatgagtccttggaacaggaggaggaatcgattagccaggcgaagccctcgaagccactggccagaaataacagcctagacgatactgctctacagaaacttgctgctgctatgagatatcgcaaaagagatgctgcagtgaaggaggagacgaagacgccggtgaaggagccttgtaagtgcgaccaggatgcgaaacaggacgagcggattgaaccgtgttcctgcattctgcgggatcagcgcagtcgcagtgccaagtcacaatctcctgtcttcagctacaaggcactcaaggagcgcagcaagtcggttccccggatcggaggctttagtttggacgaggaggctgagagagaacgggaacaggacgaggatagcgcagcctctctgaggggcagcaagcccgatcttagcgagcgcaagaccaagggaaagggattctttgaagttaagcaatacaaccacaagacgatgcccaaaaagatagccaatttgaagaagcaacgaagtagcaccaccaagagctgctccaggttctacatggatctcagcgaattcgatagcagcagttcgactgtactcaagataaccgaatccaccgaggagctgcgtccagatggggaaatcgaactggcccaagaagccgccactctggatgagtccacgcaggatcagtattacagcccagatcacgagacggaactactgtccccagcagagaagtcaaagcgagatgcacagattgtccttgatttgctaaagaatagcaaggaatttgagaggatctacaacaagcaacagaagaggcgcgaaagtccagtgagtcccgtgagtcccgatataagtcgtggtcccattctgccgcctccgcgtccaccatcgagatctccaccacccttggaactggaggagcaggagaagaaaccagtcgaagaggtggattcagtcagcgaggagcccatttacgagactctgctgcgcaatgtccatgtgccctacaaattctcaccggtgttgggccgagccaagtcctcgcagatactgaagaagcgatcaaagactgctcccgcagcctcacgaccggaatcggattacgtgaccctagtctactcgcccgaaggagttctgcagcgagtgggcgaggaggtggtgcagagggatagctgcagttcctccaccacttcgacatcctcaaatggatcggggtccacgctgaaacgagacagccagagcacagtgatcaatcttttgatggaggcggcgcaagagcacgaatcacgtcccttgccgaagaattcagtttcaggatcggagagttctctgctgccacgggctctgaagtccatagacaatctgagcatggccttcggacgctccaaccgaccgccggagcgccgggtgtccgatgtgagcgagatgtgccgtcagagtgtgcttcatcgccagggcagcgaggcggtgggtgagagaatggcccatgtggattacgctgatcccaaggctctatttggactgggggtcctgaaccactcggaacgtgactcggtcttctcgctgacctcctcctccagtgacagcatgtgcgagcagcagcgcaagcgatccggcgtgggcgccaccttcgagtatgagcagcaggtggaggatagcttggagaatgattttcgcgactcggccatttacagcgatgacaacgagaagcgttccggggactacgatgtccatctacgccgtcccagcagtccgccaccaccaccgcctccgctggggccgcgtccccatcagccaccacagattgcgccgaagccttccaaggatcagctaatccagcagcgatcgggcgtcatcgtctgccagtcggcctcccgcagctgggtgcttcagcagattgagaacttcaacaagtagaggatcctagtgatgcacagacgagccgttgtacacgacccattgccataaatgaaattcctttattatttctacatgtacatagttataagtgtctgatacacactttgtatgcaatgctaatcttagatagtattagtcgactgttttatatttagagcttagttgcataaccgcagagtcatttaataaagttcgtaatcaatttgaaaatttt

SEQ ID NO: 27720 - protein, 599 aa, DROSOPHILA
MRYRKRDAAVKEETKTPVKEPCKCDQDAKQDERIEPCSCILRDQRSRSAKSQSPVFSYKALKERSKSVPRIGGFSLDEEAEREREQDEDSAASLRGSKPDLSERKTKGKGFFEVKQYNHKTMPKKIANLKKQRSSTTKSCSRFYMDLSEFDSSSSTVLKITESTEELRPDGEIELAQEAATLDESTQDQYYSPDHETELLSPAEKSKRDAQIVLDLLKNSKEFERIYNKQQKRRESPVSPVSPDISRGPILPPPRPPSRSPPPLELEEQEKKPVEEVDSVSEEPIYETLLRNVHVPYKFSPVLGRAKSSQILKKRSKTAPAASRPESDYVTLVYSPEGVLQRVGEEVVQRDSCSSSTTSTSSNGSGSTLKRDSQSTVINLLMEAAQEHESRPLPKNSVSGSESSLLPRALKSIDNLSMAFGRSNRPPERRVSDVSEMCRQSVLHRQGSEAVGERMAHVDYADPKALFGLGVLNHSERDSVFSLTSSSSDSMCEQQRKRSGVGATFEYEQQVEDSLENDFRDSAIYSDDNEKRSGDYDVHLRRPSSPPPPPPPLGPRPHQPPQIAPKPSKDQLIQQRSGVIVCQSASRSWVLQQIENFNK

SEQ ID NO: 27721 - DNA, 5503 bp, DROSOPHILA
gagccagtgagtggtgcatttacgcagctgcaaatagtagtgtacgccggctgtatctaacgcgttcgttgaactcgaagtcgaaaacaactgcgacagtgcttgcagcactgcacacaagcacgaaagaagtttttgactattatttaccccgcttctgggtgacacgagcaaagacaattattgaatcgatttctgggtcagccaagacagttgttatcagagacctttggttgaaaagttttgtattatttaaaaacataaggatttatttacatacctaatcttttatatacatgtacgtgaaattaattcgttggactcttgatgcatgtatcacagttcaatattctcgcttcagtacattttacatgcaccattactcacagcaccggccaaaatgatttgccggcgagtcgcatattgtataccctagacaagcaagaaaaaacgtcttgctatgagcagcataatacggcattcgcaagacgctaaacgaaactgatttaaacggtatcaaaaagtggcgccaatggtgaggccgactcacaattaaatttgtattcatagactgacgctttcaacagataaagcggttcggttgccaaaacatgagacccgcaatcagtcaaagtaaaaagaagataaagagtgaataataacgtaaagattgcgcatccgtactgtccgcccgaccgccttaaatctagtgccgatccaaacttccgctatgggttcacccactcgctgataacgcacgaatttctcagaaagttctgtagtgttgaagctgcatcggaataattgcaaatcgactgcccagtttcggtttgtattgcctttactcagcagctcgccatgccacttgctcttcccccattccctgactgggtcggcatatacccggaccgtcagatctccgggccgtcgttgaagtcagacgactagtcattcggtcagaactcgagcaggctgtcagtcgtgcatgtactgtgtactgctttccatcaattgaaaatctgagtttgttttcgggctgcgctcagagactacgatcgcgcatttcgtagggtaaatgaaattaatttaaaaagttcttcggtcagttcggaatttgtttccagaacgaagggagggcgctttccgtggtcccagatacgcgtaagtaatttttagaaatgcaaattaccgcttttaattaacttgaattgaggtagcaagcaaacgacacatgagttgatgatgagtttatcaaactggtttaagccaaaaaaacgtactgccttctcttgtactgttaaccaattaatttctagtgtatagtgcaaataaaactgcgccttaaaacgaggattccagatttcgaacgagcaccttaaaaggttatctttaaaagcaaagcattatgtgaacggtaaacagatcaattcttataagcgattttagtgcgaagtgaaattattgaatttcttatcaaaaaatcaccattttccttctcaaggagcaatgacatcgattcaaaacaacaacgaagtctagaaatattaaaatggaaactgccagcagcgtaaaaggcagtacaacctcccaaatcagctcccttcaatatagcagcgacattaacgccgatagcctcgagcccgatcaatctgaggactttcaaacagtcctcggcctcaagtatttgccatcctggccagcggtaaatttgcagttttcggaactatgttatgtggttcccgaccagaccaatggtgagtgtatcaaatcagcttatgtctattacggttgagtaattgataatgaatatattcgtgattgataatggggtattaagaatggtaattgcacattttcgaagtaattactgcttccacagctcgcttgatttctaatgctgaacatgcacatattaaatagcaatttccgtctaattccacattaacgacaataaattaatgccgacatcttcccttacaatgaaacattaaaattattctttttaatatggtcatcacaccccacagcttcaaaaacaaagacgattttgcggagagtcaatggaatgtttcactctcacgaacttactgcgattatagggccttcaggcgctggtaaaaccacactgctaaacctgctggcgggctttgggtaagatataacacaaacgacccccttataatactcctttaatatttaccgatagcgccgtgtgcgaatccggcgagattttggtaaacaacagtccgcgagatatgcgagtctttcgcaaaatgtctcgatatataatgcaggtaaaagtggattactgaattgcgttcccataaatattggtgtaattcatagactgatgtcctggactcacagtttaccgtactagaaatgatgattttggcggcaaacttgaagttgggaaaagaactaaatttaaaacaaaagctagaagtggtaagattgattttaaatcatgcactttgtcgtgtatttatcttaacatttgagcagattgacgaaattttgggaatgttgcgcctaaaagacaccctaaacaccatggctcaaaagctatctgggggtgagcgaaagcgtttatgcattgcccttgagctggtcaacaacccacctgtcatctttctagatgaacctacaacgtgagtataagataaatattgaagtcgaagaactaatgttaccaccaactcaacagtggtttagacgatttatcgagttcacaatgcattgccctactcaaagttttggccgccggggggcgcactgtgatctgctccatccatacgccatctgccaagatcttcgagatgctcgatgcagtctacgttctagccgaaggccagtgcgtctaccaaggaaaggggtccaacattgtacctttcttgaagaactttgggctttgttgtccaataacctacaacccggctgacttcattatcgaagttgcttgccttgagtatggcgggtcctatcacgagccaatggtagaagccgtgggcaacggcaaagttgcgcgatggagtcctccagcagtggaaggtgaaacaacaacaaccaaaaccgacaccacatcgggggcatcgtcgttttacgaaagggatcagtttgacgaagagattagcccaaaacttttggaggccaaatgtagctggtggctacagtacaagctattgcttgtgcgtatgctaatccaaatgtggagagataaggtgagtgcacttagaaaacgacgtagaaaggcaatgtaattttattttttccgtagtcgtacatcaagcttaagttctacatgaacatcgttcttgctttactggtgggttcgctctactttggtatgggaacctcggcctctaaagcgctttttaacttcggtttcatgttcaccattgtgatagcatacctctaccttcctatgatgcctgtgctcttatattgtaagtactatattttaacctcaagcagtaattcttaataataaatacctacatttaagttcccacggaaatcaatctgttaaaaagggagtacaacaaccagtggtaccgtctgagctcctactacgcagcaatggttacctcaaagctaccatctatgtttattttggccgttatttatctatccattgtgtacttaatgtccagccaaccacttgaatggttccgctttgccatgctatttacaatagctttcgtaacggccctaacttccgacagttttggcttgttgatctccagtagactgagcttagtggtaagcgatttggcgcacatttatttttaatatatcctgattagttcacttatactttagaatgcaatgttcatggggccagttctcgccgtgccgctgatcctgctttccatttacggcattgggtatggcggaggaacatacatatcccctcttatgaggtttctcatgcatcttagctaccttcgccatagtatggaaggcctagtcgcatccttgtacgactacggacgcgccgacacaatttgcgaagacacggaaatcttttgctcatttaaaaagtcgaaagttttgttagcctttttaggattcgaaaacatgcactatttgtggtctctatcttgcttgatgagtttttatttgctgttcaccgtagcagcatactttatgattagactgcgactgaaacactccgaggtcagccccatttttgcatatgtcatacagctgttaacgaaatattttaactttacttcgtacaattactaacattaacaacatgggcggtttgacctcggtgctagaaaaattattttaagcggtatttcaggggacagtcttaacctcccatattatttatgggcttcaataatattaataaactatcaaagtgatattggattctgaataaaagtttatgatcaagaatacaaatataatcaagggaacaataaattactataattcgatcatattgttaacaaggcagaagaaacactacgaataaattattaagtacgcataaaattgttttcaccaaatatgtaaaaaatattagtgggtttacttttttatgcgatggcgtaagtttatatgtatatcatggaaatattaaatataaacaagagagaatactatagtcgagttccccgaatatcagataccccttactcagctagtgtaaatgcggacgcgaaatttcataatttttctgggtgtggctgttttgggcggttttagggagttgcaaaaagttttttagaaaatcgatctatcgatttttacaagactaatcaaaaatgaaaaaatttcaacacattttttaaaattgtgtaaaatttttgagtgggcgtggtaacaaaggtcaacaaatatctgtctctagaatctgtgtgctgaatctcaacgttctagcttttatagttcctcgacgttcaaacggacatgtctagatcgactcggttattgatcctgatcaagaatatgtatactttatacagtcggaaacgtttccttctgcctcttacatacttttcaacgaatgtagcacacccttttactctacgagtcacgggtataaaaatatatagatgtagatatgcttcaaattgcataagagttagaatcaagtcttgcccaagattagaatttaggattgagttaaagatctgcgccgttcgttaccaaactctatctgcctttagactaattttaagtcagaacggcaaagtatgacttcgcctgttcccttgattcactttaaagtattcaaattatttggtagctctatcaattgtgatatgagccgtcacaataaaaaccgacaaagttaattatggaaattatttgaacaactgccgtcgctgtggattggcgcacagttgtctatttaagaggcaaggaaactggactgccgtgaatacagttgatcgataggagccaaagcagtatgttttacgcattcatagcacttgttttggccatgctccacctgtcattcgcagtacaggtgcaaacggag

SEQ ID NO: 27722 - DNA, 2590 bp, DROSOPHILA
ctttccatcaattgaaaatctgagtttgttttcgggctgcgctcagagactacgatcgcgcatttcgtagggtaaatgaaattaatttaaaaagttcttcggtcagttcggaatttgtttccagaacgaagggagggcgctttccgtggtcccagatacgccaagcaaacgacacatgagttgatgatgagtttatcaaactggtttaagccaaaaaaacgtactgccttctcttgtactgttaaccaattaatttctagtgtatagtgcaaataaaactgcgccttaaaacgaggattccagatttcgaacgagcaccttaaaaggttatctttaaaagcaaagcattatgtgaacggagcaatgacatcgattcaaaacaacaacgaagtctagaaatattaaaatggaaactgccagcagcgtaaaaggcagtacaacctcccaaatcagctcccttcaatatagcagcgacattaacgccgatagcctcgagcccgatcaatctgaggactttcaaacagtcctcggcctcaagtatttgccatcctggccagcggtaaatttgcagttttcggaactatgttatgtggttcccgaccagaccaatgcttcaaaaacaaagacgattttgcggagagtcaatggaatgtttcactctcacgaacttactgcgattatagggccttcaggcgctggtaaaaccacactgctaaacctgctggcgggctttggcgccgtgtgcgaatccggcgagattttggtaaacaacagtccgcgagatatgcgagtctttcgcaaaatgtctcgatatataatgcagactgatgtcctggactcacagtttaccgtactagaaatgatgattttggcggcaaacttgaagttgggaaaagaactaaatttaaaacaaaagctagaagtgattgacgaaattttgggaatgttgcgcctaaaagacaccctaaacaccatggctcaaaagctatctgggggtgagcgaaagcgtttatgcattgcccttgagctggtcaacaacccacctgtcatctttctagatgaacctacaactggtttagacgatttatcgagttcacaatgcattgccctactcaaagttttggccgccggggggcgcactgtgatctgctccatccatacgccatctgccaagatcttcgagatgctcgatgcagtctacgttctagccgaaggccagtgcgtctaccaaggaaaggggtccaacattgtacctttcttgaagaactttgggctttgttgtccaataacctacaacccggctgacttcattatcgaagttgcttgccttgagtatggcgggtcctatcacgagccaatggtagaagccgtgggcaacggcaaagttgcgcgatggagtcctccagcagtggaaggtgaaacaacaacaaccaaaaccgacaccacatcgggggcatcgtcgttttacgaaagggatcagtttgacgaagagattagcccaaaacttttggaggccaaatgtagctggtggctacagtacaagctattgcttgtgcgtatgctaatccaaatgtggagagataagtcgtacatcaagcttaagttctacatgaacatcgttcttgctttactggtgggttcgctctactttgttcccacggaaatcaatctgttaaaaagggagtacaacaaccagtggtaccgtctgagctcctactacgcagcaatggttacctcaaagctaccatctatgtttattttggccgttatttatctatccattgtgtacttaatgtccagccaaccacttgaatggttccgctttgccatgctatttacaatagctttcgtaacggccctaacttccgacagttttggcttgttgatctccagtagactgagcttagtgaatgcaatgttcatggggccagttctcgccgtgccgctgatcctgctttccatttacggcattgggtatggcggaggaacatacatatcccctcttatgaggtttctcatgcatcttagctaccttcgccatagtatggaaggcctagtcgcatccttgtacgactacggacgcgccgacacaatttgcgaagacacggaaatcttttgctcatttaaaaagtcgaaagttttgttagcctttttaggattcgaaaacatgcactatttgtggtctctatcttgcttgatgagtttttatttgctgttcaccgtagcagcatactttatgattagactgcgactgaaacactccgaggtcagccccatttttgcatatgtcatacagctgttaacgaaatattttaactttacttcgtacaattactaacattaacaacatgggcggtttgacctcggtgctagaaaaattattttaagcggtatttcaggggacagtcttaacctcccatattatttatgggcttcaataatattaataaactatcaaagtgatattggattctgaataaaagtttatgatcaagaatacaaatataatcaagggaacaataaattactataattcgatcatattgttaacaaggcagaagaaacactacgaataaattattaagtacgc

SEQ ID NO: 27723 - protein, 643 aa, DROSOPHILA; identical to SEQ ID NO: 9534

SEQ ID NO: 27724 - DNA, 5600 bp, DROSOPHILA
aattcatcatgacaacatcaacaacaacgacagcaacgagagcgatacaacaactaaggaagctaagccccaaaccaccaaacaagatacattttcggcgctcatatgggatgatatgactcgcaaaagtgtgtgcaatcgaaattgttttgaaaataggaattaggatagatcctaactaggagtcctgcatttaaagttttgaaagttttagcttgtttcgaaactttaaaagtatctttttaatacaagtttttggatcggtatctaaaataaagtatctaaagtgaagtatctaaaaaaataaagtcaatgattgcacaaactttcgcgattgtaaaccaacccattggcgtctacaaggcagtgttcttcttgtcgtttttttcggatcatataattttcaatcaggatcgaatggcttttttgggctaaccaacttttcggtttcggcccatagaactttgagtggcgttagtaagaagtcgcattagtctttagatgtacatatgcatatagattgtgtgtgtagttatggtagattggtaacgatttggggtttagctcacctatttgttcgttctttttgcaaattctgttttgggaatcgaaatcggattcgcactttgtcaatgtgtgtgtgtgtgtctaagtgtaagtgtgtgtgtgtgttcgtttatggtcaactaaagtaacttgtttttaatcacgttatccttgcgtaatctcttgatctgggttgggtttttagtatcaacatttatctggtataaatatgttttcgtttgtctttacttaattagggacatttgtttaagcgccaccggcgggcagctcgtatagcgaattaattaacgttaattatagcataatttgtttattgcattattatcattattcttagttcctcctccaatcagtgctcttaatatctgttcgatttgcgtgtggttgtgtagagtggtggagttatgtggagtggctccgcggtcaagtgtccttacccctgcgccgacgagacggggatgctgccgtagttgtagtagtagcagcgggtctgctcacaaatgaagtccttcacggccgagcagtcctcgggcatccacttgagcgtgggctgcttcaggatcacgcatcccttctcggcgccactgctgctgtagattggatcggtgaaacagaaaggatatcgatgtagatggtcatagtcaagggagtacagggcacagaagaaagaagtaatcacttatttttttctctgcatcagggagctacatcctatatgatagtttgtcatccttacctgtcgcgagcggtgcgctggggtgaggtgttgctattatgatcgacgggatcgagcagaccggcctggatggcgtccgccgagttttcgaagaaatcaaaagtggcgttaaacggcagaccagtgctcatccataggaacatgcccgtgcccaggcgattgccggaggtccagaaatcgtagttgccgtaaccggcattcttcagatacgtggtcatcgactcggccttctccttcgtctcaaaggaggccagttgcaggcccagggagcgacagtactggtaggccaggaagtagttgagctccggggagtagggattcattcggctgatgaagtactgcactccatccaggtggattgtcgtaatgcgttgacctatagaatatgaaggtaacatggtttatgattcaagatacttttaatttagatcttcaatagtattatagacatctgtaaataccaaaggcctggtcatatgatggtaccacaagtggattagaccttaggttaatgaacctacccatatctgcggattccagacgcaattggaatcgcaatgcgtaaccgaaacagcgaaaacggtaacggtttcaactgcggacatagcattcgtaatcacagaaacatcattaaataggattaccaaaaaaagtggctagccatcgttgggccgccagtccataaaaacgaagaacaaaacgaagaactttggagccccaaatcggacgcatgattcacgaagatgatgatgatggtgatgaccaggagcatttatgcggtccctgacctctggcggctaattacacgaaatccgaaatggggactcaaggtgctgatgacattaattagcccgccggtcagcccgaaatggagacgcagagccaaagacccattcgaatcttatgtaatcgctgacccgagaagtaaagtgaagtgaagagaagtctgcgaggctgggaacaatgcaagatgacagtgactttgggaatgggttcggtatagggttcaggttcaacaggtagtcgagggacaaagtatctgtgtacacatctctgtatacgagatacgttgtgtgtgtggttggcccttttacaaagcggctcaaaagataaacacaaataccaaagcgagtactttgttttccaactgactcaacgaacaccccgggcacttggccatttatggcacttgtcttggatggacattggatatgggatatgggatataggatatatagacatgggcctagacatcaagagagttccagtatttgagcacacacacacatacacacacacactcaccatcatgcccaagtgggtactctgctcgtatatgaaattatttccggcgattgaaatgcaagacacacacgaagtcaactcaaagtctttgcctttgatcagattgatgatagacaagtcgtggcgaagatttatgaatgaaaagattattgggcaacttattatgcgtccgaggagctgagatatccatctacctaataagaataatgatccacgccatgagatcagaagctcaacgggtcgaagaaattcttaaatttcattttaatgggccaatttaagcttggagctcagctcaagggaacggatacaattcaagcattaattcacccaaatgaattcagcttgatggcgaatctaaatcggattcggagtggatggatagtccaaggcacttggagagagaagataacgagctacgtcccaattgcagttaatttgacactgactctggacgtgaattcaactgcgagtccaagaccaagaccaagatcgagatcaagatcggcattgggatcggaatcgggatcgggataggtaaacccataattggccatcgcgtagccgaaccccagttccctgtagctcttgagcaccataatttccgtaggtaattacgcctggccagcgatagatcgcgaatctagcacgtctctaatgatgcagtcaaagtcaatgctagtgtttgccgggaccctgatgtggatgctgatgctattgccggaggatgcggctaactctagtgatttgttggcacctaacagccctcgggccagttagcaggcaaatcattataatggtgatggcgactgggataagcacagggaaattgataaaaacaaaaaaaaaaaaaaataaggaatataaagccagtttgttcgctatcgggaacaggaatgggaacaatgctggtgggtaatcgatgagaagagagctctcagcgaagactagagagtgaagactctggacccgaagaatcgatgcaaaaacatcgagcagacttaatgactgcgactctgattcggaaataatgatgggaatgcatcactcgtttcgccagaatcttttgcctttccttgttttattttttttcaggcttggctgggtactttttttgcagtgctttggaacttcttttgtttacttgttaaatgggagaaggtaggaataattgcaggggtttcttcaagattgaattatcattgagacggacaggggtaagccgtcaattagcaaggcatttagagatgcggaggctgaaaacttaataattccgtaataattcccaagttctgggaagacgtttaattggttgggcagttagtcacgttcttaacgagttaagcacttgaaaaattgtagaaaattttagatatagcagactatagtagactatatatgatatagtaaaataaagtttacaatcaatctttaattagatagttttgatgttttaaaaagcgagaacgaagaaacactagtgtgttaagtttgcagatatctgtttatgtttcttattaaatccaaaactaacaagctttcaggataaaagaactaagaattaatttttaaaaattcataaaatcctatacttggcttgaagttacttagccttccgccattataaatattactacaattttgatttaatccatctgtattctttaagtttgaaaaaacccattgagttgagcaactctacaagcaataaaggaatacaaattttgtaaataattttctactaacctgcagcgcatgccaagaggctcagcaggcagaagagtacgattttggccatctttgcttcgaatgggttggattggtgggagcgcggagcactatctaattgccactggcgacgatcggggaatacgaatcgggttctcagcgttttggggacgcgcgatcgaggtggctccaaagaagaagtgtttggagttcgtagagtttggagagttcagcacttcacgtcgcgttcactgcaagccttcgtcgtcgactgatcgctcaactgatcaggccaatatcacgcagccgcgaatgaagtccgccaagaagtcgggaatggaaatgggaatgaagtccaagaagccgaagaagccaagaacgacacgacgatcagactcgctgcttccagaagaactccagcgattccagttccagtttcctcttccagttgaaaacacacacactcacatacacgaacggcctaaacagacactgatgcagatgcagatgcagatactgatttagagccagcgacttgtgttaatccttggatcccgaaattggtaattggaaattcttgatccgccgagcttctgttctggccaagttagcgctggtaaatgtcggttggtgccgaaagcagttagcttaagaaggaaattgctggctgaaaacgggaaaagaccgtggaaaagaaagaagaaatggccgaatcgtaccgaacagaaccaactatttgcttatttcatggatgtgattggaaattggcctcgctgtgcgagtgtgtgtgtgtgtgtgtatgggtgtccgagtttgtgtgcgagttcttcctgtgtttcgtagtgtgcgtgattgcccaagtcagtgctagacaaagagcgcaataaaccaaaggcacacaaaagcgggctcaaaccgaaatattaatacagagcaagaaattggaaccgcattaaggattaccagaaaattacttcgaactcctgaaaactgcagcatagcttattacagtcctaagcaatacattcgatgatatttttaaatggtattagataccctaagctctctctttgtgggcagcagtcaacgtagtgacgaggtgcacctgtactacacaggatcaaatgacaatctgctgtgtcttccgaccatcaccagtgatacatcaatggaaagatctgttaccaaagaaaatacttttaacaaaggacaaaggttgtaggtgtaaaagaaagctgctttagtttctttcagtgcatactca

SEQ ID NO: 27725 - DNA, 779 bp, DROSOPHILA
cgaaggcttgcagtgaacgcgacgtgaagtgctgaactctccaaactctacgaactccaaacacttcttctttggagccacctcgatcgcgcgtccccaaaacgctgagaacccgattcgtattccccgatcgtcgccagtggcaattagatagtgctccgcgctcccaccaatccaacccattcgaagcaaagatggccaaaatcgtactcttctgcctgctgagcctcttggcatgcgctgcaggtcaacgcattacgacaatccacctggatggagtgcagtacttcatcagccgaatgaatccctactccccggagctcaactacttcctggcctaccagtactgtcgctccctgggcctgcaactggcctcctttgagacgaaggagaaggccgagtcgatgaccacgtatctgaagaatgccggttacggcaactacgatttctggacctccggcaatcgcctgggcacgggcatgttcctatggatgagcactggtctgccgtttaacgccacttttgatttcttcgaaaactcggcggacgccatccaggccggtctgctcgatcccgtcgatcataatagcaacacctcaccccagcgcaccgctcgcgacagcagcagtggcgccgagaagggatgcgtgatcctgaagcagcccacgctcaagtggatgcccgaggactgctcggccgtgaaggacttcatttgtgagcagacccgctgctactactacaactacggcagcatccccgtctcgtcggcgcaggggtaa

SEQ ID NO: 27726 - protein, 194 aa, DROSOPHILA
MAKIVLFCLLSLLACAAGQRITTIHLDGVQYFISRMNPYSPELNYFLAYQYCRSLGLQLASFETKEKAESMTTYLKNAGYGNYDFWTSGNRLGTGMFLWMSTGLPFNATFDFFENSADAIQAGLLDPVDHNSNTSPQRTARDSSSGAEKGCVILKQPTLKWMPEDCSAVKDFICEQTRCYYYNYGSIPVSSAQG

SEQ ID NO: 27727 - DNA, 4512 bp, DROSOPHILA
aggtgctgtccagcagggattgattgtccagccaaacgccacggaatccctggcagggatcatagctgcgcaagtggctcagcagcgaaacgtaacgaatgcagatctccaggggattctcgccgctgggcacagcagctggtggaaggggcactggatccatgagcctggtgagacacaccctcttcccttgggcagtgcacaccagtggctccacatagcgctgcggctggggaagaagttgctgaagctccaatctcctttcgtcgaggtattgctgcagttctggtttctccgcacaggccaaggcgcaggagtgcaggggcgcaaggtctccaccgccgggttcgatgctcaggtagaaccacagatgcactgcctccttgaactccggatactgatccgttggcatgttcgtgacggaatctatcaaaggccgtttgtagcccaccaaaaccttgggcatggccaactcgatacagccttcgaactaggagtatatgaggaatttggtttagttgtgtgaatagctttgcacgataaaatgactcaccgtgcgactggccagtaagctgttgatgggcacccggaattcccccaaccagttgcactgcacccgctggtacacatcggaggcctcgtcgctgtactgctgctcaatcaattcgtcgaacagactgatcttcagatcatcgcgcaaatcgccgaattgactctggatctgcagctgcagctgctcgttccaggtgggattactgccctcggcggtgcgactgcggcacaaacgctgtccatagcttagggtcacaaagggtcgcacgttggagtacatgagagctgaaagggaagatcggttttttatatgggttcactttgaatcatcgtatactttcgattaatcccattagtaacccaaaaagtctatacgagctacaattgtatctattggatacaaactattcaatctatcgaactcaaatctccttgaattagttaaacattactcactctgcgtgacaaacagactggtgctcatatcgccaccagcgctggagcgccgctcattgagattcaggatgtggcgactgcgcactgggactccagtggcccgcaccacgtggagcgaaacgcagaagctcttgaagagatcgggagcggattgatgacccgaccaaccagatggttctctgggcagggaattgcgttgcccttggaaaaccgaacaaaaggcgcgccaaagggctgtccaaccggtgcccgatgaccgatccgaatcctcggccaggaggagcagcggcagaggcgtctgcaaggccttggcccgcctggcactctggctggcaatcacctcgtacagcagctggaggaacttgcgtccgcgatgcttgtgcagatcgatgggattccagtaggtgcccggttccaggagctgcactgttccacggccatccggcaggggttcctcttccgagatttcctgctccagggcgggcacgaagcgcagctgtttggtgtgcaaatttctctgctgatgacgggagtggagtagctggaaacgtcggttatccagaaggacatccaagccgcagaactgaagctgctgttcagcaaatatcagcgatggtagctgactcttctttattcttccactgggcggacggggagtcactagctctttggaggcttgcggcaaagcgggtaagctctgcggcaacagagtctgacgcagtgcatccggtagtctttgtacatcgtccagatgaagggcacttccccatccctccgtggagcggtactcatagtacaagtaaacgtcaccagccaactgggtggatgataaagcctggaaactgagcttctcctgcactgcatcgtccttggagctcaacactagcggagtgcttatctgggccaggcggcgactctttggggtcaaggtggacttctcgtagagctagaaaaagatagttgtagatatagtccagctctgaaacccactgcttaccacccacccatatgttgaggttctctgggagagagcgttccaaaagcactccaatgcattcgttgatggatatctggagatctggctccaggcggtaggtcctgctttggcccacaaattgtccgtccaggaatatctttaggaagtagttacgcgccttgggcagctgatcaccgcctggaatggacaacctggcagttgcttcatccgcatgcagacgaaagacctccacgtagggttcctccgggtccttaaaggtcttgtcgtactccttccttaagctagccataatccgatcgaattgtggtttcctcggaggctttgagtggcccgtcgctgtgcggctgtgtgacttctgatcggtccacaggcgcagtcgggtgtaaaacaactccaggtgctcgcgatacacctcggccagatccgtttcgaagctctctttccacgcgcaataggaggcctccaggtcgggcggatggaccacacggaggccaagctggaaacgtgtacactggaatcgctgctggcggcgcaactccttcagcttcgcccactccttcagcaggcgctggagaagattacgctgggcagcggactctgcgtagtagcgttgcctcagctgacgggtcagctttaattgacgcttcacctctgccgtctgatcctggccagctgaggcgagcagcttgagtgccacctggcgggctatctccagttcctccctcagttttcgacagatcctctgcttcctctgctggctgtacacatcgaagagatcctccagctgttgggccagtcggtgctcctccaagagttgaggatgcaagctgaaccgaagttgtttgaggcacaatttcaggcaacgtctggagggcaggcccttcaactcacttggaggcatgggagggaagaacacgctctgaaatctcctatggcacacactgcgatatagatgtttccccatcaagaaactcgcaggcttctgtccacttagctgaccaatcagatcagagcccaattttccggacttgcttttggactgctcctggtagcggttcagcatacggatctgggagtccttcaactcactcaaatcgctcaaatgcaactgaaagtgcagggtattactcggtcggtaaagtaagctctcatcatagtagtggcgctgcttgaatagctgaccccaggccagaggaggatcgtgcagatcgatatgtataaatgtctgggagggcgaatccgttggttcctcagccagttccccacccgaatcttcgtcactctcctggcaatcttcaacagcgaaatcgttctcctgctgcatctcaccctcaaatccatgaaagaactgcaggctaagtgcctccatgtcgtgttctggaccagagattctgccttccgttgcccttatcaacttttgcacctcctgctcccttttccgataccctctggtggtatgggtcttgcgtttcttctttgcagtcttcctggatagagcggcttccatgttacataggttattacaaacggaaaatgccaggcaaacaatattccgcctgctttgacctttcaactggttgccatgggcaactgacttgaccactgttacacacctgctcaccaccagctatctatcgtctatcgccttgaatgaaacatcaaaaaaacataccccaaacgtattttgttttcgttttctttttgctgtttacatacaaatacatggcaaatctactattaggcatactggaaggaggaggggtgtgcgcaagaaaggtcatttaattagatgttatgttcgcaattgctgattgagttgaagtttacttttgggcttataattcgtatgttcgtatgttgtatgtataggcaaaggttccgcttagagttgtttgcaagcagacgcgtgctactgtattggataatggattagggccctggcatcaaccagggcgtagacgcgtcccggacacgaaatgtgaggcgacaggatcgcttcgaagtaggcaggggacgacagcgttggagtggcgttgagggggtcgtctactccagcagagtgacttcttccttgactaaaaattcaacaatttcttcatccacttcgtcagtttccaggttgtctgtgtccacatctgttgcgtaaggataatatacatatagaaatcggcaaattttaaacaatttgtttcttgagaatacttacgccctcgcagcatgatgcgacgactcttctgctccgcccactcggcaatacgcttgttgcggtactccataaaggtctcgcgcagctgcgagcgcttctcgagcagctccttggaggcacgggtaaggcgcaggcgatccttttgttcgaaggcagcgtagtacttcttcaagttcttcttgatctccttctgcttctcctcgctaagcagggtgggaggacgcgggcgccacaagaactgcacaaagttcttaagaatggtacgcttgatgatgcggccctggaacgtgtacatgttgaa

SEQ ID NO: 27728 - DNA, 2454 bp, DROSOPHILA
atggaagccgctctatccaggaagactgcaaagaagaaacgcaagacccataccaccagagggtatcggaaaagggagcaggaggtgcaaaagttgataagggcaacggaaggcagaatctctggtccagaacacgacatggaggcacttagcctgcagttctttcatggatttgagggtgagatgcagcaggagaacgatttcgctgttgaagattgccaggagagtgacgaagattcgggtggggaactggctgaggaaccaacggattcgccctcccagacatttatacatatcgatctgcacgatcctcctctggcctggggtcagctattcaagcagcgccactactatgatgagagcttactttaccgaccgagtaataccctgcactttcagttgcatttgagcgatttgagtgagttgaaggactcccagatccgtatgctgaaccgctaccaggagcagtccaaaagcaagtccggaaaattgggctctgatctgattggtcagctaagtggacagaagcctgcgagtttcttgatggggaaacatctatatcgcagtgtgtgccataggagatttcagagcgtgttcttccctcccatgcctccaagtgagttgaagggcctgccctccagacgttgcctgaaattgtgcctcaaacaacttcggttcagcttgcatcctcaactcttggaggagcaccgactggcccaacagctggaggatctcttcgatgtgtacagccagcagaggaagcagaggatctgtcgaaaactgagggaggaactggagatagcccgccaggtggcactcaagctgctcgcctcagctggccaggatcagacggcagaggtgaagcgtcaattaaagctgacccgtcagctgaggcaacgctactacgcagagtccgctgcccagcgtaatcttctccagcgcctgctgaaggagtgggcgaagctgaaggagttgcgccgccagcagcgattccagtgtacacgtttccagcttggcctccgtgtggtccatccgcccgacctggaggcctcctattgcgcgtggaaagagagcttcgaaacggatctggccgaggtgtatcgcgagcacctggagttgttttacacccgactgcgcctgtggaccgatcagaagtcacacagccgcacagcgacgggccactcaaagcctccgaggaaaccacaattcgatcggattatggctagcttaaggaaggagtacgacaagacctttaaggacccggaggaaccctacgtggaggtctttcgtctgcatgcggatgaagcaactgccaggttgtccattccaggcggtgatcagctgcccaaggcgcgtaactacttcctaaagatattcctggacggacaatttgtgggccaaagcaggacctaccgcctggagccagatctccagatatccatcaacgaatgcattggagtgcttttggaacgctctctcccagagaacctcaacatatggctctacgagaagtccaccttgaccccaaagagtcgccgcctggcccagataagcactccgctagtgttgagctccaaggacgatgcagtgcaggagaagctcagtttccaggctttatcatccacccagttggctggtgacgtttacttgtactatgagtaccgctccacggagggatggggaagtgcccttcatctggacgatgtacaaagactaccggatgcactgcgtcagactctgttgccgcagagcttacccgctttgccgcaagcctccaaagagctagtgactccccgtccgcccagtggaagaataaagaagagtcagctaccatcgctgatatttgctgaacagcagcttcagttctgcggcttggatgtccttctggataaccgacgtttccagctactccactcccgtcatcagcagagaaatttgcacaccaaacagctgcgcttcgtgcccgccctggagcaggaaatctcggaagaggaacccctgccggatggccgtggaacagtgcagctcctggaaccgggcacctactggaatcccatcgatctgcacaagcatcgcggacgcaagttcctccagctgctgtacgaggtgattgccagccagagtgccaggcgggccaaggccttgcagacgcctctgccgctgctcctcctggccgaggattcggatcggtcatcgggcaccggttggacagccctttggcgcgccttttgttcggttttccaagggcaacgcaattccctgcccagagaaccatctggttggtcgggtcatcaatccgctcccgatctcttcaagagcttctgcgtttcgctccacgtggtgcgggccactggagtcccagtgcgcagtcgccacatcctgaatctcaatgagcggcgctccagcgctggtggcgatatgagcaccagtctgtttgtcacgcagagtgagtaa

SEQ ID NO: 27729 - protein, 817 aa, DROSOPHILA
MEAALSRKTAKKKRKTHTTRGYRKREQEVQKLIRATEGRISGPEHDMEALSLQFFHGFEGEMQQENDFAVEDCQESDEDSGGELAEEPTDSPSQTFIHIDLHDPPLAWGQLFKQRHYYDESLLYRPSNTLHFQLHLSDLSELKDSQIRMLNRYQEQSKSKSGKLGSDLIGQLSGQKPASFLMGKHLYRSVCHRRFQSVFFPPMPPSELKGLPSRRCLKLCLKQLRFSLHPQLLEEHRLAQQLEDLFDVYSQQRKQRICRKLREELEIARQVALKLLASAGQDQTAEVKRQLKLTRQLRQRYYAESAAQRNLLQRLLKEWAKLKELRRQQRFQCTRFQLGLRVVHPPDLEASYCAWKESFETDLAEVYREHLELFYTRLRLWTDQKSHSRTATGHSKPPRKPQFDRIMASLRKEYDKTFKDPEEPYVEVFRLHADEATARLSIPGGDQLPKARNYFLKIFLDGQFVGQSRTYRLEPDLQISINECIGVLLERSLPENLNIWLYEKSTLTPKSRRLAQISTPLVLSSKDDAVQEKLSFQALSSTQLAGDVYLYYEYRSTEGWGSALHLDDVQRLPDALRQTLLPQSLPALPQASKELVTPRPPSGRIKKSQLPSLIFAEQQLQFCGLDVLLDNRRFQLLHSRHQQRNLHTKQLRFVPALEQEISEEEPLPDGRGTVQLLEPGTYWNPIDLHKHRGRKFLQLLYEVIASQSARRAKALQTPLPLLLLAEDSDRSSGTGWTALWRAFCSVFQGQRNSLPREPSGWSGHQSAPDLFKSFCVSLHVVRATGVPVRSRHILNLNERRSSAGGDMSTSLFVTQSE

SEQ ID NO: 27730 - DNA, 3581 bp, DROSOPHILA
tgtgtgttcagttcgtagagggtgtacagccatttcacatagcgcttgaatttcgcgtaatcctcggccagctttgggaacatgctttgcgacatgggcttctgcaatcgacgtcaggcgatgtggacggtgtcagggtgcgcggcggactagcctagtgccaacttcgacacctggtacctgtgtccccgtcaccgccttatcactgcatacaactacacgcgtttttattctctaaccacacatatatttatgtatatatatatatgtttttatacatttttcgggctgtaaaccaaattaaatagatttcatttcgggcctctttcggccgtcagttgggcgttgcgataaaaatcagtccatgcggctacgcttgcacttgtaaactgaaccgagatagcgaatccctaatggcagggggattgcctctggcatttctgagtgtgccgacttttgggcttgattgtgactcactccaccaatggcaccatggagagcagaaacagccacacggacagcacgtcgttggcgtgggcgtgcaaatggacagccacacagaactccaccgaagcgtcgtggttgtagtggatgcagctggtccggatgcgctccgatatcgccgccagattggtgtacgcaaagtttagggtgaagccgtagagctgcggacaaacggggttagtgatcgattgcgatagtgattgatgagcggggcaggatagggcggagcaggggtggtggtctgttgacgaccaactgataaatgcaccaggtgaaccgctgtcgttataaatatcaaactaattgctgacttcacggatccacataaatatatgatttttagcaggaaagccagtttgctaacattttaatcgcgtttaagttatatctgcagtttcatatctataggaaagcggttctcttgataattatttttaaagttccagcattcaatttcttgccaagacaaattcgctttaatatttccaattcatatctatttcattcgaaagatagcaaggcttaccctgtagttgggaaactctcgttccagttgctcgctaaatatgggctcatcatatcgtcctctggagaaggtggataggtcttccatgtcgcacaggattttgtgtaggcgcggctgaaaggctctgtggactgaagccattagctattgctaatctatagatgattggggtgcatatacccaccgattccagatggttttcctggttgtgcgccacgcactgatcttcttcatgatcttgcgctcaatgtgcttctgcagctggctgagttcgtagctcctcttgtatgcgtagtccagcttctggactccactttggggggctggaactcgccgcctgaagagtggaaaccagcaggcgccatcctgaagattaaagtgcgtcatgctgacacgggtttccgtctgaatgttgaaataaatctgggaaataaataagggattaggataaatgtaaggagacagcacagcgtcacaacttacattctgcttccccaccacacaatatatgcgtctaagtggacagtgcacatcctgcagctggtatctctttccagtggcgggggagacgagaaagagctcagcagtttccggctggcggaagagcacaaacgagcactcgccatggggacaggacactcccagaattagccagcactccaagcccagggacagcatgtagttacataggaggacacccagatccttaaccgagcaccaggtgctgtccagcagggattgattgtccagccaaacgccacggaatccctggcagggatcatagctgcgcaagtggctcagcagcgaaacgtaacgaatgcagatctccaggggattctcgccgctgggcacagcagctggtggaaggggcactggatccatgagcctggtgagacacaccctcttcccttgggcagtgcacaccagtggctccacatagcgctgcggctggggaagaagttgctgaagctccaatctcctttcgtcgaggtattgctgcagttctggtttctccgcacaggccaaggcgcaggagtgcaggggcgcaaggtctccaccgccgggttcgatgctcaggtagaaccacagatgcactgcctccttgaactccggatactgatccgttggcatgttcgtgacggaatctatcaaaggccgtttgtagcccaccaaaaccttgggcatggccaactcgatacagccttcgaactaggagtatatgaggaatttggtttagttgtgtgaatagctttgcacgataaaatgactcaccgtgcgactggccagtaagctgttgatgggcacccggaattcccccaaccagttgcactgcacccgctggtacacatcggaggcctcgtcgctgtactgctgctcaatcaattcgtcgaacagactgatcttcagatcatcgcgcaaatcgccgaattgactctggatctgcagctgcagctgctcgttccaggtgggattactgccctcggcggtgcgactgcggcacaaacgctgtccatagcttagggtcacaaagggtcgcacgttggagtacatgagagctgaaagggaagatcggttttttatatgggttcactttgaatcatcgtatactttcgattaatcccattagtaacccaaaaagtctatacgagctacaattgtatctattggatacaaactattcaatctatcgaactcaaatctccttgaattagttaaacattactcactctgcgtgacaaacagactggtgctcatatcgccaccagcgctggagcgccgctcattgagattcaggatgtggcgactgcgcactgggactccagtggcccgcaccacgtggagcgaaacgcagaagctcttgaagagatcgggagcggattgatgacccgaccaaccagatggttctctgggcagggaattgcgttgcccttggaaaaccgaacaaaaggcgcgccaaagggctgtccaaccggtgcccgatgaccgatccgaatcctcggccaggaggagcagcggcagaggcgtctgcaaggccttggcccgcctggcactctggctggcaatcacctcgtacagcagctggaggaacttgcgtccgcgatgcttgtgcagatcgatgggattccagtaggtgcccggttccaggagctgcactgttccacggccatccggcaggggttcctcttccgagatttcctgctccagggcgggcacgaagcgcagctgtttggtgtgcaaatttctctgctgatgacgggagtggagtagctggaaacgtcggttatccagaaggacatccaagccgcagaactgaagctgctgttcagcaaatatcagcgatggtagctgactcttctttattcttccactgggcggacggggagtcactagctctttggaggcttgcggcaaagcgggtaagctctgcggcaacagagtctgacgcagtgcatccggtagtctttgtacatcgtccagatgaagggcacttccccatccctccgtggagcggtactcatagtacaagtaaacgtcaccagccaactgggtg

SEQ ID NO: 27731 - DNA, 1335 bp, DROSOPHILA
atgtactccaacgtgcgaccctttgtgaccctaagctatggacagcgtttgtgccgcagtcgcaccgccgagggcagtaatcccacctggaacgagcagctgcagctgcagatccagagtcaattcggcgatttgcgcgatgatctgaagatcagtctgttcgacgaattgattgagcagcagtacagcgacgaggcctccgatgtgtaccagcgggtgcagtgcaactggttgggggaattccgggtgcccatcaacagcttactggccagtcgcacgttcgaaggctgtatcgagttggccatgcccaaggttttggtgggctacaaacggcctttgatagattccgtcacgaacatgccaacggatcagtatccggagttcaaggaggcagtgcatctgtggttctacctgagcatcgaacccggcggtggagaccttgcgcccctgcactcctgcgccttggcctgtgcggagaaaccagaactgcagcaatacctcgacgaaaggagattggagcttcagcaacttcttccccagccgcagcgctatgtggagccactggtgtgcactgcccaagggaagagggtgtgtctcaccaggctcatggatccagtgccccttccaccagctgctgtgcccagcggcgagaatcccctggagatctgcattcgttacgtttcgctgctgagccacttgcgcagctatgatccctgccagggattccgtggcgtttggctggacaatcaatccctgctggacagcacctggtgctcggttaaggatctgggtgtcctcctatgtaactacatgctgtccctgggcttggagtgctggctaattctgggagtgtcctgtccccatggcgagtgctcgtttgtgctcttccgccagccggaaactgctgagctctttctcgtctcccccgccactggaaagagataccagctgcaggatgtgcactgtccacttagacgcatatattgtgtggtggggaagcagaatatttatttcaacattcagacggaaacccgtgtcagcatgacgcactttaatcttcaggatggcgcctgctggtttccactcttcaggcggcgagttccagccccccaaagtggagtccagaagctggactacgcatacaagaggagctacgaactcagccagctgcagaagcacattgagcgcaagatcatgaagaagatcagtgcgtggcgcacaaccaggaaaaccatctggaatcgaggacgatatgatgagcccatatttagcgagcaactggaacgagagtttcccaactacagggtaagccttgctatctttcgaatgaaatag

SEQ ID NO: 27732 - protein, 444 aa, DROSOPHILA
MYSNVRPFVTLSYGQRLCRSRTAEGSNPTWNEQLQLQIQSQFGDLRDDLKISLFDELIEQQYSDEASDVYQRVQCNWLGEFRVPINSLLASRTFEGCIELAMPKVLVGYKRPLIDSVTNMPTDQYPEFKEAVHLWFYLSIEPGGGDLAPLHSCALACAEKPELQQYLDERRLELQQLLPQPQRYVEPLVCTAQGKRVCLTRLMDPVPLPPAAVPSGENPLEICIRYVSLLSHLRSYDPCQGFRGVWLDNQSLLDSTWCSVKDLGVLLCNYMLSLGLECWLILGVSCPHGECSFVLFRQPETAELFLVSPATGKRYQLQDVHCPLRRIYCVVGKQNIYFNIQTETRVSMTHFNLQDGACWFPLFRRRVPAPQSGVQKLDYAYKRSYELSQLQKHIERKIMKKISAWRTTRKTIWNRGRYDEPIFSEQLEREFPNYRVSLAIFRMK

SEQ ID NO: 27733 - DNA, 5383 bp, DROSOPHILA
gcacgaaagaagtttttgactattatttaccccgcttctgggtgacacgagcaaagacaattattgaatcgatttctgggtcagccaagacagttgttatcagagacctttggttgaaaagttttgtattatttaaaaacataaggatttatttacatacctaatcttttatatacatgtacgtgaaattaattcgttggactcttgatgcatgtatcacagttcaatattctcgcttcagtacattttacatgcaccattactcacagcaccggccaaaatgatttgccggcgagtcgcatattgtataccctagacaagcaagaaaaaacgtcttgctatgagcagcataatacggcattcgcaagacgctaaacgaaactgatttaaacggtatcaaaaagtggcgccaatggtgaggccgactcacaattaaatttgtattcatagactgacgctttcaacagataaagcggttcggttgccaaaacatgagacccgcaatcagtcaaagtaaaaagaagataaagagtgaataataacgtaaagattgcgcatccgtactgtccgcccgaccgccttaaatctagtgccgatccaaacttccgctatgggttcacccactcgctgataacgcacgaatttctcagaaagttctgtagtgttgaagctgcatcggaataattgcaaatcgactgcccagtttcggtttgtattgcctttactcagcagctcgccatgccacttgctcttcccccattccctgactgggtcggcatatacccggaccgtcagatctccgggccgtcgttgaagtcagacgactagtcattcggtcagaactcgagcaggctgtcagtcgtgcatgtactgtgtactgctttccatcaattgaaaatctgagtttgttttcgggctgcgctcagagactacgatcgcgcatttcgtagggtaaatgaaattaatttaaaaagttcttcggtcagttcggaatttgtttccagaacgaagggagggcgctttccgtggtcccagatacgcgtaagtaatttttagaaatgcaaattaccgcttttaattaacttgaattgaggtagcaagcaaacgacacatgagttgatgatgagtttatcaaactggtttaagccaaaaaaacgtactgccttctcttgtactgttaaccaattaatttctagtgtatagtgcaaataaaactgcgccttaaaacgaggattccagatttcgaacgagcaccttaaaaggttatctttaaaagcaaagcattatgtgaacggtaaacagatcaattcttataagcgattttagtgcgaagtgaaattattgaatttcttatcaaaaaatcaccattttccttctcaaggagcaatgacatcgattcaaaacaacaacgaagtctagaaatattaaaatggaaactgccagcagcgtaaaaggcagtacaacctcccaaatcagctcccttcaatatagcagcgacattaacgccgatagcctcgagcccgatcaatctgaggactttcaaacagtcctcggcctcaagtatttgccatcctggccagcggtaaatttgcagttttcggaactatgttatgtggttcccgaccagaccaatggtgagtgtatcaaatcagcttatgtctattacggttgagtaattgataatgaatatattcgtgattgataatggggtattaagaatggtaattgcacattttcgaagtaattactgcttccacagctcgcttgatttctaatgctgaacatgcacatattaaatagcaatttccgtctaattccacattaacgacaataaattaatgccgacatcttcccttacaatgaaacattaaaattattctttttaatatggtcatcacaccccacagcttcaaaaacaaagacgattttgcggagagtcaatggaatgtttcactctcacgaacttactgcgattatagggccttcaggcgctggtaaaaccacactgctaaacctgctggcgggctttgggtaagatataacacaaacgacccccttataatactcctttaatatttaccgatagcgccgtgtgcgaatccggcgagattttggtaaacaacagtccgcgagatatgcgagtctttcgcaaaatgtctcgatatataatgcaggtaaaagtggattactgaattgcgttcccataaatattggtgtaattcatagactgatgtcctggactcacagtttaccgtactagaaatgatgattttggcggcaaacttgaagttgggaaaagaactaaatttaaaacaaaagctagaagtggtaagattgattttaaatcatgcactttgtcgtgtatttatcttaacatttgagcagattgacgaaattttgggaatgttgcgcctaaaagacaccctaaacaccatggctcaaaagctatctgggggtgagcgaaagcgtttatgcattgcccttgagctggtcaacaacccacctgtcatctttctagatgaacctacaacgtgagtataagataaatattgaagtcgaagaactaatgttaccaccaactcaacagtggtttagacgatttatcgagttcacaatgcattgccctactcaaagttttggccgccggggggcgcactgtgatctgctccatccatacgccatctgccaagatcttcgagatgctcgatgcagtctacgttctagccgaaggccagtgcgtctaccaaggaaaggggtccaacattgtacctttcttgaagaactttgggctttgttgtccaataacctacaacccggctgacttcattatcgaagttgcttgccttgagtatggcgggtcctatcacgagccaatggtagaagccgtgggcaacggcaaagttgcgcgatggagtcctccagcagtggaaggtgaaacaacaacaaccaaaaccgacaccacatcgggggcatcgtcgttttacgaaagggatcagtttgacgaagagattagcccaaaacttttggaggccaaatgtagctggtggctacagtacaagctattgcttgtgcgtatgctaatccaaatgtggagagataaggtgagtgcacttagaaaacgacgtagaaaggcaatgtaattttattttttccgtagtcgtacatcaagcttaagttctacatgaacatcgttcttgctttactggtgggttcgctctactttggtatgggaacctcggcctctaaagcgctttttaacttcggtttcatgttcaccattgtgatagcatacctctaccttcctatgatgcctgtgctcttatattgtaagtactatattttaacctcaagcagtaattcttaataataaatacctacatttaagttcccacggaaatcaatctgttaaaaagggagtacaacaaccagtggtaccgtctgagctcctactacgcagcaatggttacctcaaagctaccatctatgtttattttggccgttatttatctatccattgtgtacttaatgtccagccaaccacttgaatggttccgctttgccatgctatttacaatagctttcgtaacggccctaacttccgacagttttggcttgttgatctccagtagactgagcttagtggtaagcgatttggcgcacatttatttttaatatatcctgattagttcacttatactttagaatgcaatgttcatggggccagttctcgccgtgccgctgatcctgctttccatttacggcattgggtatggcggaggaacatacatatcccctcttatgaggtttctcatgcatcttagctaccttcgccatagtatggaaggcctagtcgcatccttgtacgactacggacgcgccgacacaatttgcgaagacacggaaatcttttgctcatttaaaaagtcgaaagttttgttagcctttttaggattcgaaaacatgcactatttgtggtctctatcttgcttgatgagtttttatttgctgttcaccgtagcagcatactttatgattagactgcgactgaaacactccgaggtcagccccatttttgcatatgtcatacagctgttaacgaaatattttaactttacttcgtacaattactaacattaacaacatgggcggtttgacctcggtgctagaaaaattattttaagcggtatttcaggggacagtcttaacctcccatattatttatgggcttcaataatattaataaactatcaaagtgatattggattctgaataaaagtttatgatcaagaatacaaatataatcaagggaacaataaattactataattcgatcatattgttaacaaggcagaagaaacactacgaataaattattaagtacgcataaaattgttttcaccaaatatgtaaaaaatattagtgggtttacttttttatgcgatggcgtaagtttatatgtatatcatggaaatattaaatataaacaagagagaatactatagtcgagttccccgaatatcagataccccttactcagctagtgtaaatgcggacgcgaaatttcataatttttctgggtgtggctgttttgggcggttttagggagttgcaaaaagttttttagaaaatcgatctatcgatttttacaagactaatcaaaaatgaaaaaatttcaacacattttttaaaattgtgtaaaatttttgagtgggcgtggtaacaaaggtcaacaaatatctgtctctagaatctgtgtgctgaatctcaacgttctagcttttatagttcctcgacgttcaaacggacatgtctagatcgactcggttattgatcctgatcaagaatatgtatactttatacagtcggaaacgtttccttctgcctcttacatacttttcaacgaatgtagcacacccttttactctacgagtcacgggtataaaaatatatagatgtagatatgcttcaaattgcataagagttagaatcaagtcttgcccaagattagaatttaggattgagttaaagatctgcgccgttcgttaccaaactctatctgcctttagactaattttaagtcagaacggcaaagtatgacttcgcctgttcccttgattcactttaaagtattcaaattatttggtagctctatcaattgtgatatgagccgtcacaataaaaaccgacaaagttaattatggaaattatttgaacaactgccgtcgctgtggattggcgcacagttgtctatttaagaggcaaggaaactggactgccgtgaatacagttgatcgataggagccaaagcagtatgttttacgcattcatagcacttgttttggccatgctccacctgtcattcgcagtacaggtgcaaacggag

SEQ ID NO: 27734 - DNA, 2325 bp, DROSOPHILA
ccagaacgaagggagggcgctttccgtggtcccagatacgcgagcaatgacatcgattcaaaacaacaacgaagtctagaaatattaaaatggaaactgccagcagcgtaaaaggcagtacaacctcccaaatcagctcccttcaatatagcagcgacattaacgccgatagcctcgagcccgatcaatctgaggactttcaaacagtcctcggcctcaagtatttgccatcctggccagcggtaaatttgcagttttcggaactatgttatgtggttcccgaccagaccaatgcttcaaaaacaaagacgattttgcggagagtcaatggaatgtttcactctcacgaacttactgcgattatagggccttcaggcgctggtaaaaccacactgctaaacctgctggcgggctttggcgccgtgtgcgaatccggcgagattttggtaaacaacagtccgcgagatatgcgagtctttcgcaaaatgtctcgatatataatgcaggtaaaagtggattactgaattgcgttcccataaatattggtgtaattcatagactgatgtcctggactcacagtttaccgtactagaaatgatgattttggcggcaaacttgaagttgggaaaagaactaaatttaaaacaaaagctagaagtgattgacgaaattttgggaatgttgcgcctaaaagacaccctaaacaccatggctcaaaagctatctgggggtgagcgaaagcgtttatgcattgcccttgagctggtcaacaacccacctgtcatctttctagatgaacctacaactggtttagacgatttatcgagttcacaatgcattgccctactcaaagttttggccgccggggggcgcactgtgatctgctccatccatacgccatctgccaagatcttcgagatgctcgatgcagtctacgttctagccgaaggccagtgcgtctaccaaggaaaggggtccaacattgtacctttcttgaagaactttgggctttgttgtccaataacctacaacccggctgacttcattatcgaagttgcttgccttgagtatggcgggtcctatcacgagccaatggtagaagccgtgggcaacggcaaagttgcgcgatggagtcctccagcagtggaaggtgaaacaacaacaaccaaaaccgacaccacatcgggggcatcgtcgttttacgaaagggatcagtttgacgaagagattagcccaaaacttttggaggccaaatgtagctggtggctacagtacaagctattgcttgtgcgtatgctaatccaaatgtggagagataagtcgtacatcaagcttaagttctacatgaacatcgttcttgctttactggtgggttcgctctactttgttcccacggaaatcaatctgttaaaaagggagtacaacaaccagtggtaccgtctgagctcctactacgcagcaatggttacctcaaagctaccatctatgtttattttggccgttatttatctatccattgtgtacttaatgtccagccaaccacttgaatggttccgctttgccatgctatttacaatagctttcgtaacggccctaacttccgacagttttggcttgttgatctccagtagactgagcttagtgaatgcaatgttcatggggccagttctcgccgtgccgctgatcctgctttccatttacggcattgggtatggcggaggaacatacatatcccctcttatgaggtttctcatgcatcttagctaccttcgccatagtatggaaggcctagtcgcatccttgtacgactacggacgcgccgacacaatttgcgaagacacggaaatcttttgctcatttaaaaagtcgaaagttttgttagcctttttaggattcgaaaacatgcactatttgtggtctctatcttgcttgatgagtttttatttgctgttcaccgtagcagcatactttatgattagactgcgactgaaacactccgaggtcagccccatttttgcatatgtcatacagctgttaacgaaatattttaactttacttcgtacaattactaacattaacaacatgggcggtttgacctcggtgctagaaaaattattttaagcggtatttcaggggacagtcttaacctcccatattatttatgggcttcaataatattaataaactatcaaagtgatattggattctgaataaaagtttatgatcaagaatacaaatataatcaagggaacaataaattactataattcgatcatattgttaacaaggcagaagaaacactacgaataaattattaagtacgc

SEQ ID NO: 27735 - protein, 144 aa, DROSOPHILA
METASSVKGSTTSQISSLQYSSDINADSLEPDQSEDFQTVLGLKYLPSWPAVNLQFSELCYVVPDQTNASKTKTILRRVNGMFHSHELTAIIGPSGAGKTTLLNLLAGFGAVCESGEILVNNSPRDMRVFRKMSRYIMQVKVDY

SEQ ID NO: 27736 - DNA, 5664 bp, DROSOPHILA
tcggtcgtcggtgcaacaagacgacgcttcttcgctgctgtggcgtggttgccgccatgagaaagagtgaaaaaagccagcgacagcagcaactacaaaaagaaagtggagtaagtgccccctatcgctctaccgatacacccgctgcagcgccagcgtcagagccagtgagtggtgcatttacgcagctgcaaatagtagtgtacgccggctgtatctaacgcgttcgttgaactcgaagtcgaaaacaactgcgacagtgcttgcagcactgcacacaagcacgaaagaagtttttgactattatttaccccgcttctgggtgacacgagcaaagacaattattgaatcgatttctgggtcagccaagacagttgttatcagagacctttggttgaaaagttttgtattatttaaaaacataaggatttatttacatacctaatcttttatatacatgtacgtgaaattaattcgttggactcttgatgcatgtatcacagttcaatattctcgcttcagtacattttacatgcaccattactcacagcaccggccaaaatgatttgccggcgagtcgcatattgtataccctagacaagcaagaaaaaacgtcttgctatgagcagcataatacggcattcgcaagacgctaaacgaaactgatttaaacggtatcaaaaagtggcgccaatggtgaggccgactcacaattaaatttgtattcatagactgacgctttcaacagataaagcggttcggttgccaaaacatgagacccgcaatcagtcaaagtaaaaagaagataaagagtgaataataacgtaaagattgcgcatccgtactgtccgcccgaccgccttaaatctagtgccgatccaaacttccgctatgggttcacccactcgctgataacgcacgaatttctcagaaagttctgtagtgttgaagctgcatcggaataattgcaaatcgactgcccagtttcggtttgtattgcctttactcagcagctcgccatgccacttgctcttcccccattccctgactgggtcggcatatacccggaccgtcagatctccgggccgtcgttgaagtcagacgactagtcattcggtcagaactcgagcaggctgtcagtcgtgcatgtactgtgtactgctttccatcaattgaaaatctgagtttgttttcgggctgcgctcagagactacgatcgcgcatttcgtagggtaaatgaaattaatttaaaaagttcttcggtcagttcggaatttgtttccagaacgaagggagggcgctttccgtggtcccagatacgcgtaagtaatttttagaaatgcaaattaccgcttttaattaacttgaattgaggtagcaagcaaacgacacatgagttgatgatgagtttatcaaactggtttaagccaaaaaaacgtactgccttctcttgtactgttaaccaattaatttctagtgtatagtgcaaataaaactgcgccttaaaacgaggattccagatttcgaacgagcaccttaaaaggttatctttaaaagcaaagcattatgtgaacggtaaacagatcaattcttataagcgattttagtgcgaagtgaaattattgaatttcttatcaaaaaatcaccattttccttctcaaggagcaatgacatcgattcaaaacaacaacgaagtctagaaatattaaaatggaaactgccagcagcgtaaaaggcagtacaacctcccaaatcagctcccttcaatatagcagcgacattaacgccgatagcctcgagcccgatcaatctgaggactttcaaacagtcctcggcctcaagtatttgccatcctggccagcggtaaatttgcagttttcggaactatgttatgtggttcccgaccagaccaatggtgagtgtatcaaatcagcttatgtctattacggttgagtaattgataatgaatatattcgtgattgataatggggtattaagaatggtaattgcacattttcgaagtaattactgcttccacagctcgcttgatttctaatgctgaacatgcacatattaaatagcaatttccgtctaattccacattaacgacaataaattaatgccgacatcttcccttacaatgaaacattaaaattattctttttaatatggtcatcacaccccacagcttcaaaaacaaagacgattttgcggagagtcaatggaatgtttcactctcacgaacttactgcgattatagggccttcaggcgctggtaaaaccacactgctaaacctgctggcgggctttgggtaagatataacacaaacgacccccttataatactcctttaatatttaccgatagcgccgtgtgcgaatccggcgagattttggtaaacaacagtccgcgagatatgcgagtctttcgcaaaatgtctcgatatataatgcaggtaaaagtggattactgaattgcgttcccataaatattggtgtaattcatagactgatgtcctggactcacagtttaccgtactagaaatgatgattttggcggcaaacttgaagttgggaaaagaactaaatttaaaacaaaagctagaagtggtaagattgattttaaatcatgcactttgtcgtgtatttatcttaacatttgagcagattgacgaaattttgggaatgttgcgcctaaaagacaccctaaacaccatggctcaaaagctatctgggggtgagcgaaagcgtttatgcattgcccttgagctggtcaacaacccacctgtcatctttctagatgaacctacaacgtgagtataagataaatattgaagtcgaagaactaatgttaccaccaactcaacagtggtttagacgatttatcgagttcacaatgcattgccctactcaaagttttggccgccggggggcgcactgtgatctgctccatccatacgccatctgccaagatcttcgagatgctcgatgcagtctacgttctagccgaaggccagtgcgtctaccaaggaaaggggtccaacattgtacctttcttgaagaactttgggctttgttgtccaataacctacaacccggctgacttcattatcgaagttgcttgccttgagtatggcgggtcctatcacgagccaatggtagaagccgtgggcaacggcaaagttgcgcgatggagtcctccagcagtggaaggtgaaacaacaacaaccaaaaccgacaccacatcgggggcatcgtcgttttacgaaagggatcagtttgacgaagagattagcccaaaacttttggaggccaaatgtagctggtggctacagtacaagctattgcttgtgcgtatgctaatccaaatgtggagagataaggtgagtgcacttagaaaacgacgtagaaaggcaatgtaattttattttttccgtagtcgtacatcaagcttaagttctacatgaacatcgttcttgctttactggtgggttcgctctactttggtatgggaacctcggcctctaaagcgctttttaacttcggtttcatgttcaccattgtgatagcatacctctaccttcctatgatgcctgtgctcttatattgtaagtactatattttaacctcaagcagtaattcttaataataaatacctacatttaagttcccacggaaatcaatctgttaaaaagggagtacaacaaccagtggtaccgtctgagctcctactacgcagcaatggttacctcaaagctaccatctatgtttattttggccgttatttatctatccattgtgtacttaatgtccagccaaccacttgaatggttccgctttgccatgctatttacaatagctttcgtaacggccctaacttccgacagttttggcttgttgatctccagtagactgagcttagtggtaagcgatttggcgcacatttatttttaatatatcctgattagttcacttatactttagaatgcaatgttcatggggccagttctcgccgtgccgctgatcctgctttccatttacggcattgggtatggcggaggaacatacatatcccctcttatgaggtttctcatgcatcttagctaccttcgccatagtatggaaggcctagtcgcatccttgtacgactacggacgcgccgacacaatttgcgaagacacggaaatcttttgctcatttaaaaagtcgaaagttttgttagcctttttaggattcgaaaacatgcactatttgtggtctctatcttgcttgatgagtttttatttgctgttcaccgtagcagcatactttatgattagactgcgactgaaacactccgaggtcagccccatttttgcatatgtcatacagctgttaacgaaatattttaactttacttcgtacaattactaacattaacaacatgggcggtttgacctcggtgctagaaaaattattttaagcggtatttcaggggacagtcttaacctcccatattatttatgggcttcaataatattaataaactatcaaagtgatattggattctgaataaaagtttatgatcaagaatacaaatataatcaagggaacaataaattactataattcgatcatattgttaacaaggcagaagaaacactacgaataaattattaagtacgcataaaattgttttcaccaaatatgtaaaaaatattagtgggtttacttttttatgcgatggcgtaagtttatatgtatatcatggaaatattaaatataaacaagagagaatactatagtcgagttccccgaatatcagataccccttactcagctagtgtaaatgcggacgcgaaatttcataatttttctgggtgtggctgttttgggcggttttagggagttgcaaaaagttttttagaaaatcgatctatcgatttttacaagactaatcaaaaatgaaaaaatttcaacacattttttaaaattgtgtaaaatttttgagtgggcgtggtaacaaaggtcaacaaatatctgtctctagaatctgtgtgctgaatctcaacgttctagcttttatagttcctcgacgttcaaacggacatgtctagatcgactcggttattgatcctgatcaagaatatgtatactttatacagtcggaaacgtttccttctgcctcttacatacttttcaacgaatgtagcacacccttttactctacgagtcacgggtataaaaatatatagatgtagatatgcttcaaattgcataagagttagaatcaagtcttgcccaagattagaatttaggattgagttaaagatctgcgccgttcgttaccaaactctatctgcctttagactaattttaagtcagaacggcaaagtatgacttcgcctgttcccttgattcactttaaagtattcaaattatttggtagctctatcaattgtgatatgagccgtcacaataaaaaccgacaaagttaattatggaaattatttgaacaactgccgtcgctgtggattggcgcacagttgtctatttaagaggcaaggaaactggactgccgtgaatacagttgatcgataggagccaaagcagtatgttttacgcattcatagcacttgttttggccatgctccacctgtcattcgcagtacaggtgcaaacggag

SEQ ID NO: 27737 - DNA, 2894 bp, DROSOPHILA
ctttactcagcagctcgccatgccacttgctcttcccccattccctgactgggtcggcatatacccggaccgtcagatctccgggccgtcgttgaagtcagacgactagtcattcggtcagaactcgagcaggctgtcagtcgtgcatgtactgtgtactgctttccatcaattgaaaatctgagtttgttttcgggctgcgctcagagactacgatcgcgcatttcgtagggtaaatgaaattaatttaaaaagttcttcggtcagttcggaatttgtttccagaacgaagggagggcgctttccgtggtcccagatacgcgtaagtaatttttagaaatgcaaattaccgcttttaattaacttgaattgaggtagcaagcaaacgacacatgagttgatgatgagtttatcaaactggtttaagccaaaaaaacgtactgccttctcttgtactgttaaccaattaatttctagtgtatagtgcaaataaaactgcgccttaaaacgaggattccagatttcgaacgagcaccttaaaaggttatctttaaaagcaaagcattatgtgaacggtaaacagatcaattcttataagcgattttagtgcgaagtgaaattattgaatttcttatcaaaaaatcaccattttccttctcaaggagcaatgacatcgattcaaaacaacaacgaagtctagaaatattaaaatggaaactgccagcagcgtaaaaggcagtacaacctcccaaatcagctcccttcaatatagcagcgacattaacgccgatagcctcgagcccgatcaatctgaggactttcaaacagtcctcggcctcaagtatttgccatcctggccagcggtaaatttgcagttttcggaactatgttatgtggttcccgaccagaccaatgcttcaaaaacaaagacgattttgcggagagtcaatggaatgtttcactctcacgaacttactgcgattatagggccttcaggcgctggtaaaaccacactgctaaacctgctggcgggctttggcgccgtgtgcgaatccggcgagattttggtaaacaacagtccgcgagatatgcgagtctttcgcaaaatgtctcgatatataatgcagactgatgtcctggactcacagtttaccgtactagaaatgatgattttggcggcaaacttgaagttgggaaaagaactaaatttaaaacaaaagctagaagtgattgacgaaattttgggaatgttgcgcctaaaagacaccctaaacaccatggctcaaaagctatctgggggtgagcgaaagcgtttatgcattgcccttgagctggtcaacaacccacctgtcatctttctagatgaacctacaactggtttagacgatttatcgagttcacaatgcattgccctactcaaagttttggccgccggggggcgcactgtgatctgctccatccatacgccatctgccaagatcttcgagatgctcgatgcagtctacgttctagccgaaggccagtgcgtctaccaaggaaaggggtccaacattgtacctttcttgaagaactttgggctttgttgtccaataacctacaacccggctgacttcattatcgaagttgcttgccttgagtatggcgggtcctatcacgagccaatggtagaagccgtgggcaacggcaaagttgcgcgatggagtcctccagcagtggaaggtgaaacaacaacaaccaaaaccgacaccacatcgggggcatcgtcgttttacgaaagggatcagtttgacgaagagattagcccaaaacttttggaggccaaatgtagctggtggctacagtacaagctattgcttgtgcgtatgctaatccaaatgtggagagataagtcgtacatcaagcttaagttctacatgaacatcgttcttgctttactggtgggttcgctctactttgttcccacggaaatcaatctgttaaaaagggagtacaacaaccagtggtaccgtctgagctcctactacgcagcaatggttacctcaaagctaccatctatgtttattttggccgttatttatctatccattgtgtacttaatgtccagccaaccacttgaatggttccgctttgccatgctatttacaatagctttcgtaacggccctaacttccgacagttttggcttgttgatctccagtagactgagcttagtgaatgcaatgttcatggggccagttctcgccgtgccgctgatcctgctttccatttacggcattgggtatggcggaggaacatacatatcccctcttatgaggtttctcatgcatcttagctaccttcgccatagtatggaaggcctagtcgcatccttgtacgactacggacgcgccgacacaatttgcgaagacacggaaatcttttgctcatttaaaaagtcgaaagttttgttagcctttttaggattcgaaaacatgcactatttgtggtctctatcttgcttgatgagtttttatttgctgttcaccgtagcagcatactttatgattagactgcgactgaaacactccgaggtcagccccatttttgcatatgtcatacagctgttaacgaaatattttaactttacttcgtacaattactaacattaacaacatgggcggtttgacctcggtgctagaaaaattattttaagcggtatttcaggggacagtcttaacctcccatattatttatgggcttcaataatattaataaactatcaaagtgatattggattctgaataaaagtttatgatcaagaatacaaatataatcaagggaacaataaattactataattcgatcatattgttaacaaggcagaagaaacactacgaataaattattaagtacgc

SEQ ID NO: 27738 - protein, 643 aa, DROSOPHILA; identical to SEQ ID NO: 9534

SEQ ID NO: 27739 - DNA, 8881 bp, DROSOPHILA; identical to SEQ ID NO: 26686

SEQ ID NO: 27740 - DNA, 2739 bp, DROSOPHILA
gttcggatcggagcgtaatattggataggcggagtgtttagacaagggcggccatctttctgaagtgaggaaaactgtagtccaagtagtccagtcattttgacaaatcgccgttgcaacaccttgtttaaataatttcctcgcttaaacacaaaccctacattacacatcccataaacactcccaaaaacagcaaaaaaaaacccatcaaaattatggtcagcgtaaaggtcaacggaaatccgcagaatcgtttagtgaataacgcaaaggtcaacggcaacatggctttccgtggtaaccagaaccgcaaccgcaattttggaggtggcaacaacaactatggtggacccatgggcgccaaccgcatgggcggtatgaacatgtcgccttgggaatcgcagaatcccggcggcggacagtttggtaacaacatgcgacagggtggcggtcagatgaacgcccaggccatcaacttggccaacaatctgctgaacaatctgttcaggaaccagaatccaccatcgcttctcgacttgccccgcggcggcggtggcatgggaaatcgcaaccaacgtggtggcccgatggtcagtcgcggcggcggtgccggcaatcgtctcaataaccgtcgtggccagggaggtggcttccaaaatcgtggcgccactggtagtggacccaagcccccgccaaagcagggcggcggcggtattcgcaagcaaaatgcttttgatcgtgccaagaaacttttggctaaaaatgccaaccaaaataaaaagaaggaacccactcctggcgaaaagaaaatcgagagccctaccaaggagtctccatacgctagtgtgccgaacgacatgttctactgccatctgtgcaagaagcacatgtgggatgccaactctttcgagaaccacatcaagggccgcacccatctgatgatgcgtgagggcattgaggagagctatcgcctcaaggccaacatgatccgtcaggaggctaagatcgcagagcagctcaagtcgatcgagtttgaccgcttgaagcgcatgggcaaaagcaagcagcgtcagctggactactgcaccatgtgcgacctgaacttccatggtcacatctcgacccatcgcaagtcggagggacatttgcagctgaagaagttcttgcaccccaagtgcattgagtgcaacaaggagttcgccactcgcattgactacgatactcatctgctgtccgccgagcatctgaagaaggctgccgagaacaacaccaaggtgggtgagcgcaagcgccagaccttgcccatcagcaccgaagaagaggagacccgcgatttgcgcctgccccagaagcgcaagaagaagccggtcaagaaggagggcgaagcagccgatggcgaggctaagaaggagggtgccggcgatggcgagggtgccgaaggtgatgaagccgagggagaagaggccaaggagggtgaggaagctgctgacgagacaaaggagggcgatgagctaaacgagagccaagaggaagaggaagtggcactgcccgtggaccccgaggactgcatccttgacttcaacgacggcgatgagatccccagcgaggtggatacccgcctacctaagtacaactggcagcgtgctgtcggtcccggtctgatctccaagctggagtgctatgagtgctcggtgtgcagcaagttcttcgacaccgaggtgaccgccgagattcactcccgtacggcgactcatcaccgcaacttcttgaagtttatcaacgagaaatcaagcgataccaagatcgcacagaagcgcgcagctgccgccctggaggagaatgagcgtaagaagcgcaaggttgaggaggcagaggctccggctgccgagggcgcagccgaggaaaccaccgaaggcgctgagggtgagctgtacgatccatcggaagccactggcgatgacgaggacgtggagatggtggatgataatgctgagggcgagggcgaaggcgaaggtgacgaggaagccgaggctgaggtcgaggaagatggcgccggccaggacaacggcgaagaggagatggaagcccaggaggaagagggtcaggagggcgagcaagagcccgaacctgagccagctccagtccaaactcctgccccggctgaacctgcaccaccagccaagaccccagccaagactccgaccaaggcagctgctccagccgctgttgccagtcccgcagctgcggcaacgtcggcagacgcctctccatctccggccaagaaggcaacgcctgctcgcgctgccgccggagccaaggccacgccgcagcgacaacgcgcccgcggtcgctacaatcgctactaagtagacgtcgaaggaattcgtaatttaacataacataaaccttaatatacaagaaaaaatttacattcacgcccaggaggaggatgaagaaagaacagatcaaatcgatctcttcccgcaatttgacatttgcatcccaatttgcatatacactgaatgaatggaaactgagaagaagacggtcaacttttagttgaaacagttgaatatattgtacgacgaagcttcttgaaactgacgagggagaacacaaacaagttaattgaatcgagaatcgtattacctacccgattcccccctcacagaacgcataccatgccagccagcgaaccaaccattcaacttatgtaatcatataaattctataataaac

SEQ ID NO: 27741 - protein, 716 aa, DROSOPHILA
MVSVKVNGNPQNRLVNNAKVNGNMAFRGNQNRNRNFGGGNNNYGGPMGANRMGGMNMSPWESQNPGGGQFGNNMRQGGGQMNAQAINLANNLLNNLFRNQNPPSLLDLPRGGGGMGNRNQRGGPMVSRGGGAGNRLNNRRGQGGGFQNRGATGSGPKPPPKQGGGGIRKQNAFDRAKKLLAKNANQNKKKEPTPGEKKIESPTKESPYASVPNDMFYCHLCKKHMWDANSFENHIKGRTHLMMREGIEESYRLKANMIRQEAKIAEQLKSIEFDRLKRMGKSKQRQLDYCTMCDLNFHGHISTHRKSEGHLQLKKFLHPKCIECNKEFATRIDYDTHLLSAEHLKKAAENNTKVGERKRQTLPISTEEEETRDLRLPQKRKKKPVKKEGEAADGEAKKEGAGDGEGAEGDEAEGEEAKEGEEAADETKEGDELNESQEEEEVALPVDPEDCILDFNDGDEIPSEVDTRLPKYNWQRAVGPGLISKLECYECSVCSKFFDTEVTAEIHSRTATHHRNFLKFINEKSSDTKIAQKRAAAALEENERKKRKVEEAEAPAAEGAAEETTEGAEGELYDPSEATGDDEDVEMVDDNAEGEGEGEGDEEAEAEVEEDGAGQDNGEEEMEAQEEEGQEGEQEPEPEPAPVQTPAPAEPAPPAKTPAKTPTKAAAPAAVASPAAAATSADASPSPAKKATPARAAAGAKATPQRQRARGRYNRY

SEQ ID NO: 27742 - DNA, 4818 bp, DROSOPHILA
atatgggcactcaaggttagcgggttaagtggattatttgcaaaatgtatatatttatatatatatataaattcagaacaatgacgtattagtgggcaccataacattcaaagccgtggacagccaacgccgatcctttgacgctgtgcgtctcctacacgtggtaggagaagtggcggtacttggtgccgccgggcaggttgccgctggtggtcgaagaatagctgtagccaccgggtccggcgccagtggtgctggtccgctctgtgctgtagttgtacgagccgccgggaccgctgcgcgacgtcttctccacagtcgacgtgtacgtggagcgctccgggcggtacgagtgcgggttgctcgagtcgtagctgctcttctccacggacgacttcgaggtgtacgagtagtccgaggaggcccggctgcggtgcgagcccggtctgtccgtgcacaggtctaagcgtggagtctataaattccgatttgatagtgatatagagataaggtttggtttggttttggttttggtttctatttcggcattggcagcacaagcatcataaaaggattaaacttgctcctgctgctccacgaactgctgtatgcaaatggccaaagaacgcaaggcgactcaattggggaaattgaaacatgttcgaactgttttactttagagttaagagcttaatgcaaccatctatgcacacaaatgctatgagtctatgaatgaaacgttagatacatgggtacacagagaaaaaagcactgaccgtttgtagttggaatctcattgaacaatttctatagagcgtactgctaaaatggaaatatttcgattacaacgtattctggatagaatgtctaaaagttctactttttctctgtgtagagtaaaaacttgttcagtgtttagtgggttaacacaagattatatggactatggctagactatatgtaggcctatcattattttgaatgcattttcagttttttttttgtctgttttagttggttatgtgtccttagatacgactaggttcgttcgactaggcttcgattgggttcgggttatcggttgggtgaataggatgatgctcccctagtaggagtacttggtgaccatcgcgcccgacctctcgttgcggtaggtctcccggcgaactggcaaggactcggagacggcgcgatggagtcgcggcagctgggcgtccagactgtcgcggaaggtgcggccggcggtattgccacccgcctccacggtgtcgatgtgctggcgcaccatgcccaggatccgcgtccggttcttgtcccgggtggagacatacggctcaatgggctcgtaggccagcttgtagtcgggcttgatggaggcccgattgatcggatcgaggatcgaccgctggcgccgctcgagatcgggacgccgcactccgaaggcggtcaccggatccgagatgagcgacggccgcggcacgaacggaactttctcccagtcaattggtgttctcttcgttctctgtaatgcccaaaagtccacaattttgtttttaatttctgggtcagccggggattaagctgtggctcagtggttaggtggtgcagcgaacggggatctcaactgggcggtgcggtgggtcaaagtcatatgtacgagtatatacagtacgcgggcggggcatttatatacagcttcgttggggcagtagttgagtttggtatcagatcgcagtgctgggtgggtcaagctgtatccaataacatcgaacatccttacattatgacacaagatgcatagctacacatgtgtctgaaccctagggtggacctgcatctcttttggtttgcacaagccttaaacagatattacgtatacgcaacgttgcttgcacagttgggctgcagaaagctagcctacttaacaggtttctattgaagtgcagtaatgaaaatttagattttgtttttccaaacggtccaccctagtctaaatacacatatgtatatatgcatattgatacgacgtagtgtggttgtgagtaatgtgcaatgggagcattaagatggaacacaaacagcaaacgtatatatatttacagcaatttagccaagtttatttatcaattaagccagttaccctacattctaaccctaaataccaaaaattaaatctcaataaaacgtatttcatagatacacatcaaagtagattgccgttttcattcatcgaatcatcaagttatcactataaattataaacagcgagtgcttttcaaaatgtatatgcatggcacacagaaagtgtccagacaagatggatctcttggggattcgatgtacctacatatatatccttgctttggattatcatcacattggacagtcgaaaaaatgggcattttcttatgttgttccctctaattttcgaatattttgcgttattttgttgtagttgcttgccatggcatcggtttatttgaatatattatggaaatcggaaagatatttttaggaccagcaaagagcgaaatgcgcgcgcatatagtattacacatacaaaaagcaaatccacggcccgtacaaaaacaaattatcgagagagctgtggctccgtatgagtttcatcgcgaattcgcatgtgtttggaattccactcgcccatacatatgtatatattctaaacatttttgggcaccagaccattagaccaccagaccagacggacctcagcattttgtaaataataataaaatatagagatagagaagaaaatgttcggcctccgctaaattcttagttcccaaaatgtatttagcgtgttatatttgggaggtgagtaaacacgtatatccgaaagagatatgaagatcattgcacagcaataaatttgctgaagattcaattcccacgatcgcgcgaaaattgcaatcttttcacactcgcatcgttttgtcagaatattttgtcacatatttattatttcggtctggtttaattatggttagacgactgtgcaggcacataactcagatatacatatgtagtattcagtgtagtacgagtacaccacaaccattgtgtgagagttattaaattgttagaaataggcttatgtatgaattactacacaaatgtttacactgaacctgaaaatgctatatatgtacaacatgggcagaacgtctaggtgatcattaaatataatatctctgagcacaaggacattccgttgcgaaagaccagctagttaggtactgtaagttcgatacgatattcataattggtagacactttacattcaaacgtgtttcaatttctcaagtaatctgctcgcttctcagaatgataccattgagtacagcaagtgggacacaagcgcttaaaactgaattcttgtgactacagattcgattagccattagctaagtgctaacagcaaatagttaactgctttcaaatttgtcaaatttatcctcagcgttttttgcaatcacaggttagtttattcttgaactgcttaagtttcgagtttggcaactgtacgcacagatatatttcacagatttaaatcgaggaaaaccacactaccgtatgtcaagtaaagttcagattctatttcgaagggcttaccgtaactgcgtaggaagttgtcaccggcctcgaggagtaggttctgcgggtcgtaaatccactttcgtaaaccatgttgagatttttagatttggatgctttgagagttttcaaatagaattgttcgttggattttggttcggatatatcgtcgttgcgtgttgttcacttgacgcccgttcgagttgatctgcctgagaatcgcacggagcacttgcttataattttttgattttcaaaattttcacagccttcgatcccgctctctctcgcacgttcggtccatacctctttctctatccatctcccaaatgaacttatttttggaattaagaaacattgacatctctcctcgcaaaagagcgagcgaattctgtttacataaagccagcacttttcatacagttgcgttcggaaaagcctatatacacatgaaatgtaccgagtctagtgctcccaggatatagagcccttatctgcgaaaacagacgtcacggatttcttccagaactttatagataagattagaatctgtatttagcatgggatatgactcgaattgatgatgatggcatctgaagatggaggaaaggctaatatttggcataggctaaatatgggtcgataaacatcaaaacattcggcggattatttatttataaatctgccacaagaatttctcaatataatgagcaattattgattatggtaatttcaatatttttacatttaattggcatttagcagtatgattacatgtagacattaataatgtttatagcttaattcgtattcccatcattcaaaatatcagcattcaaagcatcaccgttgtttaaagattgattagccaaaactgatatgaatgagcttggcattttttgaaacaaataaggcgtgaaattaaaatcctgagagcaatttatggtcagtgggtatcacctgtggaccggacacagagctttccacacaaatagctggatataaattattaagaaaatacaaaaatgaaaataagataaaaataaatgttgttttccaacagtttgaggccagattactcataccatcttacaataagatcggaaacatgtattcgtgaacatataaataaactgcacatcatcctatacccacattttaaatcgggtgtgtaggtgtttgcttgtatataaacaaaaccat

SEQ ID NO: 27743 - DNA, 707 bp, DROSOPHILA
ctcgaacgggcgtcaagtgaacaacacgcaacgacgatatatccgaaccaaaatccaacgaacaattctatttgaaaactctcaaagcatccaaatctaaaaatctcaacatggtttacgaaagtggatttacgacccgcagaacctactcctcgaggccggtgacaacttcctacgcagttacgagaacgaagagaacaccaattgactgggagaaagttccgttcgtgccgcggccgtcgctcatctcggatccggtgaccgccttcggagtgcggcgtcccgatctcgagcggcgccagcggtcgatcctcgatccgatcaatcgggcctccatcaagcccgactacaagctggcctacgagcccattgagccgtatgtctccacccgggacaagaaccggacgcggatcctgggcatggtgcgccagcacatcgacaccgtggaggcgggtggcaataccgccggccgcaccttccgcgacagtctggacgcccagctgccgcgactccatcgcgccgtctccgagtccttgccagttcgccgggagacctaccgcaacgagaggtcgggcgcgatggtcaccaagtactcctactaggggagcatcatcctattcacccaaccgataacccgaacccaatcgaagcctagtcgaacgaacctagtcgtatctaaggacacataaccaactaaaacagacaaa

SEQ ID NO: 27744 - protein, 163 aa, DROSOPHILA
MVYESGFTTRRTYSSRPVTTSYAVTRTKRTPIDWEKVPFVPRPSLISDPVTAFGVRRPDLERRQRSILDPINRASIKPDYKLAYEPIEPYVSTRDKNRTRILGMVRQHIDTVEAGGNTAGRTFRDSLDAQLPRLHRAVSESLPVRRETYRNERSGAMVTKYSY

SEQ ID NO: 27745 - DNA, 11145 bp, DROSOPHILA
ctgcacacgtcgctgtggttccgatgccttgcgtatggactccagctttagtttcatgtagcagttgtcggcgatgggtcggcactctagcttttgcacaatcctgccctccatatacaacttttcgttatccggctgtgccgccgaggtagtcgagttctccttgccatcggacggtgccatgtgcgagaatacgccgagcgtctgcttggtgacctgcgacacgtccaggatgtgctcggtgggtattttctcctcgggatctagagccaaaacggcgggcgtgagggaaagcgagacctgggccttttggccaggtgtcttgtttatccggagcttgcccacgtccatgttcgtcggcgccttctcccatttctgggcaatgtacttgggcaccttcaccagccatacgcctcgcccagcattggacaggtccaggtccttgtcgatgatctgtgtcttttccttatcctccttcgacattctgtttgctttaaattattaaaaacgaatttgcaaagccacttgtaccgttttcggctttgcttgttgttgttgttttgccgtaaatttagtgcggtcgaataaacagtttcgaaaaaatgctagtttagtatatcacggtatttttctttcggtatttattcgttatgttattattaggcgccaagtttgaaaaagtccgaagtgcagataacgaaatagaactatttacatatctgaattttatatagttagcaagaactttagaacataagaaataacttttataatgaaatgtcttagaaagaatatgatatcttaattttgatttattcagcaaattttatgactaaatttagaacacaacattgtattgatttaagatgaatttatgaattgatgtgacaccttatccagcattatccaccccattgccctattaaattgtttttctaatatttttattgttttttcattctttttaaattaggttgacagcatggtgattgtgtagaatctattcctcctcctcttcctcgtcctcctcctcctccgcatcgagatcctcctcgtagctattaccaccagtgggggtaacattagagccgagctcgatgatcggttcctgttcctcaacgggcgtgacgggctcttcgaccacaggctcgctggtctcgttctcgttcttctggatggcctgcagttcctgggcggcaagctcggattcctggcgggcgatctcggccagctcggcggcctggcgagcaagttctccctcactctccttctcgatctccgccaggcgctccagctcctgctcacggacacgctgctcctcctccaggcgagcctcttcagcgacacgagcctcttcggcggccttttgggcagcttcttcggcggcacgagcctcctctacagccttcagtgcggcttcttcggcggccttttgggcagcttcttcagccagacgagcctcttcggctgcctttaaagcggcttcttcggcagccttttgggcagcttcctcggcggccttttgggcggctgcctcctctgctaggcgagcttcctcagcagctttttgggcagcttcctcggcgaccttttgggcggcagcctcctccgctagacgcgcttcttcggcagctttctgggcagcatcttcagcggcttttagggctttagcttcttcggctgctttttgggcggcagcttcagccaggagagcctcttcggcagcgattttggcggcctcctcggcagcctttttggccttagcagcagcctgcttttcggcctcagccgtcaggcgatccctctcctccttgagagcccttcggaaacatcaaaaatttaataggaaatgagctatgagctggtgtaggtagtgagcacccacctctcttccctacgcttggcttcatcggctttctgggcacgcttcttttccaagtccacctcgtcgagagcctcttcgttaacggttagaagacgctcctggcgcagacgctgtttctccttggcctccacatcgaggggatcctccaggggcctaggggcagaaaattttctagatggacggttaggatccaactcggcatctgaaatgtaatgcttgtcagaagagccttcaccacagtgcctatgcatttgtatcttatttttcattttacattaaatatccttcactttgttgttcactcggctaatgtcattatacattatacttatacttacaatacttactcttaggatcggcgattgttggttttcttatagacgaggcaaggaaaattgcagatacagtagacgccaatgttttagagtattgtgtggcattaatgggagtttttaaaaagttctgggtatgaagaattgaaccaaaatgtggttaatgggttaagcatacatacatatatacatctcaaaatgcaaaaaaatagtatatgaagtaagctacaatcttgaagtgttgtactgtgtaaatttgcgtcaatttcgatgtattttattataattctgcatcaatccattagtcatctttatgtgcaaaaatgtgggccgatgtaatatcacctatcaaaatagcaaaatcgccactttctaatcctttgaaatcccatctgaaatagacccgatatgcagaccttttacaaaatacgaccccacaaggaaagaattgcgtttagatcagtatttacaaattaatatattgatacatatttgtaagtaactatccctaaaatgtgtttacatatgcatgaacaaaacattggttaacaaaattcgcgatgaagtccatatcttacaaatgccaaaaagtatgcacatgaagtatttaatagttcgtaatcagtgatcatgaaaatatataatttaatagtcagcttcttacttaagttacaacaaattgaaagagaatgaataagtatctacattttggtgagtcacatgaaaaatgttagtatcacaagtgatgcgttgaatttgtttaatatttttattatttcgatcttcaaagctgttctgatctgatttgtgtgtaagtattagtctgagtagtgaaagcgccatattgtgtcgatatcaagtgttcatcttgtagatatcggctaattgtctaccacgcaaaagaaagtcttttagattggtttatttaagaaagagaagtgtatgtccatacaaaaatcaggcatgttatcatttaggcctcaacttcaacagcttcaactggaaagaatcaatcaatcataaaacgtataacgttagtgaaatacaatgaactgaacaattcaggatgcagcaaccaaatatgtaagttagttacaaatgaattatttaatttatattctaaagcaccgtattaaaaaacatcttatcttgaactaacaaacgttgtacgttaacaataaatttaattggagaatacactgaaagaaaattattggacaaggggattacgaagaattgtatgaattgatattggtccaagccaatctataaatttaatttgaagctcctggtgctcgtaaacatgttttttttttcaattgtttttttttaggcaatgctgattaattattttatattttgattgatttttgattgtgaagagggattcgcagatttattctatttgaattgggatactaacaaaaattgagcaatttaaattttgtaaaggaaaaaatgtagtgcatatccttgtccttacaaattcatctcgtaatgaatggtaatcttttggcgccaacatctattacatttatgcttgagtgatacatatatacaggtgtcatattcaagcgcaatataagaacacaaacagtacttaccttccttcacaggatcttgggatttcttatcattcttccaagtcgggtgtctaaggtaccaggacaagaggttaatatcagttcgaactttgtccgtatcgtacaacggacttctaacattataggccttgtcaccgcaaatccttactgatgcaagatgacttttaccttttgttatttaattgtttaaagaatgcaatttaataaccatttgctatacatttaagatatctaaccacatttgtgaacagaatacatagtgcagtagtctaacatttacgtttcgaaacaaaacttaccaacatatttcactgctggcctggggtagtgcgaaatattgtgaacttccttggcaatatgacggacaggatttgtgacacgggccacataggcatctagggccagttgcgaggccggctcataggtgtaactaaaaaacatatatacatatatatgcatatattatatatagcagaaatatgctttatctaacaatatctacagaacataattaagggaacataatttttatttttagcaaatcatatttatccgtcatatcattgcaccgaaattatgcaggcccacatgtcgtatgcacaatctcggcacaaaaatgaagagtgaaacgaatgcgattattttctatgccaagggccttctagtttcaagaatgtgcgccaaattgttgcaatgtacatatataaacataaataattggtaccatgtaggtgttattgtatctatttttggcttcgaaagtgtcctcattggaatggaatgtgctcagatgcccattaggtggtaattacccctacttacccagtgacgggaaagggagtgcagctacgtgcacggcgcaccacgggagtgtgcaagtcacgaatcagagattgcgcgcggttgcgaatccggcttgtttcctcggagaaggtctgtaatatcaattcaatgttaaagggggtgggggccaaatcgaaggaaaagaagtctagaagcgagggcccagaacaacactactcctggttctgtgtgtctacgaaagcaacgtgctaagtacgctggaccaacttacggtaaagggttcggtattgaggtaattggtcagggcgcgggcaccgtaaccaggcggcagcctcttcagataggagggcacagagcgaaccgggctggtgatgaccctcaccggcgagggggtgatcctcagcggcgacagcgaactgcgtggggcatacacccgggtgaccgtggtcgggctgtaggcgtaggacggcgtgtacgtggtgtacgatgtcgggatgtaggtcgaagtgtaggtcgatggcaagtaggaggggctgtagtaggtcgatggcgtggtgtaggagtaggtggtgcgctccggcgatgaaatcactcgggtcgtcgtgcggacaacgcgaacaggcgatggtgagtgtatgacgcgggacaccacgcgggcaggcgaggttaccacgcggatgggcgaggtcaccacccgggttgcgccgtagacgcggcgtggcaccgagtagctcgagtagatggggtaactcgacttgtacacctatatggcaatggtttcaacattaagacaacatcgaatatgcaaggttcggtgattatgatttgattagcggaatgagaaagcagagaaaataaaaaagaacatataagaactagaaacagaaacgtaaaccatatgttcgtgatctctccatttaggcagttttgtctgccttatgattatggaagtagtcgattttacatcacaaaaatgatgatatatgaaatgataataagtaaagaatgcatcttgaaaatgcttactactttcagattatttaacgtgggatcgtgggatttacccagaataatttctattttgattaaatggattctctagtgctttaatctaaataagactatgatgtgagggcttattactaaccgaatctgtttttccagtgacgatgatgtgatggatgtgattgaacagtgtgtgatataagtcaatagaaaagaatagtaataatccatagaaagatggatgatgacaagcgatgtaggcgataaggatgaaaaccaaatacttacacgagttactttctcgaccgaggggtactgaaagtaatacaaaatagagcaagtcatgttttggttcaaaagagttgacaactctcatatatttcttgacagaaacggtttagatttccttatcctaatttgtgtcttcagtatgaatatcgtatcgacctctatatatgttcatttcaagaaaatataatgctacgttcatttgagataagaccgtgtttattttattgtatcacaaatatgttttaacatgacttcttgaaggttgcaaatacacacagaaattgttgatcttgttcggttaatctagtctatatgcgaaactatttgggcattagtggtgattagtccaagtcaaaacgaaaatacatcatcattgaaaacttcgtatacaaatatatatatatatatatgggcactcaaggttagcgggttaagtggattatttgcaaaatgtatatatttatatatatatataaattcagaacaatgacgtattagtgggcaccataacattcaaagccgtggacagccaacgccgatcctttgacgctgtgcgtctcctacacgtggtaggagaagtggcggtacttggtgccgccgggcaggttgccgctggtggtcgaagaatagctgtagccaccgggtccggcgccagtggtgctggtccgctctgtgctgtagttgtacgagccgccgggaccgctgcgcgacgtcttctccacagtcgacgtgtacgtggagcgctccgggcggtacgagtgcgggttgctcgagtcgtagctgctcttctccacggacgacttcgaggtgtacgagtagtccgaggaggcccggctgcggtgcgagcccggtctgtccgtgcacaggtctaagcgtggagtctataaattccgatttgatagtgatatagagataaggtttggtttggttttggttttggtttctatttcggcattggcagcacaagcatcataaaaggattaaacttgctcctgctgctccacgaactgctgtatgcaaatggccaaagaacgcaaggcgactcaattggggaaattgaaacatgttcgaactgttttactttagagttaagagcttaatgcaaccatctatgcacacaaatgctatgagtctatgaatgaaacgttagatacatgggtacacagagaaaaaagcactgaccgtttgtagttggaatctcattgaacaatttctatagagcgtactgctaaaatggaaatatttcgattacaacgtattctggatagaatgtctaaaagttctactttttctctgtgtagagtaaaaacttgttcagtgtttagtgggttaacacaagattatatggactatggctagactatatgtaggcctatcattattttgaatgcattttcagttttttttttgtctgttttagttggttatgtgtccttagatacgactaggttcgttcgactaggcttcgattgggttcgggttatcggttgggtgaataggatgatgctcccctagtaggagtacttggtgaccatcgcgcccgacctctcgttgcggtaggtctcccggcgaactggcaaggactcggagacggcgcgatggagtcgcggcagctgggcgtccagactgtcgcggaaggtgcggccggcggtattgccacccgcctccacggtgtcgatgtgctggcgcaccatgcccaggatccgcgtccggttcttgtcccgggtggagacatacggctcaatgggctcgtaggccagcttgtagtcgggcttgatggaggcccgattgatcggatcgaggatcgaccgctggcgccgctcgagatcgggacgccgcactccgaaggcggtcaccggatccgagatgagcgacggccgcggcacgaacggaactttctcccagtcaattggtgttctcttcgttctctgtaatgcccaaaagtccacaattttgtttttaatttctgggtcagccggggattaagctgtggctcagtggttaggtggtgcagcgaacggggatctcaactgggcggtgcggtgggtcaaagtcatatgtacgagtatatacagtacgcgggcggggcatttatatacagcttcgttggggcagtagttgagtttggtatcagatcgcagtgctgggtgggtcaagctgtatccaataacatcgaacatccttacattatgacacaagatgcatagctacacatgtgtctgaaccctagggtggacctgcatctcttttggtttgcacaagccttaaacagatattacgtatacgcaacgttgcttgcacagttgggctgcagaaagctagcctacttaacaggtttctattgaagtgcagtaatgaaaatttagattttgtttttccaaacggtccaccctagtctaaatacacatatgtatatatgcatattgatacgacgtagtgtggttgtgagtaatgtgcaatgggagcattaagatggaacacaaacagcaaacgtatatatatttacagcaatttagccaagtttatttatcaattaagccagttaccctacattctaaccctaaataccaaaaattaaatctcaataaaacgtatttcatagatacacatcaaagtagattgccgttttcattcatcgaatcatcaagttatcactataaattataaacagcgagtgcttttcaaaatgtatatgcatggcacacagaaagtgtccagacaagatggatctcttggggattcgatgtacctacatatatatccttgctttggattatcatcacattggacagtcgaaaaaatgggcattttcttatgttgttccctctaattttcgaatattttgcgttattttgttgtagttgcttgccatggcatcggtttatttgaatatattatggaaatcggaaagatatttttaggaccagcaaagagcgaaatgcgcgcgcatatagtattacacatacaaaaagcaaatccacggcccgtacaaaaacaaattatcgagagagctgtggctccgtatgagtttcatcgcgaattcgcatgtgtttggaattccactcgcccatacatatgtatatattctaaacatttttgggcaccagaccattagaccaccagaccagacggacctcagcattttgtaaataataataaaatatagagatagagaagaaaatgttcggcctccgctaaattcttagttcccaaaatgtatttagcgtgttatatttgggaggtgagtaaacacgtatatccgaaagagatatgaagatcattgcacagcaataaatttgctgaagattcaattcccacgatcgcgcgaaaattgcaatcttttcacactcgcatcgttttgtcagaatattttgtcacatatttattatttcggtctggtttaattatggttagacgactgtgcaggcacataactcagatatacatatgtagtattcagtgtagtacgagtacaccacaaccattgtgtgagagttattaaattgttagaaataggcttatgtatgaattactacacaaatgtttacactgaacctgaaaatgctatatatgtacaacatgggcagaacgtctaggtgatcattaaatataatatctctgagcacaaggacattccgttgcgaaagaccagctagttaggtactgtaagttcgatacgatattcataattggtagacactttacattcaaacgtgtttcaatttctcaagtaatctgctcgcttctcagaatgataccattgagtacagcaagtgggacacaagcgcttaaaactgaattcttgtgactacagattcgattagccattagctaagtgctaacagcaaatagttaactgctttcaaatttgtcaaatttatcctcagcgttttttgcaatcacaggttagtttattcttgaactgcttaagtttcgagtttggcaactgtacgcacagatatatttcacagatttaaatcgaggaaaaccacactaccgtatgtcaagtaaagttcagattctatttcgaagggcttaccgtaactgcgtaggaagttgtcaccggcctcgaggagtaggttctgcgggtcgtaaatccactttcgtaaaccatgttgagatttttagatttggatgctttgagagttttcaaatagaattgttcgttggattttggttcggatatatcgtcgttgcgtgttgttcacttgacgcccgttcgagttgatctgcctgagaatcgcacggagcacttgcttataattttttgattttcaaaattttcacagccttcgatcccgctctctctcgcacgttcggtccatacctctttctctatccatctcccaaatgaacttatttttggaattaagaaacattgacatctctcctcgcaaaagagcgagcgaattctgtttacataaagccagcacttttcatacagttgcgttcggaaaagcctatatacacatgaaatgtaccgagtctagtgctcccaggatatagagcccttatctgcgaaaacagacgtcacggatttcttccagaactttatagataagattagaatctgtatttagcatgggatatgactcgaattgatgatgatggcatctgaagatggaggaaaggctaatatttggcataggctaaatatgggtcgataaacatcaaaacattcggcggattatttatttataaatctgccacaagaatttctcaatataatgagcaattattgattatggtaatttcaatatttttacatttaattggcatttagcagtatgattacatgtagacattaataatgtttatagcttaattcgtattcccatcattcaaaatatcagcattcaaagcatcaccgttgtttaaagattgattagccaaaactgatatgaatgagcttggcattttttgaaacaaataaggcgtgaaattaaaatcctgagagcaatttatggtcagtgggtatcacctgtggaccggacacagagctttccacacaaatagctggatataaattattaagaaaatacaaaaatgaaaataagataaaaataaatgttgttttccaacagtttgaggccagattactcataccatcttacaataagatcggaaacatgtattcgtgaacatataaataaactgcacatcatcctatacccacattttaaatcgggtgtgtaggtgtttgcttgtatataaacaaaaccat

SEQ ID NO: 27746 - DNA, 2121 bp, DROSOPHILA
ctcgaacgggcgtcaagtgaacaacacgcaacgacgatatatccgaaccaaaatccaacgaacaattctatttgaaaactctcaaagcatccaaatctaaaaatctcaacatggtttacgaaagtggatttacgacccgcagaacctactcctcgaggccggtgacaacttcctacgcagttacgtacccctcggtcgagaaagtaactcgtgtgtacaagtcgagttaccccatctactcgagctactcggtgccacgccgcgtctacggcgcaacccgggtggtgacctcgcccatccgcgtggtaacctcgcctgcccgcgtggtgtcccgcgtcatacactcaccatcgcctgttcgcgttgtccgcacgacgacccgagtgatttcatcgccggagcgcaccacctactcctacaccacgccatcgacctactacagcccctcctacttgccatcgacctacacttcgacctacatcccgacatcgtacaccacgtacacgccgtcctacgcctacagcccgaccacggtcacccgggtgtatgccccacgcagttcgctgtcgccgctgaggatcaccccctcgccggtgagggtcatcaccagcccggttcgctctgtgccctcctatctgaagaggctgccgcctggttacggtgcccgcgccctgaccaattacctcaataccgaaccctttaccgtaaaccttctccgaggaaacaagccggattcgcaaccgcgcgcaatctctgattcgtgacttgcacactcccgtggtgcgccgtgcacgtagctgcactccctttcccgtcactggttacacctatgagccggcctcgcaactggccctagatgcctatgtggcccgtgtcacaaatcctgtccgtcatattgccaaggaagttcacaatatttcgcactaccccaggccagcagtgaaatatgttgtaaggatttgcggtgacaaggcctataatgttagaagtccgttgtacgatacggacaaagttcgaactgatattaacctcttgtcctggtaccttagacacccgacttggaagaatgataagaaatcccaagatcctgtgaaggaagatgccgagttggatcctaaccgtccatctagaaaattttctgcccctaggcccctggaggatcccctcgatgtggaggccaaggagaaacagcgtctgcgccaggagcgtcttctaaccgttaacgaagaggctctcgacgaggtggacttggaaaagaagcgtgcccagaaagccgatgaagccaagcgtagggaagagagggctctcaaggaggagagggatcgcctgacggctgaggccgaaaagcaggctgctgctaaggccaaaaaggctgccgaggaggccgccaaaatcgctgccgaagaggctctcctggctgaagctgccgcccaaaaagcagccgaagaagctaaagccctaaaagccgctgaagatgctgcccagaaagctgccgaagaagcgcgtctagcggaggaggctgccgcccaaaaggtcgccgaggaagctgcccaaaaagctgctgaggaagctcgcctagcagaggaggcagccgcccaaaaggccgccgaggaagctgcccaaaaggctgccgaagaagccgctttaaaggcagccgaagaggctcgtctggctgaagaagctgcccaaaaggccgccgaagaagccgcactgaaggctgtagaggaggctcgtgccgccgaagaagctgcccaaaaggccgccgaagaggctcgtgtcgctgaagaggctcgcctggaggaggagcagcgtgtccgtgagcaggagctggagcgcctggcggagatcgagaaggagagtgagggagaacttgctcgccaggccgccgagctggccgagatcgcccgccaggaatccgagcttgccgcccaggaactgcaggccatccagaagaacgagaacgagaccagcgagcctgtggtcgaagagcccgtcacgcccgttgaggaacaggaaccgatcatcgagctcggctctaatgttacccccactggtggtaatagctacgaggaggatctcgatgcggaggaggaggaggacgaggaagaggaggaggaatag

SEQ ID NO: 27747 - protein, 217 aa, DROSOPHILA
MVYESGFTTRRTYSSRPVTTSYAVTYPSVEKVTRVYKSSYPIYSSYSVPRRVYGATRVVTSPIRVVTSPARVVSRVIHSPSPVRVVRTTTRVISSPERTTYSYTTPSTYYSPSYLPSTYTSTYIPTSYTTYTPSYAYSPTTVTRVYAPRSSLSPLRITPSPVRVITSPVRSVPSYLKRLPPGYGARALTNYLNTEPFTVNLLRGNKPDSQPRAISDS

SEQ ID NO: 27748 - DNA, 6684 bp, DROSOPHILA
attttctatgccaagggccttctagtttcaagaatgtgcgccaaattgttgcaatgtacatatataaacataaataattggtaccatgtaggtgttattgtatctatttttggcttcgaaagtgtcctcattggaatggaatgtgctcagatgcccattaggtggtaattacccctacttacccagtgacgggaaagggagtgcagctacgtgcacggcgcaccacgggagtgtgcaagtcacgaatcagagattgcgcgcggttgcgaatccggcttgtttcctcggagaaggtctgtaatatcaattcaatgttaaagggggtgggggccaaatcgaaggaaaagaagtctagaagcgagggcccagaacaacactactcctggttctgtgtgtctacgaaagcaacgtgctaagtacgctggaccaacttacggtaaagggttcggtattgaggtaattggtcagggcgcgggcaccgtaaccaggcggcagcctcttcagataggagggcacagagcgaaccgggctggtgatgaccctcaccggcgagggggtgatcctcagcggcgacagcgaactgcgtggggcatacacccgggtgaccgtggtcgggctgtaggcgtaggacggcgtgtacgtggtgtacgatgtcgggatgtaggtcgaagtgtaggtcgatggcaagtaggaggggctgtagtaggtcgatggcgtggtgtaggagtaggtggtgcgctccggcgatgaaatcactcgggtcgtcgtgcggacaacgcgaacaggcgatggtgagtgtatgacgcgggacaccacgcgggcaggcgaggttaccacgcggatgggcgaggtcaccacccgggttgcgccgtagacgcggcgtggcaccgagtagctcgagtagatggggtaactcgacttgtacacctatatggcaatggtttcaacattaagacaacatcgaatatgcaaggttcggtgattatgatttgattagcggaatgagaaagcagagaaaataaaaaagaacatataagaactagaaacagaaacgtaaaccatatgttcgtgatctctccatttaggcagttttgtctgccttatgattatggaagtagtcgattttacatcacaaaaatgatgatatatgaaatgataataagtaaagaatgcatcttgaaaatgcttactactttcagattatttaacgtgggatcgtgggatttacccagaataatttctattttgattaaatggattctctagtgctttaatctaaataagactatgatgtgagggcttattactaaccgaatctgtttttccagtgacgatgatgtgatggatgtgattgaacagtgtgtgatataagtcaatagaaaagaatagtaataatccatagaaagatggatgatgacaagcgatgtaggcgataaggatgaaaaccaaatacttacacgagttactttctcgaccgaggggtactgaaagtaatacaaaatagagcaagtcatgttttggttcaaaagagttgacaactctcatatatttcttgacagaaacggtttagatttccttatcctaatttgtgtcttcagtatgaatatcgtatcgacctctatatatgttcatttcaagaaaatataatgctacgttcatttgagataagaccgtgtttattttattgtatcacaaatatgttttaacatgacttcttgaaggttgcaaatacacacagaaattgttgatcttgttcggttaatctagtctatatgcgaaactatttgggcattagtggtgattagtccaagtcaaaacgaaaatacatcatcattgaaaacttcgtatacaaatatatatatatatatatgggcactcaaggttagcgggttaagtggattatttgcaaaatgtatatatttatatatatatataaattcagaacaatgacgtattagtgggcaccataacattcaaagccgtggacagccaacgccgatcctttgacgctgtgcgtctcctacacgtggtaggagaagtggcggtacttggtgccgccgggcaggttgccgctggtggtcgaagaatagctgtagccaccgggtccggcgccagtggtgctggtccgctctgtgctgtagttgtacgagccgccgggaccgctgcgcgacgtcttctccacagtcgacgtgtacgtggagcgctccgggcggtacgagtgcgggttgctcgagtcgtagctgctcttctccacggacgacttcgaggtgtacgagtagtccgaggaggcccggctgcggtgcgagcccggtctgtccgtgcacaggtctaagcgtggagtctataaattccgatttgatagtgatatagagataaggtttggtttggttttggttttggtttctatttcggcattggcagcacaagcatcataaaaggattaaacttgctcctgctgctccacgaactgctgtatgcaaatggccaaagaacgcaaggcgactcaattggggaaattgaaacatgttcgaactgttttactttagagttaagagcttaatgcaaccatctatgcacacaaatgctatgagtctatgaatgaaacgttagatacatgggtacacagagaaaaaagcactgaccgtttgtagttggaatctcattgaacaatttctatagagcgtactgctaaaatggaaatatttcgattacaacgtattctggatagaatgtctaaaagttctactttttctctgtgtagagtaaaaacttgttcagtgtttagtgggttaacacaagattatatggactatggctagactatatgtaggcctatcattattttgaatgcattttcagttttttttttgtctgttttagttggttatgtgtccttagatacgactaggttcgttcgactaggcttcgattgggttcgggttatcggttgggtgaataggatgatgctcccctagtaggagtacttggtgaccatcgcgcccgacctctcgttgcggtaggtctcccggcgaactggcaaggactcggagacggcgcgatggagtcgcggcagctgggcgtccagactgtcgcggaaggtgcggccggcggtattgccacccgcctccacggtgtcgatgtgctggcgcaccatgcccaggatccgcgtccggttcttgtcccgggtggagacatacggctcaatgggctcgtaggccagcttgtagtcgggcttgatggaggcccgattgatcggatcgaggatcgaccgctggcgccgctcgagatcgggacgccgcactccgaaggcggtcaccggatccgagatgagcgacggccgcggcacgaacggaactttctcccagtcaattggtgttctcttcgttctctgtaatgcccaaaagtccacaattttgtttttaatttctgggtcagccggggattaagctgtggctcagtggttaggtggtgcagcgaacggggatctcaactgggcggtgcggtgggtcaaagtcatatgtacgagtatatacagtacgcgggcggggcatttatatacagcttcgttggggcagtagttgagtttggtatcagatcgcagtgctgggtgggtcaagctgtatccaataacatcgaacatccttacattatgacacaagatgcatagctacacatgtgtctgaaccctagggtggacctgcatctcttttggtttgcacaagccttaaacagatattacgtatacgcaacgttgcttgcacagttgggctgcagaaagctagcctacttaacaggtttctattgaagtgcagtaatgaaaatttagattttgtttttccaaacggtccaccctagtctaaatacacatatgtatatatgcatattgatacgacgtagtgtggttgtgagtaatgtgcaatgggagcattaagatggaacacaaacagcaaacgtatatatatttacagcaatttagccaagtttatttatcaattaagccagttaccctacattctaaccctaaataccaaaaattaaatctcaataaaacgtatttcatagatacacatcaaagtagattgccgttttcattcatcgaatcatcaagttatcactataaattataaacagcgagtgcttttcaaaatgtatatgcatggcacacagaaagtgtccagacaagatggatctcttggggattcgatgtacctacatatatatccttgctttggattatcatcacattggacagtcgaaaaaatgggcattttcttatgttgttccctctaattttcgaatattttgcgttattttgttgtagttgcttgccatggcatcggtttatttgaatatattatggaaatcggaaagatatttttaggaccagcaaagagcgaaatgcgcgcgcatatagtattacacatacaaaaagcaaatccacggcccgtacaaaaacaaattatcgagagagctgtggctccgtatgagtttcatcgcgaattcgcatgtgtttggaattccactcgcccatacatatgtatatattctaaacatttttgggcaccagaccattagaccaccagaccagacggacctcagcattttgtaaataataataaaatatagagatagagaagaaaatgttcggcctccgctaaattcttagttcccaaaatgtatttagcgtgttatatttgggaggtgagtaaacacgtatatccgaaagagatatgaagatcattgcacagcaataaatttgctgaagattcaattcccacgatcgcgcgaaaattgcaatcttttcacactcgcatcgttttgtcagaatattttgtcacatatttattatttcggtctggtttaattatggttagacgactgtgcaggcacataactcagatatacatatgtagtattcagtgtagtacgagtacaccacaaccattgtgtgagagttattaaattgttagaaataggcttatgtatgaattactacacaaatgtttacactgaacctgaaaatgctatatatgtacaacatgggcagaacgtctaggtgatcattaaatataatatctctgagcacaaggacattccgttgcgaaagaccagctagttaggtactgtaagttcgatacgatattcataattggtagacactttacattcaaacgtgtttcaatttctcaagtaatctgctcgcttctcagaatgataccattgagtacagcaagtgggacacaagcgcttaaaactgaattcttgtgactacagattcgattagccattagctaagtgctaacagcaaatagttaactgctttcaaatttgtcaaatttatcctcagcgttttttgcaatcacaggttagtttattcttgaactgcttaagtttcgagtttggcaactgtacgcacagatatatttcacagatttaaatcgaggaaaaccacactaccgtatgtcaagtaaagttcagattctatttcgaagggcttaccgtaactgcgtaggaagttgtcaccggcctcgaggagtaggttctgcgggtcgtaaatccactttcgtaaaccatgttgagatttttagatttggatgctttgagagttttcaaatagaattgttcgttggattttggttcggatatatcgtcgttgcgtgttgttcacttgacgcccgttcgagttgatctgcctgagaatcgcacggagcacttgcttataattttttgattttcaaaattttcacagccttcgatcccgctctctctcgcacgttcggtccatacctctttctctatccatctcccaaatgaacttatttttggaattaagaaacattgacatctctcctcgcaaaagagcgagcgaattctgtttacataaagccagcacttttcatacagttgcgttcggaaaagcctatatacacatgaaatgtaccgagtctagtgctcccaggatatagagcccttatctgcgaaaacagacgtcacggatttcttccagaactttatagataagattagaatctgtatttagcatgggatatgactcgaattgatgatgatggcatctgaagatggaggaaaggctaatatttggcataggctaaatatgggtcgataaacatcaaaacattcggcggattatttatttataaatctgccacaagaatttctcaatataatgagcaattattgattatggtaatttcaatatttttacatttaattggcatttagcagtatgattacatgtagacattaataatgtttatagcttaattcgtattcccatcattcaaaatatcagcattcaaagcatcaccgttgtttaaagattgattagccaaaactgatatgaatgagcttggcattttttgaaacaaataaggcgtgaaattaaaatcctgagagcaatttatggtcagtgggtatcacctgtggaccggacacagagctttccacacaaatagctggatataaattattaagaaaatacaaaaatgaaaataagataaaaataaatgttgttttccaacagtttgaggccagattactcataccatcttacaataagatcggaaacatgtattcgtgaacatataaataaactgcacatcatcctatacccacattttaaatcgggtgtgtaggtgtttgcttgtatataaacaaaaccat

SEQ ID NO: 27749 - DNA, 669 bp, DROSOPHILA
ctcgaacgggcgtcaagtgaacaacacgcaacgacgatatatccgaaccaaaatccaacgaacaattctatttgaaaactctcaaagcatccaaatctaaaaatctcaacatggtttacgaaagtggatttacgacccgcagaacctactcctcgaggccggtgacaacttcctacgcagttacgtacccctcggtcgagaaagtaactcgtgtaagtatttggttttcatccttatcgcctacatcgcttgtcatcatccatctttctatggattattactattcttttctattgacttatatcacacactgttcaatcacatccatcacatcatcgtcactggaaaaacagattcggttagtaataagccctcacatcatagtcttatttagattaaagcactagagaatccatttaatcaaaatagaaattattctgggtaaatcccacgatcccacgttaaataatctgaaagtagtaagcattttcaagatgcattctttacttattatcatttcatatatcatcatttttgtgatgtaaaatcgactacttccataatcataaggcagacaaaactgcctaaatggagagatcacgaacatatggtttacgtttctgtttctagttcttatatgttcttttttattttctctgctttctcatt

SEQ ID NO: 27750 - protein, 98 aa, DROSOPHILA
MVYESGFTTRRTYSSRPVTTSYAVTYPSVEKVTRVSIWFSSLSPTSLVIIHLSMDYYYSFLLTYITHCSITSITSSSLEKQIRLVISPHIIVLFRLKH

SEQ ID NO: 27751 - DNA, 4972 bp, DROSOPHILA
aaaataaaatatttcatatattcataatctctttgatttctttgtattcgtgttgtttgcttgagattaccacccttgacatatccatttagttcgtttccttcagatttgataagcgtatatcgctttaattttgttaattttgatatctcattcctgtaaaaaaatctaaatgctgcaatttatatggtaaatgcggcaaaagtgccgtattttctcgtatgaagagctcaacagcttttatgttaaattttttttcaagtaaccttaaggttttcaaaacgttaactttataatataattaattactttaacttcttaattatttcaaggaggtagaattgttaaagaaatgcttttaatcagcagattacagtaatagtttttgcatgctgaggtcatcatattctaaattttttgtatatatgttttttggcattaaccttaacttaccaaaatatgtttttatattttcattttgtactttcagtgctttcagtttgtaattttagatatttatctaattgaattgttatggtacgtgtaagctcaatcatggtaaaaattctcgataatatattttcgcgacactatcttaaaaatttgattgactgatgtccttgaattttcataacgcattcggtatattgcattttcgtttagtttttatcctgagttttgttgatcaggtatacttggcactttgataatcgcttggcgattaattgttctatgtatttgttgtaatcgtttcgtaaatacttaaaactctgttatttcattcatttgtctctcatttttcttgacttgtatgcttgcagtgcagcttcggttcgtgaatatattcagtcttacgtttttttttcacatttttcactcattattcgtcttttgattgattgttttgcttaataatttgcagttttactgattgatttcttttaaacaaaatattttaaataataatatgtacgcttaaataagtttaatgcattaaacacatttttgaacattattttattgactttgattatggttatggtttttgcatctttttctaatatactttgtgtatttcgttacttgttttttttttcagcttaaatttaaggagttacattattacgaacttttttttttgcttaaattgtcactataagaggtttttgtaaaacaaaaaagtaataagtcacgcttttgtcacgtttttgtcattcataaagaaaaaaacacaatcttgcaaaatcataaacgctttcagatgcatgtgggatagaaaataattgtgtcgagagtggattgcggttttcagcttaaaaactaaaatatacattgcattcatttgtatacaattttacatgattcacaaaatgtttaaatttagttcattcaaaagatcatgttacgtactctcatttttccgtcatataaaaaatatgattgtagcatactttggtcacagttgacttgtaattgtaaatggaactaaggaggagcacatttaattttcttaggctggagctcagtgcagtctagctccgtttgtctatttagagaacattaaacaacaggcaaggcggattatttcaatatatctgttcagtactcatggggagacgaaacggaaacaaagggggatgttaatttggggtgggggtttatgtagaaagacgtcgaaacactagtttgcttaaatgctaagaaaaagagaactttatacttaaaactaaaattgtatgctttgagtgaccgcgtatgtgtgtgtttgcgtgttatgtatagcaagttaattgttgcattaaacatatattcccttccatgttactctgccctagtcccttcttatttggttttttggcctatcgaagcacgcgcagcgttctgttctctagtgtgccgtcaggggtgggagtgggaagtggttgtttagtagtaggcggctgcatttgaatagttctgcgagtacgcctgcgaatctgaaagaagacaccgatgacggatgatgcaactggagggaactgaaataacctaccataacccgcgtaggcacgctcatcgtagccagtgctttgcgctccgtgctggctgtagtccgcttgtccggtagcattgtagtccactgcagtcgagccatactgttggctgtagtcctggctgtacgactgataccgtgtatcctgcggtgcggcatagcccgtcgagctgtttggaagcacaaagcaatacattagcacttgcgtggcccaattgaaggcaagaaacgtagagagagagacgtcaagattaggtaacccacttgtagttctgatactggctctgatcgtattcggtgctgtggtgggctccgtagctgctgctcgccggagcacttgtctgcgatgtgtgagccgcatagctgctgctaccgctctggccatagccattgtatccctgctgggtggtctgggtgctgtaaccgctctgcgcgtaggggtccacttgttgggtctgctcgtgtgtctgatagctgtgatggctgataaagaacagcgtcaaaaaatgtaccaattatttttgcagatttagaaagtgtgcactatattgatttgattatataatatttgaaaattcgatgccttacctttgttgtggcgcatggtgacttggcggcgagccataagaggactgcgaagacatgccgccgcctcctccaccacccatatgctgctgtgttgaatggtacttgggcgtcatgggccgttggccatatggaccgccctcgtagcgaccgcgtttgggaccaggaccaccgggagcgccgcgtttgagagctggtaccggtgcaagttgtgtattgggattatgtgcctgatggtgatgcaagggtggccgactcataccttgattgtagccgcccctgccccgaggacctccgcgcctgggcatcgaaccgtgctcgctgcccggaccgccgcccatggaattgccgtggtggctgtgggagccaccgtacatgctgccgcctccactgccgttcatgtgcgaattgtagccgccgccaccacgtccacgtccactgaagggaccaccacgtccacgtccacggcccagatatggaggaggtcctcctccgttgctgcccccaggagcggaactgccgccatgcgagttgcccgaagacgggacgaccgctgatgtctggccatcggtgacctcatcaccggctgcttcaaccgctggctgttctccactgatcgccgaggtgggcactggtgatacggtcttgttgttctcggcacctgtgtgttgtttgggagctaaattggattggattggatttacaaggtatggcaggaagtcgagggttgtctgcggaaacttacgctgcgagtacaaaggtgggcgaccgccccgcatgcccatgggagcgccaccacgcggctgataaccgccgccgcgtccctgatagcccattccaccacgggatccacgcattcccctcggaggacccgacatcatgccctgcatgggcggtcctccgcccattccgctgccgccgcctccgcgcatgccacccataaagtgtccacgaccgccacgaccacgtccgcgatcgaagccaccgcgcataggcgctccaccgccccgtccacggaaaccgcctccacgtggaccgcccatcgatggcgaggacactgagcctccttccatgctcctctctcgctgttctcgtacactagatcacacgcactaccacttgcactggtattcttcgcactcggacgcggattttaagactgctgaagccggaggaagaagaagaagcagcgttaggatgccgcagattgacgattcgaggaactattgctagcgactaatcgtttctattgatgcttactggtcacttggtcactcggcgcactttcaacagtagcttatcttaaataacttatttaacttaacattattcggtgtgcgaagcgcgttggtcttcattcagtgaaaaaatatggcggcgactattgatttttgttgcagcgctgcccactcgtcgctcttttgcgccagtgttgtcatccttcagcgacaatatagctatgaaaacttgttattataattttccaagagttaatatacaaaacaggttaatacgtaatgaattaatttatagttcaaacaaatagagtctagtccataaacatgcattaaagatatattcaaactccggagggaatgagtttaagcaaattttagttggaatggtgatcgctagtagttagtttagaattgatggaaacacttaagatgattattgcttaatgatttaagaaactgctccactctcattcaaaaaagcaaattaaaacattgagcagtcccagcacaagtaactaatctgtaggtaatttgcaattcacggaccacggccacacttggcactgggaaaaatggaaaacacaagataaaacgtgaaccctttggtcgaaattcggtggtcacaatctggtatctggtgaaaagggacgacaggcgagtgcgacaggatgccgggcaaggtgggggtgaagattaaggcggcgcgcaacctgcccgtgatggacaaaagcagcgaaaccacggacgccttcgtggagatcaaactggcctcggtgacccacaagacggatgtcttccgcaagagtttgaatcccacctggaataccgattggtgaggtctgaccattcaatagctccatatattgtaacatttgctttctgataggttccgttttgaggtggacgacgctgagctccaggatgagcccctgcaaatccgcctgatggactacgacacgtactctgcgaacgatgcgattggaaaggtcaacatcagtttgaatcctctgtgcctggagagctctagtcaagcggtgcacggcaagggtaccgtgttatccggctggattcctgttttcgacactatgcacggtattcgcggcgagatcaatgtgat

SEQ ID NO: 27752 - DNA, 2550 bp, DROSOPHILA
aagaccaacgcgcttcgcacaccgaataatgttaagttaaataagttatttaagataagctactgttgaaagtgcgccgagtgaccaagtgaccatcttaaaatccgcgtccgagtgcgaagaataccagtgcaagtggtagtgcgtgtgatctagtgtacgagaacagcgagagaggagcatggaaggaggctcagtgtcctcgccatcgatgggcggtccacgtggaggcggtttccgtggacggggcggtggagcgcctatgcgcggtggcttcgatcgcggacgtggtcgtggcggtcgtggacactttatgggtggcatgcgcggaggcggcggcagcggaatgggcggaggaccgcccatgcagggcatgatgtcgggtcctccgaggggaatgcgtggatcccgtggtggaatgggctatcagggacgcggcggcggttatcagccgcgtggtggcgctcccatgggcatgcggggcggtcgcccacctttgtactcgcagcctcccaaacaacacacaggtgccgagaacaacaagaccgtatcaccagtgcccacctcggcgatcagtggagaacagccagcggttgaagcagccggtgatgaggtcaccgatggccagacatcagcggtcgtcccgtcttcgggcaactcgcatggcggcagttccgctcctgggggcagcaacggaggaggacctcctccatatctgggccgtggacgtggacgtggtggtcccttcagtggacgtggacgtggtggcggcggctacaattcgcacatgaacggcagtggaggcggcagcatgtacggtggctcccacagccaccacggcaattccatgggcggcggtccgggcagcgagcacggttcgatgcccaggcgcggaggtcctcggggcaggggcggctacaatcaaggtatgagtcggccacccttgcatcaccatcaggcacataatcccaatacacaacttgcaccggtaccagctctcaaacgcggcgctcccggtggtcctggtcccaaacgcggtcgctacgagggcggtccatatggccaacggcccatgacgcccaagtaccattcaacacagcagcatatgggtggtggaggaggcggcggcatgtcttcgcagtcctcttatggctcgccgccaagtcaccatgcgccacaacaaagccatcacagctatcagacacacgagcagacccaacaagtggacccctacgcgcagagcggttacagcacccagaccacccagcagggatacaatggctatggccagagcggtagcagcagctatgcggctcacacatcgcagacaagtgctccggcgagcagcagctacggagcccaccacagcaccgaatacgatcagagccagtatcagaactacaactcgacgggctatgccgcaccgcaggatacacggtatcagtcgtacagccaggactacagccaacagtatggctcgactgcagtggactacaatgctaccggacaagcggactacagccagcacggagcgcaaagcactggctacgatgagcgtgcctacgcgggttatgattcgcaggcgtactcgcagaactattcaaatgcagccgcctactactaaacaaccacttcccactcccacccctgacggcacactagagaacagaacgctgcgcgtgcttcgataggccaaaaaaccaaataagaagggactagggcagagtaacatggaagggaatatatgtttaatgcaacaattaacttgctatacataacacgcaaacacacacatacgcggtcactcaaagcatacaattttagttttaagtataaagttctctttttcttagcatttaagcaaactagtgtttcgacgtctttctacataaacccccaccccaaattaacatccccctttgtttccgtttcgtctccccatgagtactgaacagatatattgaaataatccgccttgcctgttgtttaatgttctctaaatagacaaacggagctagactgcactgagctccagcctaagaaaattaaatgtgctcctccttagttccatttacaattacaagtcaactgtgaccaaagtatgctacaatcatattttttatatgacggaaaaatgagagtacgtaacatgatcttttgaatgaactaaatttaaacattttgtgaatcatgtaaaattgtatacaaatgaatgcaatgtatattttagtttttaagctgaaaaccgcaatccactctcgacacaattattttctatcccacatgcatctgaaagcgtttatgattttgcaagattgtgtttttttctttatgaatgacaaaaacgtgacaaaagcgtgacttattacttttttgttttacaaaaacctcttatagtgacaatttaagcaaaaaaaaaagttcgtaataatgtaactccttaaatttaagctgaaaaaaaaaacaagtaacgaaatacacaaagtatattagaaaaagatgcaaaaaccataaccataatcaaagtcaataaaataatgttcaaaaatg

SEQ ID NO: 27753 - protein, 480 aa, DROSOPHILA; identical to SEQ ID NO: 12096

SEQ ID NO: 27754 - DNA, 9857 bp, DROSOPHILA
tgtttgtatagtaaatgcacatctcccaacagacaagttgatggcgcacctttcccattacataatttgcaccattgccagtcacaatagcaacttcagaccaacttgcaacttgtgactttgtgcgatgctattatttaatttgcatctaggtgtatcgatggcaatttggtcaaaaactttgacaaaatcgctcagaggtaatcacgattactattcgaataaatatttcggccgtggtcgcgcaattgatgcatccacaaatcgagaaataccaacaaattacaaaaattaagatgatttgagaacgaaaagggcctttcataagcatcatattgctttagcataagatttcctatttaatatataaattaatcatttgattaatacataaagatttgattgattacgtgacttaatttcttgcagacaaaaaaaggatttcataaagttatttttgtgtggttattattatcttaaactacatatttaagaactacaaacctttaaatatgaatttcacttttagtattgtattgtatcattccccaccaggcaggctgcagttacatttcatttcggtcaatccaccagagccggcatcatctgcagtgtagtagatcagcgggtcaacgtcccgtgggctcgctcagtttaagctacaatgcagtgcaaagaaaacgtgtttgctgcctccatgaacctataatacttttggcatgtgtgaccacttctccccctagtccacaattttgttcaagctagggtttagtcagcaagacaaaagcaatcagtgaattaatcaagagacgtgggttcggcgggcaaactttcagcgatttccgagctcttacgtcaatatactatagctgtcatagattaatatagctgtaagctcaaaagtcgcatatcctgaccaaggtttaaaaacattgatcgcatccatccccctatatatcaatgttttttacgaaaaagtgactgacttgttgtacactcttttgtttatttaataattatgagtagtaacgataatcgttagctattatataatacgttatgtttaatgtgatgctctctggttacattgcattgcgttctttatgagttgtcctaagttaattgtataagttataaactcttatctttctcttaattttttattcagttggttagacatagcgaatgttgcacaagtttaccatatatgtaaagtcccacctacaagtaacgcttataatgtttacacctcggcatacgtttgttacaattttatagctaataaaatttagatttatattattttagagcaaaaaaaaactcacaaaaaatagtaggaattagggttttacgagtagttaaagatatttatatatgcaaagtctaaagtcctttcctggtggaaagcactcttaactatacatgcgatgactagatggtttatatttgggtagacgggaccatggggttcctattgcttctgtctccgttagcaacacctttcaggtacttggaaaacattttttttgtggggcaaaaggaaccctaagttatagacgggtagtcagtcaggagagctacgatgcccagaaaacatggcacgtcaatcgcttaatccaggcgaaatcatgccttctatgggctccagctattgttccataataatcgtgtcttcggactttacgttgccggaattaatggcctccatagccttgcttagcagagtggcatcctttaagctgaccacctggaccagctgcggctcttggccaggacctccttggatcatcatctggtgcattccaggcgacatggtgatggtctccagctggtcgccattctccacctttcaggagataaaaaaatggtcagctagttagtacaagagcaaatttatagcatttctttacagatcaaggggtcctcgaaaattctccagttttcctatctggttaaaagaaaagaacataaagtataaaattataagataaaatgtataatagcaaaatatacttacataaactcaatataaaatgaggacaagcaaaaaatgtatattctgagaccaacaataattaaaaataaaaattaatttgaagttaaattgttggctttatttagcatttcagtttacaaaatgtacaagcaaatattttaaggtaaaattatattaaaatcacaacaatcgcttttttttaaataaaatttgttgctttttcattctccctcttttgcaattgacttggcttgattaaattaaaatttgggctaaaacaattcaaattgcgataatgcgatatgaaaatcaaacatgtaaacacaataataacggtaaaatcaatattgatttcattgaaacacaagaacaataaagaaaatagtaatagatcaacataaaataaaatttggatccactttcaggagaatatattaaatatccctccacatatatagcacatttatatctcgtaaactcatttctccgcgtttgtgcattttttatgcgaatgactacattaaaagattacatggtggctaaaaaagtggtatggagcgagaactcacggggttacaggtacgtctaactgtaggctggctgatccctgttttttttaatacctacaggctaaaactatcgtaattgtacaacttaaatttgttaatatttggtttgattcgcgctcttagtaagtttacgtgcataaatatatgtactccacactttaacaactaaacaaatggctaaaactatattatgttttgtagttctggaaactaggaacaactttagtttttaatttagaattgatttttggtttaaattttcaaaaaaatttttggttttctattcccggcactaaattcaatttgtatagttagtaactgagggatttcctttggctataactatttagattttttggcattcacaatgtgcgcgtctaagtttaaatggcaagtgcattttttcattttttttatttttctatttgaggaaagccgtaattgactagattcgagataatatgaattattaaatgggaaactctaccccaagtgctccagtttaatggccggcagttgaagctgcacgttggttaaactggcactgtccacacaacggatggaagaggaagtaccggaggagtgggcattttcattagcatttagctgggatttgcttcttgaagaggaattgggtctcccacgcttctgaaccattacatcatctcccccactaaccccggtggaccttttcccggtggatctcttgttggccacctgcggaatgctgggagtggccaagactatgggcatctttacactattattgttatttgctagggtgcaattattgttgttgttgagccctaaactgctggaggtggttgtggctagatagtaacgttcgccaggagtgacctgatgcccaatcaccccaccactgcgccggcttaggactgacgatcccgctgagatcagcgaatagcactgaacgccgccatttcccaaagaggatgaggaactggcggcggtactggtggagcgattgatacttgtatctacctgcatcggcgcgaggcacactgttccatcgctgttcgtctggatctgctgcacgttggccattaccgactggtacatagagacgggaactgagatcacattgctcaccgaaacgggatatcctaaaaaatgcgagttcggtaagtgcgtatagcaacgataaaggtgtcgtgcactcgaagtacacaacgacaataaataccttggccatcctccgttgtaatatatatttgcccatcctgtgtctcggtgagatctacggtcatgttctcatgaccatttacatcagtgagactctgaacggtttgaatggtagcaccgccttcaccttggtggagctgaaaaagaagttgcaagtaaggactcgaatgcgtttgtagtaatcgctaaatgtacttaccgtggcaacaccttgaacctgggcagttgtaccatccggcagtgtgataattggattatttgggtctacctggattagcgatacggtaccatcggcgttctgtgagaggaccgtttgcgtggtgtactgtgtattaaagttaattacagtagttattaacttattaaaggttcatatgtctaagccaaaacgccgtaattgagtttaagtataaaaaaaaactactgaaaggcaattttagcaagcagtactaataactcttaaaataaaaatgtttgattctgtgtttttagagtgacggaagtcgtatttacatgtgggtgtgttttttcagtttgtggcggatgcaaataatgatggaaataaccaataactcgataacaatcagctgcaacagaacacaagcagacgaaacaaaaaatcaggtaatattaggttgacttaaataaaataagaggaaaatcgggaccaacaaaattaagcattaacgaagagtaatatcaataaaaacgcaatactgagccaaacatcaatcagttaatgcaagtttcaggaaaagggagtggggcttgtaaggtatgcacaaaagtttcaaatctgctattatgtagatacataaaaacccttagtttcaatttagttagaattggcttggttaatttaaaacgttgtatctgtatgcaattaaaataagattactaatttttttataatctgcgttacgtcaattcgtctaatgaaacctaatctcaacatactttgtcatagaaaccatttaaccattacagtaagcgtttaaagctacatagatatttaaataaaaggtatcttgctatcctaatgtgcatagtctgacaaatcccgaccctagtcccggctcggttgggaagcacaacagcaatttaaagggcatttcatccggattagtacgaacatcaacatcgctgagcgtaattggctcgatgcagacttgagcattggcgatctgctgggcagtgaccgtctggttagcactcgactgggagtgagcctgggactgcgaatgcgcgtgagcctgtgccgcacttacggcggcggctgtcgtctgaaccgctgtggcggtcgccgttccactggcagtggtcaactggattgtttgcggctgtcctccggccactggctgaatatgaacagcgttgggcaagtgcgtctggtggtgctgatggtgctgctgattctgagccggcgcctggcaaatctcaatctttgtagaggcgggcagcgtagccgtcgtggtcacatgctggttattggtactctggatgattgtcggagcaggagtgttgctttgggccgtgtgggtggtgatcactgttccagcactattgattttcacaacattcacctgctgcggttgctgtgatgatgattcgatgtggattggttgatggattagtaatacgatatatgccggttgcggataaataatggacatgacttatcacaggggagtcgcattcgactactgcaaattatgttcgtgtaaaatagggtagcctaaccatttaacatttatttaaaacccaaaaatgtgaaaacactttaggttaaataaaagtgttttttttttttgtatttaacccaacacggttatatccgagaacataaataaaagctgaaaccataaccttttaatggaacctgtgctatacttacattgctgttgcccgtcggcggcgtcattgtcgtcaccgtgtggatggtaggaggatttgaaagctccatgtcctcgtcttcgtcgcccgattgcgaaatcaacgcgttaaccttatcctcgtcatcggcaaaggtgggcagcagatcctcccttccatggtacttgtagcagttgatcacaatcttgcgtagagcatgtgtccagctgatctgaagagggagactcatacagttaataggattcaaaggagatcgggggcggctgttggaacacccaccccacccaccttctgtttgtcatcctctgaacgggcatccatcctcacattggcccagggtagctcctttggccaccagggcggtctggtagactccctgccccatcctggcttccctcgtcccgtagaatacttgagcatcagcggaataaaggctcttagctgcgcttgggtcatcttttctacgggagtgggaataccatcgattaccaagccaggaagttcgaagagcgatggatcatcttggggcggagggggagcttgctgggccagtgcattgtccagttcatccattacaatgttttttaggttgcgcaacacatcttccaggggtttggctccaaaaaccttatagcttgtgttgggtttacccggtgttgccaccaaaactaccgcttgtttgcccactctgcccgtaaactcatagataatagctctcagcttgcgcaacaatcgattttgttgcctttttctaaccgagggattcgtttcgaaacaatggggtctctttcgctttttagaactcgctattgctgccgctgctgccacgcctactggtcctgcggccgctagttggtgggccacatcatcattcactggcatggaacccagatctccctcgtataaactgccatcactgctgattagatcctcgtcgtcatcgtcggagcccaagctctggatatcctcttccagcatttcgatcttgtaggtggttccgttgctctgggaagtgttgccggcactttgcagctggccgccgctggttgctgttattgtagtcacgttgaggccgcttcccaaagtgctgctcccggcagaagttcctcctgtacctccgttagccccattcgaggagtgactacccgaggaggtggtggtgacaaccacatttccagtcgaactcctttggctgcccgccggcgccacgactagccgatagcttgtggtggccagtttggcggtggggattcccttttgaacctttctgcttccgatcctcttctttcctcaagccttactcactggattgagaacggtcttactcgcatgcacagtgtgataaaactgttcggaaaaacaaagccgggaatgtcttaagagagtgttaaggtatttaatacggtaaattatgcaaggcatacagcgaaaagaacggtgtggtcgaaatgtaaaattactcagtatgcacctatttttcaaacccaagaccatagtagctttcacagggttgattagaatacagatcaacaatgtttatacatgttactcatagattaaaaagaggtatacaacacaacaatttgtccacgctcgttcgttgtttgtttgcttaatagtgaagaagcagaagtagcagagctgcgcaacaccccaaatcagaataattcgacaacaaacgcagcggcaacaatacatgtccgtttgggcgtataaacgtcaatatctcacgaactataaaagctagaaggttgagattcagcatatagattctggacacaaagacgcagcgcaagttgaccaatgttgccacgcccaaaagtgggttgatattttttcacatttttattagtcttataaatttctatccatttgttaaaaaagctttttgccacacccactctgacgccctaaaaccgcccaaaactgcaacgatcacatttttgaaaaattgttagatatttttttataattttattagttgtataaatttgtatcgatttggaaaaactttttgccacgccctaaagccgccgaaccggtcacgctcacaccttcgagcaatttttaaattttttcgttcgcattcgcattaactgagtaacgggtatctgatagtcggggaactcgactatagcattttctcttgttttttcgtatgtttaagtacctaagtactatcctaagatcgtattggttttgtttgaaagttaagaaacggcgggacttgggtacttgtactatttgcaaataaatataaagatacactaagcataaggtctatatgacacaggcaggccaccctaagaaattggaaacaatcaggacgattttgactcggactcttatttcttctatggtagctttgtttataatttctaatattggtattctggaattgtattttctatacaaaatttctatttatttgaatatcccttcttctttaatattacttttttattcattgttaccagtcactaatcttgttctttaattttttcattctcccagtttttaggtgtatttttcactgcgcagaatccccaagcatatgctcccgctcaggtttgtaatctaaatcttctatctcttcaagtatatcgttctcgttcgcttttttggggaccgttgcacgtgcgcactgttatagagctcgaaaattggttgctgcttgggttgaacagtaaccataaaaaatgttcgtttatttttttgcttgcctcaggtattttagattgatgtgttgttgagggcaatgcaatcgggaatttgttttggttgatttggcaactattttttaggtagtttctctagttaattttctgttcaattttggttatttttatatcctaagtcaactcttaacttttggcacacactttttgtagtacaaaaaataaaatgagtaatttttggaacgagataagggccgctaacgaaccgcacaacactgcttttagtcgctctctgtgctcaagttctatttgcgtttgctcagaaactcaaaatccaacgacggcaacgcggcggcagaaagagagggtgctagctgatagcaagagaaggcactatctggcagaaaagagaaagaacgacaaaccaccccatggagtgattccgacgtcgacgcagtaaaaaatcaatacggcgcccatgcgtcaatattgctgcttgaaatgggtatatggaattctcgccgtctttctctgtccaggggctttattaaaaataccactttatttatgtgttatgaatgttattacttgaatgttcttataacttcggttaaacgtgcactactgtgtctccattaaagctcccttactttaaaccagaagagctcagatatatgagctgttatcaacacccctaataggaatgtataaggagagattcgggctccgaaaaaaccaaccccttaaatcccacacctttcaccgcactgaatacacacgcaaactcgcccagctcgaggtgcacctcacgatgaaactatcttatgcagtgtttttatttattttccttggatcttttttaaactaccacgcatgcactactcgaactacccaatcacccccgcgaaacaatgcagtgggaacaccaccaactcccacgtccttataggggatgtgagcacgacccacttgcgcgtgccacacatatatcgagaaaagtggcccagcaaaagtgagcacacttctaaaccttgattgtaatcaaaataggcatctgatgatgagagaaaggggaaaagagtagagagagtatatgttcaccccctaagacacatacatatatacattcttatccggattctgaaaaaggtgggtgatgaaattgtgtgaaggaacctaaagtattgccaaattaaaaagctctgcgtttgttggatgtagtcttcaggttttctttctaattatagaagtaggccattttagagtcctttaagatttaaggcctacacagtgatgcccacaggttgcagtaagcgcaactaaactttgtgtcggaagttagcaacactgtaaagaaggcatttgcgatgtatactattcttgatcagtgtcaacaccacaggcgacaaagccacgtccgtctatacgtgtctacgaaaattattctcttagttttaatgttatatgcttgcaccttttccaagagtattctttgtcttgcacatggtatattattcg

SEQ ID NO: 27755 - DNA, 4810 bp, DROSOPHILA
gaattccatatacccatttcaagcagcaatattgacgcatgggcgccgtattgattttttactgcgtcgacgtcggaatcactccatggggtggtttgtcgttctttctcttttctgccagatagtgccttctcttgctatcagctagcaccctctctttctgccgccgcgttgccgtcgttggattttgagtttctgagcaaacgcaaatagaacttgagcacagagagcgactaaaagcagtgttgtgcggttcgttagcggcccttatctcgttccaaaaattactcattttattttttgtactacaaaaagtgtgtgccaaaagttaagagttgacttaggatataaaaataaccaaaattgaacagaaaattaactagagaaactacctaaaaaatagttgccaaatcaaccaaaacaaattcccgattgcattgccctcaacaacacatcaatctaaaatacctgaggcaagcaaaaaaataaacgaacattttttatggttactgttcaacccaagcagcaaccaattttcgagctctataacagtgcgcacgtgcaacggtccccaaaaaagcgaacgagaacgatatacttgaagagatagaagatttagattacaaacctgagcgggagcatatgcttggggattctgcgcagtgaaaaatacacctaaaaactgggagaatgaaaaaattaaagaacaagattagtgactggtaacaatgaataaaaaagtaatattaaagaagaagggatattcaaataaatagaaattttgtatagaaaatacaattccagaataccaatattagaaattataaacaaagctaccatagaagaaataagagtccgagtcaaaatcgtcctgattgtttccaatttcttagggtggcctgcctgtgtcatatagaccttatgcttagtgtatctttatatttatttgcaaatagtacaagtacccaagtcccgccgtttcttaactttcaaacaaaaccaatacgatcttaggatagtacttaggtacttaaacatacgaaaaaacaagagaaaatgctatagtcgagttccccgactatcagatacccgttactcagttaatgcgaatgcgaacgaaaaaatttaaaaattgctcgaaggtgtgagcgtgaccggttcggcggctttagggcgtggcaaaaagtttttccaaatcgatacaaatttatacaactaataaaattataaaaaaatatctaacaatttttcaaaaatgtgatcgttgcagttttgggcggttttagggcgtcagagtgggtgtggcaaaaagcttttttaacaaatggatagaaatttataagactaataaaaatgtgaaaaaatatcaacccacttttgggcgtggcaacattggtcaacttgcgctgcgtctttgtgtccagaatctatatgctgaatctcaaccttctagcttttatagttcgtgagatattgacgtttatacgcccaaacggacatgtattgttgccgctgcgtttgttgtcgaattattctgatttggggtgttgcgcagctctgctacttctgcttcttcactattaagcaaacaaacaacgaacgagcgtggacaaattgttgtgttgtatacctctttttaatctatgagtaacatgtataaacattgttgatctgtattctaatcaaccctgtgaaagctactatggtcttgggtttgaaaaataggtgcatactgagtaattttacatttcgaccacaccgttcttttcgctgtatgccttgcataatttaccgtattaaataccttaacactctcttaagacattcccggctttgtttttccgaacagttttatcacactgtgcatgcgagtaagaccgttctcaatccagtgagtaaggcttgaggaaagaagaggatcggaagcagaaaggttcaaaagggaatccccaccgccaaactggccaccacaagctatcggctagtcgtggcgccggcgggcagccaaaggagttcgactggaaatgtggttgtcaccaccacctcctcgggtagtcactcctcgaatggggctaacggaggtacaggaggaacttctgccgggagcagcactttgggaagcggcctcaacgtgactacaataacagcaaccagcggcggccagctgcaaagtgccggcaacacttcccagagcaacggaaccacctacaagatcgaaatgctggaagaggatatccagagcttgggctccgacgatgacgacgaggatctaatcagcagtgatggcagtttatacgagggagatctgggttccatgccagtgaatgatgatgtggcccaccaactagcggccgcaggaccagtaggcgtggcagcagcggcagcaatagcgagttctaaaaagcgaaagagaccccattgtttcgaaacgaatccctcggttagaaaaaggcaacaaaatcgattgttgcgcaagctgagagctattatctatgagtttacgggcagagtgggcaaacaagcggtagttttggtggcaacaccgggtaaacccaacacaagctataaggtttttggagccaaacccctggaagatgtgttgcgcaacctaaaaaacattgtaatggatgaactggacaatgcactggcccagcaagctccccctccgccccaagatgatccatcgctcttcgaacttcctggcttggtaatcgatggtattcccactcccgtagaaaagatgacccaagcgcagctaagagcctttattccgctgatgctcaagtattctacgggacgagggaagccaggatggggcagggagtctaccagaccgccctggtggccaaaggagctaccctgggccaatgtgaggatggatgcccgttcagaggatgacaaacagaagatcagctggacacatgctctacgcaagattgtgatcaactgctacaagtaccatggaagggaggatctgctgcccacctttgccgatgacgaggataaggttaacgcgttgatttcgcaatcgggcgacgaagacgaggacatggagctttcaaatcctcctaccatccacacggtgacgacaatgacgccgccgacgggcaacagcaatcaaccgcagcaggtgaatgttgtgaaaatcaatagtgctggaacagtgatcaccacccacacggcccaaagcaacactcctgctccgacaatcatccagagtaccaataaccagcatgtgaccacgacggctacgctgcccgcctctacaaagattgagatttgccaggcgccggctcagaatcagcagcaccatcagcaccaccagacgcacttgcccaacgctgttcatattcagccagtggccggaggacagccgcaaacaatccagttgaccactgccagtggaacggcgaccgccacagcggttcagacgacagccgccgccgtaagtgcggcacaggctcacgcgcattcgcagtcccaggctcactcccagtcgagtgctaaccagacggtcactgcccagcagatcgccaatgctcaagtctgcatcgagccaattacgctcagcgatgttgattacaccacgcaaacggtcctctcacagaacgccgatggtaccgtatcgctaatccaggtagacccaaataatccaattatcacactgccggatggtacaactgcccaggttcaaggtgttgccacgctccaccaaggtgaaggcggtgctaccattcaaaccgttcagagtctcactgatgtaaatggtcatgagaacatgaccgtagatctcaccgagacacaggatgggcaaatatatattacaacggaggatggccaaggatatcccgtttcggtgagcaatgtgatctcagttcccgtctctatgtaccagtcggtaatggccaacgtgcagcagatccagacgaacagcgatggaacagtgtgcctcgcgccgatgcaggtggagaatggcgaccagctggagaccatcaccatgtcgcctggaatgcaccagatgatgatccaaggaggtcctggccaagagccgcagctggtccaggtggtcagcttaaaggatgccactctgctaagcaaggctatggaggccattaattccggcaacgtaaagtccgaagacacgattattatggaacaatagctggagcccatagaaggcatgatttcgcctggattaagcgattgacgtgccatgttttctgggcatcgtagctctcctgactgactacccgtctataacttagggttccttttgccccacaaaaaaaatgttttccaagtacctgaaaggtgttgctaacggagacagaagcaataggaaccccatggtcccgtctacccaaatataaaccatctagtcatcgcatgtatagttaagagtgctttccaccaggaaaggactttagactttgcatatataaatatctttaactactcgtaaaaccctaattcctactattttttgtgagtttttttttgctctaaaataatataaatctaaattttattagctataaaattgtaacaaacgtatgccgaggtgtaaacattataagcgttacttgtaggtgggactttacatatatggtaaacttgtgcaacattcgctatgtctaaccaactgaataaaaaattaagagaaagataagagtttataacttatacaattaacttaggacaactcataaagaacgcaatgcaatgtaaccagagagcatcacattaaacataacgtattatataatagctaacgattatcgttactactcataattattaaataaacaaa

SEQ ID NO: 27756 - protein, 647 aa, DROSOPHILA
MLEEDIQSLGSDDDDEDLISSDGSLYEGDLGSMPVNDDVAHQLAAAGPVGVAAAAAIASSKKRKRPHCFETNPSVRKRQQNRLLRKLRAIIYEFTGRVGKQAVVLVATPGKPNTSYKVFGAKPLEDVLRNLKNIVMDELDNALAQQAPPPPQDDPSLFELPGLVIDGIPTPVEKMTQAQLRAFIPLMLKYSTGRGKPGWGRESTRPPWWPKELPWANVRMDARSEDDKQKISWTHALRKIVINCYKYHGREDLLPTFADDEDKVNALISQSGDEDEDMELSNPPTIHTVTTMTPPTGNSNQPQQVNVVKINSAGTVITTHTAQSNTPAPTIIQSTNNQHVTTTATLPASTKIEICQAPAQNQQHHQHHQTHLPNAVHIQPVAGGQPQTIQLTTASGTATATAVQTTAAAVSAAQAHAHSQSQAHSQSSANQTVTAQQIANAQVCIEPITLSDVDYTTQTVLSQNADGTVSLIQVDPNNPIITLPDGTTAQVQGVATLHQGEGGATIQTVQSLTDVNGHENMTVDLTETQDGQIYITTEDGQGYPVSVSNVISVPVSMYQSVMANVQQIQTNSDGTVCLAPMQVENGDQLETITMSPGMHQMMIQGGPGQEPQLVQVVSLKDATLLSKAMEAINSGNVKSEDTIIMEQ

SEQ ID NO: 27757 - DNA, 14487 bp, DROSOPHILA
ccagacctggaacttgaggttcttgtaggtgacctgctccacgttgaagccgatggtgggtatcgtggtgaccacctcgcccacctgcagtctgtagaggatcgtggtcttgccggcgccgtccaggcccaggatcaagatgcgcatctcccgggagccgagcagtccgcgaaagtagctgagcaccccacctggaagaagaacgtatgatttttatgaccagacttcgtcaccgggtgtcgccggaacggggaggttccccacgtccatgctccgtgctgtacaaacccatgattacggctgaactttgtctagtgctggcgctgcctctaaatgcttaagtttagtaaacctagttaattgtatgtggtgctacaattaatacaaaatcgcagaagtcttgttttcacttttttttgggctggagaatggtttcgtttttgccattcgcaggtcacgcgaacatgacgtgtcacagcgtgcgttcagcacgaatatatttttgtaaaaaataacattttaataactttaaaaaaacgtttaatatcattaattaaatttaaataaataccattttaaggagtgcatacagattaattataaaaatattcacagtgacttgtgctgaacgcgcccacctttattgccggttcacagagttgccacccttgcgtgacttttgttatagagacggccgccattagagttttgccgtcgcgtcgcgttgtgaaaagagaagaaaaccttctgaaaacagtgctaataggtaatactttcggtgccaaatggagcaatccgattgcgttcttcgcgtgcgattagcgtgcagttgatttcggccgatttggcgtatctttagccgttattttgggtttgcaccgggctgcgcgaaaaagtgtgccaaaagaggcacacaaaacggtagctacgattacatatcgtggctatagcttctttaatgttggtaaatacagtgcattgacgtgtgttccatctgcagattaggctgcaccagttgctggatatcgctattggataaagtcaagaaaggagctgcaatatggcctcgccctctccggcgaacagtcccatgccaccgccacaggcgcccagtccgatggccccgccctcgcagagtcccgccccctcgccgcacagcccgtatccgcaccagcagccgggtccactgcaaggacctccgccacccggacatcccggtgcctacggacatcccatgcagcacggaccacccggccagggtccacccgggcatcatatgccaccgcaccaccaggggatgagtatgttcttaaacaacccaacaccaatcgctccagtcacacgtaattatccgtagttttctcaaaaggtccgcacatgggaatgcagatgccgccgacgggaccgaacatgtccccctaccaaacccacggaatgccacccaatgtaagtgacccccaagtctagccgtaggaatcaaaatagtaagcctacttagatgtctcagttctcaaatcaaatctatgccatctggacaaacagtagctcagtgcaaacattgaaaatatttccatcgatactttcaaaatttttataatcagtaattagcaagtttttaaaatacttaatacgtttgtaaaagatcctataaaatctacatagtattctaaacggtagattaaggatttctttaaatttctttatttactttactctatatacagatatgggtacataaatatctaaattccatgttagactaacatttttctgagggatgctatatgaaaaaggtataaacaatacgaaattcgtgaaactttgtgaataagtatagaaatactaaatttccaagtaggtaatctgtatattaagttgtttgccagctaaatgcttaaaattatggtatcatacggtgttgtttttcaaagtctcaagattgacgggctttcccgcctttttgacgtgtatcgtggaacagctgccggcgattaaagctggaatatatccgaaagctccccattagcagagcttcgagcgccaattggcagtgcagctgaccccaagcttttcaattaagatcgttgttgccttgcctaaattacttctgcaccggcttccctcccacggactcctcctggtctcccttacgcagaaggtcttcgatctccttgcgcaacttctctgtgccggcgcagattagatccggcttcattatgtcgaatggtccgccaaagggatgtgttaccacgcctcccgcctccttaaccaacagggagccggcggcacaatcccagggatacatgtcctcaatgtagaaggcatccagattgccagcggccaccatgcacagctcatccaccacacaggagtaggcaacaagtctgtggatttatgcaatattttgtaaggggtaatttctttttaaaaagctttaaaatctttttaattatcttcgagaacaaaaggcaattaaagcttttcatttagcagtgactggttaattgcttagtactcagatacttttgttttgttaatttcacagatttttacccactatatcaacgggatttagttttgcgaaatagattcaaatttataaatgatttacttaccgtctagcattcaatcccacatggtagatccttttgatatgcttgttggccaccgaatggacatgcagcagggacacttcgtaggccacattggcatccttaacgctctcgcagctgctcacgtggattggtttgccattgcaaaaggcgccttggcccagtttcgttgtgaagagctttttctggacaggattgttgattactcccactacgatttgtttgttgattgccaaaccgattgaaacgcaaacgtgtggaatctgcttgataaagttcgaagttccatcgatgggatctatgatccaggtgggagcattcgtcagctctccggacacgttgttgttcttagccgtctcctcctcgccgatgaacttgtgatccgggtatctggccaatattttctccatgagaaagtcctcaatcttgttgtcgtagtcggtgaccacgtcgtagaaatcgcctttgattgagacgtttttactggccatctcgtagccctccatgaggatctcgcccgctttgatggccaggggatggataaagttgtacaactcctcgatatcagcttgacttactcctgccatcttgcttctatgcgtattcctttgggcaaaaaacgatccgtcgctgctcagctcgcgatgtcaactaatcggagagattgcaccccactgggagaagctccacgctccggctgattttgtctagctggcgctggcgctggagaagtgcttgcggttcggttacaattcactcgttctatgattgtttgcctgcctcgcgtttttatgatcgctgcgacatcgccccataggggtgtactaaaaattggcagctcacctggctgcgtgcctctgttttatctcaattggtttgatgtacacaaatagacatactcttttttatctccacacagacagccagtcaaatagttgtaaaacccgtttttatcagcatttttcgacgctctcagactttattattggatgatttacacactcgagctgcaagtcataatactcagagaaaccttgcagatattatgttaaaattgatcgtaactgtattataaagatcaatcacttgtcttataatctttaaactttgcttttatgcttatcattaaacatattcgtattgtttcatacatccatcatttccaatctattgaatatagttgtttagacttcatgaatatatattaagctttatgatttatttaaaagtatagccgctaatttggtcggctccttctatcaattggattacacttttggccaattcttcagagctggtgcacacacagtcgggtttcatcacatcgaatcttgcaccgcttgtgtgatataccctgccaccggcttccctgaggattaccgcaccgccagccagatcccagggctttagattctccacatgataggcgtcacatctgccggcggctatatagcagagcgtgagagctgcgcatccaaagctgcgggtgctgatagcggaatgcagtgtagatgatggggaatagatcagagttctctgggtcactcacccagtggcactcgaggccagcttgtagagacgcttcacgttcttgtcccgccccttagacaccacgattagggagatctcatagcacaccaatgcttggtttatctgcaaatgttaccgaaaatgcttgtgtcacttacgcttgcgaacttcgtagcagataaagtactagaaaaaatatattgggttatatgtgattttaaagtcttagaaagaaaccaacttttaaactgagtttcattttttcaagtgatattttagctaaattacttaagacctttaaagtatagtacacatccagcttgttctttatggccactgagtgagtcttatcagcttcaaatctctaagataagccattatttcatcactttcgcgaaacctaccttcttagcgttggaaacctcaatgggttgtccatttaaataagctccgtggccttgccaagctgaatacaactcatttgcagatggattgtacacaatccccagcaccagctctttgtttatggccaagcccacggaaatacagcaatgggggatctttcgaacgtagttgttggtgccatcaatgggatctatgatccaagtgggggcatccgtcaactcaggcggcgttttggcgttggccatagcttcttcgcctattattttggattccggaaaggtctttagcaaaccatctgttagagtggcttctatttgcttgtcgtacacggtgaccaagtcatagaacgctgacttgacttcgtaatcggttttcggtttctggaaaccctccaaaaagagcggaccgcacttcctgaccagttccagggatacctggtaatatacttcaagtttttcctcgccgattcggtaactcatggctcgtctatcgactgatcagagtagaaactaatacttaatttagaaacacagctgacattatggtaaagctttcttcgcaagctcctgaaagttctgcgatacttatatgtacttaggtcgttttattgtactggaatatctgcgcgattagaatagtttacaagtgataaatgtggatactgtctttgcatactgagcctttaactgtctttacttaaatgtgtactctgtaatctgaccggcctcttcgataagactaatcacattcttggccaactccggcgtggcggcgcacacgcaatccggtttcatcacatcgaatttggatccgctggtatggcacacagtgccgccagcttcggtcagaatgatggctccggcagcaatgtcccacggtttcagatcctccacatgataggcatcgcactggcccgtggccacgtagcacagggtcagggcggcacttccgaaacacctggttcccgtggcattcgaggccatcttgtacagtcgcttcacattcttgtccctcactccggcggcgtggatcagggagatctcgtaggcaatcactgcttgcttgatctggaaaggggtacattagttgtgagagtaattgtatatgcgcttaattttggagagctatttttgtttggtggtatacgaatgaatgatatcggtgcaccgaaaaaaatgttagcagattgtatttttccattccaaaaagttgttataacaattgtatgggaattttgttataaagcggttataataaattattttatcacatttatcaaatttctcaaacattcctatcgaaatgcaaatttaagtttagccaaccttttttttttttttttgctgtgcaccgataaacctgtttgcaggaataatgtcatgcacggttatttgtcaaatttcgtttatctggtttgtcgctatacatagtattgttgctcccgggttatataagcacactcttaccgtcgtcactttggatgtgtggatgggttcgccattcagataggctccgtgtcccttgtaggcggagaatagttcattcgccggtggattgtagataatgcccacgaccagctccttgttgatggccaggcccacggagatgcagcagtgcgggatgcggtgaatgaagtttgtggtgccgtcgatgggatctatgatccacgtgggtgcatcagtcagctccgcctggcgctgtgaaactgccgactcctcctcgccaatgatcagggattcgggaaaggcggccaccaatccctcggtcaaaatatcctcgatttgcttatcgtacacggtcaccaggtcgtagaagtccgccttgaccttgtattccgtctttgccttctgatagccctcctgcatcagaggcccgcacttgaggaccagtttcagggccacatcgtagtactccttgagcttggactcgctgaccgcggaactcattgctatttctgttggtttccgactgagcagcagaactatatagacgcgagtcagctgtggaatgttggcgacgccagaggaaagctttctgccgaagctttcattgatgcaatagaactttggacatttaggagagcgcgatagagttgcttacgaaccgttgttccaagtttatggatgtgatattactacactagtcagccaagaatcagaaaatactattattgttaacatttaaaaatccatgaatgcataggaaattctttttactatttaagataattttattattttaataaaattgagtataaattggtatagaatttaaagaaaaccatttttatcttcatagcctgtagtatattttctgatatacgaatttaatactacataactgcaataggatataggatatatcccaatctatcttctactattacctatcatacataggatatattttcataatacattgcgtattttaaagatgtaaaggtgtgtttccttgaagttgtatgatggttattagagactatcttgtgtgttataaattcacaattcgtgagtggatgaactgagctgatatgagcagttcatgtgcagaggaaaaagacaaaagagacatcgtttaaataagattctgttttatgttgatcattaaacttttatttgttgacaaaagctctttgcgtgtggcttacaaatctcactctcctcccacatgcttctcctgatcagccttccgaataagatgctctatctcagctctcagtgtctccgttccggcgcagattagatctggcttcatgatatcgaagggtccgccgtagggatgcgtgacaactccgccggcctcacggatgagcaaatagccagctgcacaatcccagggatacatgtcttcaatatgaaaggcatccaagttgcctgcggccaccatgcaaagggaatccactacagcggaatatgccaggagtctgaaaaggattcaaaactttaatagttgtataattaataggctaccaccacctgaccttctggcattggatcccacatggtagattcttttgatgtgcttgttccggatctttggagcgtgcagcaagcaaacctcgtatgccacattagcatcgttgagatgttcacagctgctcacctgaattggtttcccattgcaaaaggcaccctggcccaatttcgcggtatataacttattctgtgcgggattgttaactacacccagcacgatctgtttcttaatggacaatccaattgaaaccgagacatgtggaatttgtttgataaagttcgaggttccatcgatgggatctatgatccaagttggagcatccgtcagctctttcgttacattgtcattcttgtgggtatcctcttccccaatgaatttgtgatccgggtagcgcgccagtattttctccacgagaaactcctctatctggttatcataggcagtgactacattatagaactccccgtccttgagggccaccgccttgccagcattttgatagccttccaacaggatttccccagctctcactgcgagcggatagataaagtcgtacagctcctcgatctgggacttactggctgccatctcagttacttctccaatttgcttatctacctatctgtgtatcttgcaatgcttttgcgatatattgcacctgttccgacttcgtgtcgagtgaataaagcactgaacaagttttcacagttcagtaactcggttcactgtgtggcattcgctaactgagattctgggcgagtgggagcttttattaatttatttgcacttaagtcagcttttgtgcaaaatggaatttgtagtacgttcattataatatttacaaaattccattccttcttttacaaaattaaaatagttaatttaatttaacattacgttgaatgtaattgatgaagtcgttattaatctaaattcccttctctttcaggcacccacacaaccctgcatagtgtcacctggtggcccacctggaggcccgccacctccggagcgctcgagccaggagaacctgcacgcgcttcaacgcgccattgattcaatggaggaaaagggcttgcaagaggatcctcgctactcgcagctgctggcaatgcgagcaacctcgaagcatcagcaccttaatggcaatcaggttaacttgttgcgcacacagatcaccgcctatcggttgctggcgcggaacaagcccatatccatgcagatgcagcaggcgttgcaggccgcacagcaacagccaccgccaggacctccaattgggccacctggagcaccaggcggaccgccaccagggagccagcatgcaggacaaccgcccgtgccgccgcaacaacagcaacaaccgccaccttcagcaggaactccaccccagtgctccacgccgcccgcaagcaatccttatggaccgccagttcctggccagaaaatgcaggtagcgccaccaccgccacacatgcaacagggacagccattgccaccacaaccgccacaagtgggtggacccccgcctatacaacagcagcaaccacctcagcagcagcaacaacagtcgcagcccccgccaccggagccacatcagcaccagttgccaaacggaggcaaacccctgagtatggggccatctggcgggcaaccactaataccttcatcacccatgcagccacaagtgagagggacactgccaggaatgccgccaggtagtcaggttccgcaaccaggaggaggtcctcagcgacaggtaccacctgcgggcatgccgatgcccaagcccaatcgcattacaacggtggccaaacccgtcggtctggatcccataacattgctgcaggaaagggagaataggatagcagccaggatatcattgcgcatgcaggagttgcagcgactgccggccacgatgtccgaggatctgcgtctgcaagcggctatcgagttgagggccctaagggtcttgaacttccagcgacagctgcgtatggagtttgttcagtgcacgagacgagataccactttggaaacagcgttaaacattaagctctacaagaggaccaagaggcagggcctgcgggaggcacgtgccaccgagaagctagagaagcaacagaagctagaggctgaacgaaagcgtcgccaaaagcatctggagttcttggctgctgtgcttcagcacggcaaggatctaagggagttccacagaaataataaggcccagcttgcaaggatgaacaaggccgtgatgaatcaccacgccaatgccgagcgtgaacagaagaaggaacaagagcgcatcgaaaaggaacgtatgcgacgtctgatggccgaggatgaggagggttaccgcaagctgattgatcaaaagaaggacaagagattggctttcctactgtcgcagacagatgagtatattagcaacctaactcagatggtgaaacagcacaaggacgaccagatgaagaaaaaggaggaggagggcaagcggctgatacagttcaaaaaggagctgctgatgagcggagagtacattggcattgatgagggcagcattgttgccgatatgcgggtacatgtggtggaacagtgcacgggtaagaaactcaccggcgatgatgcacccatgctgaagcacttgcaccgctggctgaatatgcatcctggctgggattggatcgacgacgaggaggacagctgtgggagcaacgacgatcataaacccaaggtggaggagcaaccaacggcaacagaagatgccaccgacaaagcgcaggcgacgggcaacgatgaggatgccaaggatctaattaccaaggccaaggtggaggacgatgagtacaggacggaggaacagacgtactacagcatcgctcataccattcatgaaaaggttgtggagcaggccagcatcatggttaatggtacgctcaaggaataccagatcaaaggcttggagtggttggtttcgctgtacaataacaatctaaatggtattttggccgatgaaatgggtttgggtaaaaccattcaaaccatttcgctggtaacctaccttatggatcgaaagaaggttatgggtccttacttgattattgtaccactctccaccctgcccaattgggtgctggaattcgagaagtgggcgccagccgtgggtgtagtcagctacaagggcagtccgcagggaaggcgattgctgcaaaatcaaatgagagcaaccaagttcaatgtgctgttaaccacatatgagtacgtgattaaggacaaggcggtgctggccaagatccagtggaaatacatgattatcgacgagggtcaccgcatgaagaaccatcactgcaaactcacccaggtgctgaacacccactacattgccccctatcggttacttctcacgggtacacctctgcaaaacaagcttcccgagttgtgggcgctacttaatttcctgctgccctcgatctttaagtcctgctccacatttgaacagtggttcaatgcgccatttgccaccactggcgagaaggtcgagctaaacgaggaggagaccatccttatcattcgtcgtctgcacaaggttcttcgtcctttcctgttgcgtcgcctcaaaaaggaggtagagcaccagctgcccgacaaggtcgagtacatcatcaagtgcgacatgtccgcgctgcaacgcgttctctacaagcacatgcagagcaagggtgtcctgctcaccgatggttccgagaagggcaagcacggcaagggaggcgctaaggcgctgatgaacacgatcgtacagctgcgcaagctgtgcaaccatccgtttatgttccagcacatagaagagaagtactgcgatcacactggcggccacggagttgtatccggtaagtttatcttgttaattttttggtatatttatatttacattggtataatctaatctttttcaaattaaaggaccggatctgtatcgtgtctctggcaaattcgagctgcttgatcgcatcctgcccaagctgaaggcgaccaatcatcgcgtgctgctcttctgtcagatgacccaatgcatgaccatcatcgaagactacctgggatggcgccaattcggctaccttcgactcgacggtaccacgaaggccgaggatcgtggcgaactactgcgaaaattcaacgccaaaggctcggatgtatttgtctttttgctatctacccgagctggtggtttgggtcttaatctgcagaccgccgatactgtagtaatcttcgactccgattggaatccccatcaggatctgcaagcccaggatcgtgcccatcgtattggtcaacgtaacgaggtgcgcgtcctgcgactaatgacagtcaactcggtggaagagcgcatcttggcagcagccaggtacaagctgaacatggacgagaaggtcatccaggctggtatgttcgatcagaagtcaacgggtagcgagcgacagcagttcctacaaacgattctgcaccaggatgacaacgaagaggaggaggaaaatgaggtgcccgatgacgaaatgatcaacatgatgatcgcccgcagcgaggaggagattgaaatatttaagcgcatggatgctgagcgcaagaaggaggatgaggagatccatccgggtagggaacgtctgatcgatgagtccgagctacccgactggttgacaaaggatgatgacgaagtagagcgtttccactatcagtacgacgaggataccattctaggtgagttacactgctcgctgttatttaaacatttttcttacgataactattccgccttaggtcgaggctcccggcagcgaaaggaagtagactacaccgatagtttgactgaaaaggagtggctgaaagccatcgacgatggcgctgagttcgacgaggaagaggaggaagacgattcgaagcgcaagcgacgaaagcgtaagaatcggaaggaagagtccgacgatgattcgttgatcctaaaacggcgacgacgccaaaatctggacaagcggtccaagaagcagatgcacaagattatgagtgcggttatcaagcacaaccaagatggacgaaccctgtccgaaccgttcatgaagttgccttcgcggcagaggttgcccgactactacgagatcattaagcggccagttgatattaagaaaatcctgcagcgcattgaggactgcaagtatgccgatctcaacgagctggagaaggactttatgcagctatgccagaatgcacagatctacaacgaagaggcgtctctgatttacctggactcgattgccctgcaaaaggtattcgttggggccaggcagaggataacagctgcagcggatgcagccgcagtggcagccggagataacacgggtgaagcgcacggcaatggaggttcggataattcggacaacgacgacgacgatggtggcgatgacggctccgacgacgaggagattgcaaccacttcagcggcggctgtcaaaatgaagctgaaactgaacaaatctctggctagtgcgcccgctacgcccacgcaatcatcgtcgaatgtgagcagcggagcggctaccacatccaagaagcagacgcgtcgcaagcgctcccaaaagaagtacactatttcagacgatgacgacgatgacatggactagctaccgttgggagtgatcttcaagcgcggatcgtcggatgtcgaaggcatgggcaattgattattaattagtttaagttttactttcaaggacgatgcttaccaaaaccctagcctacgggtttttttaaccatctaacctatcatgctatcacttttatctatactaattttctagttgtaggttctcgattaagtttcctattcaattattttcgcacacaccatttatttctcccaattctattgattgtataattatgtgctttaaaataaatgcatacctaacataaagtaaatcgaaaaacttgtcattaatggacggcggattgctccttgagagattgttcaacctagaccaggctggaattagtaacaaagatcttatttaaatcggtacctaaatgaatacatcgctgctagcgtataaaggaaatggttttaaatatatcaaaatgggaaaattatgatgtttcgtttaattaataagttgtattttaggaagtcttacagtaattaaaattagcttcagcatttctacttattacatttataactaagctccttcaaataaatgcatacttaaacatattgatatgcttggtaagactaaagcaggtagtggaagtactcgtcgcacatctcgtggacactagcggtgtgctcctcgtcgccgctatcactgcttcgcaacgtgattttgtgtgcattggcgtacaagtcgtcctcatcaacagccgcatcgtcggtttctattaattgaaattgcaaaagtgatgtggcagaaatgatagtggacgtaacttcgtgacctcacctcggtacttttgtttgcgcctcaaccgttgcttggagcttgagagcactgcttcgtcgcccagatccaattcgttttcgcgggagttccgggagtaacgaattggcggtgccaggaaccagtaggattgcatgatgcctttgagacccggcatttgacgcagttcggccaatttgagcggctgcctggacaatgcttggaaagatcgcagctgcagtgtgactggttgcgaagtgcagttgatcagcctaattacggacttcgcggctgtggagcagaccatgggatatattttgacatccggatccgtcgggacattggtgtaggccactcccagcgatctgcggttcaaatagaactccaagtgcccacgcgttcgatccaaacagacaccaatcaagcagccctgcgagaacttctggccgtagggcagtaactcgccacagtgctgaatccttccggaatacgaaaagccccag

SEQ ID NO: 27758 - DNA, 4969 bp, DROSOPHILA
attaggctgcaccagttgctggatatcgctattggataaagtcaagaaaggagctgcaatatggcctcgccctctccggcgaacagtcccatgccaccgccacaggcgcccagtccgatggccccgccctcgcagagtcccgccccctcgccgcacagcccgtatccgcaccagcagccgggtccactgcaaggacctccgccacccggacatcccggtgcctacggacatcccatgcagcacggaccacccggccagggtccacccgggcatcatatgccaccgcaccaccaggggatgattttctcaaaaggtccgcacatgggaatgcagatgccgccgacgggaccgaacatgtccccctaccaaacccacggaatgccacccaatgcacccacacaaccctgcatagtgtcacctgctggagcaccaggcggaccgccaccagggagccagcatgcaggacaaccgcccgtgccgccgcaacaacagcaacaaccgccaccttcagcaggaactccaccccagtgctccacgccgcccgcaagcaatccttatggaccgccagttcctggccagaaaatgcaggtagcgccaccaccgccacacatgcaacagggacagccattgccaccacaaccgccacaagtgggtggacccccgcctatacaacagcagcaaccacctcagcagcagcaacaacagtcgcagcccccgccaccggagccacatcagcaccagttgccaaacggaggcaaacccctgagtatggggccatctggcgggcaaccactaataccttcatcacccatgcagccacaagtgagagggacactgccaggaatgccgccaggtagtcaggttccgcaaccaggaggaggtcctcagcgacaggtaccacctgcgggcatgccgatgcccaagcccaatcgcattacaacggtggccaaacccgtcggtctggatcccataacattgctgcaggaaagggagaataggatagcagccaggatatcattgcgcatgcaggagttgcagcgactgccggccacgatgtccgaggatctgcgtctgcaagcggctatcgagttgagggccctaagggtcttgaacttccagcgacagctgcgtatggagtttgttcagtgcacgagacgagataccactttggaaacagcgttaaacattaagctctacaagaggaccaagaggcagggcctgcgggaggcacgtgccaccgagaagctagagaagcaacagaagctagaggctgaacgaaagcgtcgccaaaagcatctggagttcttggctgctgtgcttcagcacggcaaggatctaagggagttccacagaaataataaggcccagcttgcaaggatgaacaaggccgtgatgaatcaccacgccaatgccgagcgtgaacagaagaaggaacaagagcgcatcgaaaaggaacgtatgcgacgtctgatggccgaggatgaggagggttaccgcaagctgattgatcaaaagaaggacaagagattggctttcctactgtcgcagacagatgagtatattagcaacctaactcagatggtgaaacagcacaaggacgaccagatgaagaaaaaggaggaggagggcaagcggctgatacagttcaaaaaggagctgctgatgagcggagagtacattggcattgatgagggcagcattgttgccgatatgcgggtacatgtggtggaacagtgcacgggtaagaaactcaccggcgatgatgcacccatgctgaagcacttgcaccgctggctgaatatgcatcctggctgggattggatcgacgacgaggaggacagctgtgggagcaacgacgatcataaacccaaggtggaggagcaaccaacggcaacagaagatgccaccgacaaagcgcaggcgacgggcaacgatgaggatgccaaggatctaattaccaaggccaaggtggaggacgatgagtacaggacggaggaacagacgtactacagcatcgctcataccattcatgaaaaggttgtggagcaggccagcatcatggttaatggtacgctcaaggaataccagatcaaaggcttggagtggttggtttcgctgtacaataacaatctaaatggtattttggccgatgaaatgggtttgggtaaaaccattcaaaccatttcgctggtaacctaccttatggatcgaaagaaggttatgggtccttacttgattattgtaccactctccaccctgcccaattgggtgctggaattcgagaagtgggcgccagccgtgggtgtagtcagctacaagggcagtccgcagggaaggcgattgctgcaaaatcaaatgagagcaaccaagttcaatgtgctgttaaccacatatgagtacgtgattaaggacaaggcggtgctggccaagatccagtggaaatacatgattatcgacgagggtcaccgcatgaagaaccatcactgcaaactcacccaggtgctgaacacccactacattgccccctatcggttacttctcacgggtacacctctgcaaaacaagcttcccgagttgtgggcgctacttaatttcctgctgccctcgatctttaagtcctgctccacatttgaacagtggttcaatgcgccatttgccaccactggcgagaaggtcgagctaaacgaggaggagaccatccttatcattcgtcgtctgcacaaggttcttcgtcctttcctgttgcgtcgcctcaaaaaggaggtagagcaccagctgcccgacaaggtcgagtacatcatcaagtgcgacatgtccgcgctgcaacgcgttctctacaagcacatgcagagcaagggtgtcctgctcaccgatggttccgagaagggcaagcacggcaagggaggcgctaaggcgctgatgaacacgatcgtacagctgcgcaagctgtgcaaccatccgtttatgttccagcacatagaagagaagtactgcgatcacactggcggccacggagttgtatccggaccggatctgtatcgtgtctctggcaaattcgagctgcttgatcgcatcctgcccaagctgaaggcgaccaatcatcgcgtgctgctcttctgtcagatgacccaatgcatgaccatcatcgaagactacctgggatggcgccaattcggctaccttcgactcgacggtaccacgaaggccgaggatcgtggcgaactactgcgaaaattcaacgccaaaggctcggatgtatttgtctttttgctatctacccgagctggtggtttgggtcttaatctgcagaccgccgatactgtagtaatcttcgactccgattggaatccccatcaggatctgcaagcccaggatcgtgcccatcgtattggtcaacgtaacgaggtgcgcgtcctgcgactaatgacagtcaactcggtggaagagcgcatcttggcagcagccaggtacaagctgaacatggacgagaaggtcatccaggctggtatgttcgatcagaagtcaacgggtagcgagcgacagcagttcctacaaacgattctgcaccaggatgacaacgaagaggaggaggaaaatgaggtgcccgatgacgaaatgatcaacatgatgatcgcccgcagcgaggaggagattgaaatatttaagcgcatggatgctgagcgcaagaaggaggatgaggagatccatccgggtagggaacgtctgatcgatgagtccgagctacccgactggttgacaaaggatgatgacgaagtagagcgtttccactatcagtacgacgaggataccattctaggtcgaggctcccggcagcgaaaggaagtagactacaccgatagtttgactgaaaaggagtggctgaaagccatcgacgatggcgctgagttcgacgaggaagaggaggaagacgattcgaagcgcaagcgacgaaagcgtaagaatcggaaggaagagtccgacgatgattcgttgatcctaaaacggcgacgacgccaaaatctggacaagcggtccaagaagcagatgcacaagattatgagtgcggttatcaagcacaaccaagatggacgaaccctgtccgaaccgttcatgaagttgccttcgcggcagaggttgcccgactactacgagatcattaagcggccagttgatattaagaaaatcctgcagcgcattgaggactgcaagtatgccgatctcaacgagctggagaaggactttatgcagctatgccagaatgcacagatctacaacgaagaggcgtctctgatttacctggactcgattgccctgcaaaaggtattcgttggggccaggcagaggataacagctgcagcggatgcagccgcagtggcagccggagataacacgggtgaagcgcacggcaatggaggttcggataattcggacaacgacgacgacgatggtggcgatgacggctccgacgacgaggagattgcaaccacttcagcggcggctgtcaaaatgaagctgaaactgaacaaatctctggctagtgcgcccgctacgcccacgcaatcatcgtcgaatgtgagcagcggagcggctaccacatccaagaagcagacgcgtcgcaagcgctcccaaaagaagtacactatttcagacgatgacgacgatgacatggactagctaccgttgggagtgatcttcaagcgcggatcgtcggatgtcgaaggcatgggcaattgattattaattagtttaagttttactttcaaggacgatgcttaccaaaaccctagcctacgggtttttttaaccatctaacctatcatgctatcacttttatctatactaattttctagttgtaggttctcgattaagtttcctattcaattattttcgcacacaccatttatttctcccaattctattgattgtataattatgtgctttaaaataaatgcatacctaacataaagt

SEQ ID NO: 27759 - protein, 1537 aa, DROSOPHILA
MASPSPANSPMPPPQAPSPMAPPSQSPAPSPHSPYPHQQPGPLQGPPPPGHPGAYGHPMQHGPPGQGPPGHHMPPHHQGMIFSKGPHMGMQMPPTGPNMSPYQTHGMPPNAPTQPCIVSPAGAPGGPPPGSQHAGQPPVPPQQQQQPPPSAGTPPQCSTPPASNPYGPPVPGQKMQVAPPPPHMQQGQPLPPQPPQVGGPPPIQQQQPPQQQQQQSQPPPPEPHQHQLPNGGKPLSMGPSGGQPLIPSSPMQPQVRGTLPGMPPGSQVPQPGGGPQRQVPPAGMPMPKPNRITTVAKPVGLDPITLLQERENRIAARISLRMQELQRLPATMSEDLRLQAAIELRALRVLNFQRQLRMEFVQCTRRDTTLETALNIKLYKRTKRQGLREARATEKLEKQQKLEAERKRRQKHLEFLAAVLQHGKDLREFHRNNKAQLARMNKAVMNHHANAEREQKKEQERIEKERMRRLMAEDEEGYRKLIDQKKDKRLAFLLSQTDEYISNLTQMVKQHKDDQMKKKEEEGKRLIQFKKELLMSGEYIGIDEGSIVADMRVHVVEQCTGKKLTGDDAPMLKHLHRWLNMHPGWDWIDDEEDSCGSNDDHKPKVEEQPTATEDATDKAQATGNDEDAKDLITKAKVEDDEYRTEEQTYYSIAHTIHEKVVEQASIMVNGTLKEYQIKGLEWLVSLYNNNLNGILADEMGLGKTIQTISLVTYLMDRKKVMGPYLIIVPLSTLPNWVLEFEKWAPAVGVVSYKGSPQGRRLLQNQMRATKFNVLLTTYEYVIKDKAVLAKIQWKYMIIDEGHRMKNHHCKLTQVLNTHYIAPYRLLLTGTPLQNKLPELWALLNFLLPSIFKSCSTFEQWFNAPFATTGEKVELNEEETILIIRRLHKVLRPFLLRRLKKEVEHQLPDKVEYIIKCDMSALQRVLYKHMQSKGVLLTDGSEKGKHGKGGAKALMNTIVQLRKLCNHPFMFQHIEEKYCDHTGGHGVVSGPDLYRVSGKFELLDRILPKLKATNHRVLLFCQMTQCMTIIEDYLGWRQFGYLRLDGTTKAEDRGELLRKFNAKGSDVFVFLLSTRAGGLGLNLQTADTVVIFDSDWNPHQDLQAQDRAHRIGQRNEVRVLRLMTVNSVEERILAAARYKLNMDEKVIQAGMFDQKSTGSERQQFLQTILHQDDNEEEEENEVPDDEMINMMIARSEEEIEIFKRMDAERKKEDEEIHPGRERLIDESELPDWLTKDDDEVERFHYQYDEDTILGRGSRQRKEVDYTDSLTEKEWLKAIDDGAEFDEEEEEDDSKRKRRKRKNRKEESDDDSLILKRRRRQNLDKRSKKQMHKIMSAVIKHNQDGRTLSEPFMKLPSRQRLPDYYEIIKRPVDIKKILQRIEDCKYADLNELEKDFMQLCQNAQIYNEEASLIYLDSIALQKVFVGARQRITAAADAAAVAAGDNTGEAHGNGGSDNSDNDDDDGGDDGSDDEEIATTSAAAVKMKLKLNKSLASAPATPTQSSSNVSSGAATTSKKQTRRKRSQKKYTISDDDDDDMD

SEQ ID NO: 27760 - DNA, 7582 bp, DROSOPHILA
caaacagcaattggtcattctgcaactcacctcttcaccatcgtcgtagtttccgttggaatcgttttgttccgccattctctccttggttgttcaagaagatggaaagtttaaacaccgaacgcaggaaatattttttttgtttttgttcttttttgacggcagactggcaataaatgaaatgtacagcacgcacaatgagaatggagtgagcagtatgaccaggtgtcgagaacggggtaaagtcggaaaatcggacgccacgtggaatcggaacgattgtttcggtgcgttaggggtgttcctcgacaattaagctgatgccacacttgattttatatatcttcatataaatttgtattcgtctagtaagggcttaaaaatattagacaagtttattgtatatatttctgaacaaacggatttgaatgtattatctttataaatggattatgataattactaccacgataacccaagaaacatttaatatgtttaactttttagctaaatatgtattattattaataccgcttacataactctttctgcgagcattcgctttagctggggcgatggaaggcttcactttaagagataacttgtaaattattttgtattgaattgtatatttgtaagtagccagctaagggtcaatcaatattacaattacgggatctatgaggcatttgggaataaaaaaagacatcgtgcgaaataaattaataaatccagaaacattttatgtatatcatcaaatcagaaacgttaaaaaatgctaatgagtgcttgctagcagatatcaaaataaaaaggttgttaacagtatattcaaatgctactactaagtatatttaatgtttattcttttcatagcggaacacgaacagcaactggaatacccttaacgcagcgaaacgcattgcccgcccaaaatatcgataggcgaaaaagtatcgttccattccgcctttggaatgactgtcaaacatcgctttcgtctgtcactttcacttccgtttgtgtcgagtcgcttgcgttttttcgtgtgggaaagcctgaaaaagagagagtacggcagcgacttaattgtaaatttgccacaaatatccttcactgaacggtacgtgctagtgagtacgcttaagtgaagaacagcgcgtatttcgcgttgttaaattaactcgtttttgcagcggttctgtacacccggtacattgcgagcgtgtgtgtgtgtatgtggtggccgccatcttggcgaaacatacacggcgcgtacatatgtgcgttttttttttcttccattcctaaaggacagtcgagcaaaatagaagctgcaaactgcaacggttcccttgctgatatatatatatatacttcactattttatagcacctgctccagatacgtaaggaaccgttatcatggtgggatctcgagtgtatgtgggcggtctgccctacggagtgcgcgagcgcgatttggagcgctttttcaaaggctacggccgcacacgcgacatcctcatcaaaaatggctacggctttgtggtgagtacaaaatatcatatttaactggaatatgtaaaaaaaaaaaatcggttaaatttgatttgaagacatttctgcatttctctgtttgtctataggtttcctaacatttcaagccgacccttgaatactttttttttctttttgaacctatatttgttccatcatttgtctgtcaaatacagtgacgcttaaaaactgttcttaaattcacccagcgtatttccataagagtatgcacaggcagggtagcttcaatactaattccataatcaatactaatcactaattgaattttcaggaattcgaagactatcgtgatgccgacgatgccgtctatgaactgaatggcaaagagctgcttggcgaacggtgagttgttagatataagccaaagtacgaaatgactcacgattgtatgttctatatttttgcagtgtggttgttgaacccgccaggggtaccgctcgtggcagcaaccgcgaccgctacgacgatcgatatggtggtcggcgggggggcgggggcggtcgttacaacgaaaagtaagtagtactgccagcggaccttaaaaccggaccaaagtagcgacgatatcgtcctccaactttgtttgcgttgaagtttgccctagaattagcactgccaatttgtttcgtttgatatctccatccacacagatgcaaccagcttagatcgtgcaaaatctatatacctataatattagctacttgcgatatatataaaaaacatcagtttattatatattgacttctatagttttatacacttttggtagtgcaatcgtataagctgatttcttctgcgtggaagggaaccaaaagacactgacttgctgttaatattatcatttccaagacgctccgttttcctatgcatactattgttgcttttatttgcacgttccacccatccgcatagtatgtaaaatgtttgatttgttgcgcataacccaaatgtaaatatgcatatgctggaatatattcaccattaccgttaatttttgtgatggagcatcaggagcagcagcgcagtgtcaatactaattagcgaatccattcaattattcaccagaaacaaaaattccagatcatcctctcgttatggcccaccgttgcgcactgagtaccgactgattgtggagaatttgtctagccgcgttagctggcaggtaagtgagcatggatcgatgtatcgcgccttgggcgtggtatatactgtagcttagattcgaggagtgtagtactagaattaaaacggctaaccgactgaaatggatcactattacaaacacccattaatcaacttacccatcccagaaccaaccttttcgagcccctttttgatttcgaattactttccggtgtcttcgtcctgttttgtgttttaactcctcctccactctgactagagccaattctataatctgtaatctagccctaagctgtacagttgacctagacttaagtgaaacacgaaaacaaaagatattgctaaaaccctggtactgatcggtgtaatctacccaccattactttctcttgcacacaccaaccgaaaccgataataaaaagagtttgatgtgctttgactgagagattccctcctcggcttggggccgaatctaaaactgaaagagaatcaaatctaattgaatcgctgtgagaaagacaagctagtctagtgaccgaccgaccggttcagaatgttacccaaaaaccaagatgcggtggaagacagagtgagacagtacccagagccgccccagattggtttcgatatgcgaactacgatctgcaacctacgaccgacctccacgaagcgccatcgccgccgcctcatccattcgtcgtctattccaaataaaacataatatagaacacataacgaaatgaacaagtcgatcagaatcgaacccaaaactgaatgcaaaatcgaaatcagaaagcagacgatgacgatggacgttgatgagctgcccgggtcaaaaggccagcccacgtattaaagcccacactgattgaaaagacgtgggctggcctcttgcgttaggtatttaactctctgctaaaaacattcacaattttaattaccaacaatattatataaagaattgtcaaattccttatagccattgtgagtgtgatgagggtgcgaatcgaatcaatcgagtgtggttagatgagaagcttgcgttcgctaattctaagatgatgtgatggtcttggcgacgatgagggatgagcatatgacgatgatcgatcgatgacgatgacacgatgctgcgatgctggtcgcgcgttcagttaccaacttcggctagtgcctccgaacttattccttccccccattcccggttcttctggcttccggctgcggctctggcttatggctgcggctccggcaaacggcatacggctacctgccccgtctccggctgagactaccgactagacaaccaccaacccaacccgttggagaagcgagagcagcgtcccgaaacgtatttcttatttttgcagttcgtttgtgcgtgaggtgccgatgccgctggttgttgtccgcctctgaccggcaaactgctccaaatgctccattctctggctctctggtgcggtggttctggccagcgatgtctgctctgatctgatctgacctcctcctgactgtatccggtgtgtggcttcctccgaaacgaaacgaaaacagctaccgcaacacttgaatacctttttgccatttataatatgattctgttgtacatgaaaaacataacaaaactgtgtacttggtggtacgtacgtggccaaatgaaaacgaataccaaatccaaacaaacaaaacgtaacgagctctggccatccatccgctcatccgcctgcctggccactggttctcttctggctgactggttgagttaacgatgttcgatcggactttcgatgaggtcatgaggtgtccttggtgtcattggcccacagttactaggcagacaatctaaactctcggtgtagaaacgatgtgtgtgtcctcctctctctgaaagcgcattaagtaagaattcaattacaactattttgttaactttaatttatttccaaaccaaatcaactcaatctatatatatatatatatatctactatcaattgccaaccactgttaactatgattgtttacgcttaagttttgtgccgcgtgcagcgtggagtgtttgaatgttgtgttcggtacgttctgggcacctcctccttcttttttcctggccaagcgaaatccttcgtccggagtgaggttctcggtttccacacgtaggcaggcgcgacaagagcacaggatagacgaacacagggcactgagtgagagagagagagggacttgtgagaggctgggacttggttaggagccccaaataataccgaaaacattcaaaatgctccatctgctgcacgggctgtcctttgagttgcaaccactgccgtcggatgtgcgatgtcgaaatgtgcgagacatctgccaaagctgaaacttactaattactatcttttcgttccgactttgtgcgtccctgcaggatctcaaggattacatgcgccaggctggcgaggtcacctatgccgatgcccacaagcagcgtcgcaatgaggggtatgtttgaaaatggttgaaattattttacatacaaccaactacaattgtgttcctttgcagcgtggttgagttcgcctcgttgtcggacatgaagacggccattgagaagttggatgacaccgagctaaacggcaggcggatccacttggtcgaggatcgtcgcggaggacgcagcggtggtggcggcggcagcggacgtggacgctcccgttcgtccagctcccgatcgcgctcccgatcccgcaggcgttctcgctctcgccgctcgtcgcactcgcgctccaagtctcgcagccgctccaaatctcgtggcggacgctccaagtccaagtcgccagtcaagtctcgttctcgctcccgctcgcgatccaagtaagtagagagagaataaagtctggtagggatcgtacttaatcacaaattctttgtgatatatgctttaatattaatattatatagattttacacgatagaaaatattaattacgatcctccctggctttttacttcatatgattgcccactaattaattacttcactacttccgctgcagcaaatcgcgtgacgtgtccaagtccaagtcaaagtcccactcccgcacccgctcccgttcgcccaaacgtgagcgtgactcccgttcccgatcgcggtccgtctcgaagcgcgagtcccgttcccgctcacgttccaagtccatccaccgcgactcccgttcacggtaagtttggccacagtgcgatgaccatggctccatattattatagaccgttcacgattctttctttcgtgctttctttggttttgtttggatgcacctgtttgtagcccgccaacggtggtcgttcaaaagctcgttctatagttcactacaatgcctttcttttgcagcgatcgatccgcatcggctgaaaacaagtcgcgttcgcgctcacgctcccgttcggcctcgcccaaaaatggaaacgcctcaccggaccgcaataacgagagcatggacgattagattagttagctgtcccattaatattaaaacacttgattttagacttctactataactattctacaaacatcaacactcagacaccccgactacaaccaaaacttaatgaatatgaaatcataccaatccaccactgtcgggcctcgtcattttcttttaaatatataacgacaatttgtcctaagtcttgttgtggacatgggacattggctggaagatgacagggatcggctgaatgtgccgatttggattcaaggagtacatataggccacgaaattactgcgacttgtacaccggaacacttaaaattgtctatacaatgagtaatttcaataaatacggataaatttaaactataaatgtttgctcgctggtttcacttcaaaaaggatataaagtacttcgacgattttaatcatataaagttagtttattgtttttcttttttgttgtcgtaatttcggaatataagtatattacaaagtcttagtttcactatttcgcattatttgcctgaattaaaattacaatttcatttgattttatttatcttgaatttgaagaacgccaatgataattttgacacctcattggctgaaatatatcctagttaaatatttaaaatttgaaaatgaattagcaatctaaaatcaaatgcataactaagttttataaactgacaaagttttggttctaacaatatatatcgtttgtgttttgcttttaaagtaattacttgtacgaattaagtacactattatatacaaagcacatagggataaaagagattttttctttccaagcgtttgacgtctcgagtgagcaatggttaatgggcaatgggccttgaaaatcgcaccgactaactacgagtagaacagataatcgaaaatcctattttaaatgcgaatgccgtaaaataatgcttaaactaattaagagtctggggacattatctacaactataactaaatgcattctttgcataaatgcgacagggggaggtcttggggtgggggtctgagacgatatctatatatatatagtatctgtacgatccgcacgtcatagtgccaccatatgtgttgcacgtaccgccggcttatttggcacatcgtggagtcacttgaagtttctggggcatccagctaagtacttttgacacttggttggatcgagaattttggcttggctgtggccactaactagagtcgtgtgaactgatatcgcgttacgtacgtaatcgtaataagtctgaataaaatggattttcaaacgttatctaacattaatcggctatagagttatgtacagcatgttaatttgacacttaaattgcgttactttggcttatgcg

SEQ ID NO: 27761 - DNA, 1053 bp, DROSOPHILA
tctgtcactttcacttccgtttgtgtcgagtcgcttgcgttttttcgtgtgggaaagcctgaaaaagagagagtacggcagcgacttaattgtaaatttgccacaaatatccttcactgaacgcacctgctccagatacgtaaggaaccgttatcatggtgggatctcgagtgtatgtgggcggtctgccctacggagtgcgcgagcgcgatttggagcgctttttcaaaggctacggccgcacacgcgacatcctcatcaaaaatggctacggctttgtggaattcgaagactatcgtgatgccgacgatgccgtctatgaactgaatggcaaagagctgcttggcgaacgcaaatcgcgtgacgtgtccaagtccaagtcaaagtcccactcccgcacccgctcccgttcgcccaaacgtgagcgtgactcccgttcccgatcgcggtccgtctcgaagcgcgagtcccgttcccgctcacgttccaagtccatccaccgcgactcccgttcacgcccgccaacggtggtcgttcaaaagctcgttctatagttcactacaatgcctttcttttgcagcgatcgatccgcatcggctgaaaacaagtcgcgttcgcgctcacgctcccgttcggcctcgcccaaaaatggaaacgcctcaccggaccgcaataacgagagcatggacgattagattagttagctgtcccattaatattaaaacacttgattttagacttctactataactattctacaaacatcaacactcagacaccccgactacaaccaaaacttaatgaatatgaaatcataccaatccaccactgtcgggcctcgtcattttcttttaaatatataacgacaatttgtcctaagtcttgttgtggacatgggacattggctggaagatgacagggatcggctgaatgtgccgatttggattcaaggagtacatataggccacgaaattactgcgacttgtacaccggaacacttaaaattgtctatacaatgagtaatttcaataaatacggataaatttaaactat

SEQ ID NO: 27762 - protein, 132 aa, DROSOPHILA
MVGSRVYVGGLPYGVRERDLERFFKGYGRTRDILIKNGYGFVEFEDYRDADDAVYELNGKELLGERKSRDVSKSKSKSHSRTRSRSPKRERDSRSRSRSVSKRESRSRSRSKSIHRDSRSRPPTVVVQKLVL

SEQ ID NO: 27763 - DNA, 4418 bp, DROSOPHILA
aaattatgtacataagaaaatatactaatagcataatttaataaacatatttccgtaagtttctcatataaattggtctagataatcaagtcatggtgtttcattaaatggggttcctcttttgggctgaggaattggttgagtgcttttcttaagggacttggtatacagagcagttctaacgattcgagagtgatataaatatagttaaaaatatatgtttgttttaggagattagagagaaattcgagttagttgcatgcgttaagttaagagagtgttcttttaatgataatttatcgaatttatttagaaatattttgtaagaaggtcctagagatgtggtggcacgattaaagtatagggatatataacacgatatggcaattgcgaaaaatgaaaaagaagaaaccgaacaattcacacatttgtagatatgtagtgttgtacgttccatgctattttgaagactataacaaaattgaatattcttttgaagtttagcaagtctaagatatgttacagatatttaggctctatcccttcaaaatattctttgccattcatttgtgcgtccacataatagtttcgatatgtatttcagcaaaatatatccctaagctctttaaacgcactccaccacatcgactaagatgtcttcctatgagctgtcacattccagtttcgatattagtcgcaggtgaggataaagcctggctaagcctaaagagccatcagaccatcgattctctgacgcggccctttacctgtaaattagtttcgaaagtcgatgtatttttggattaatatgtgcgggcatatgttttttgggcttcatgcacatctagacgtaggtggtgtaaggagttttacacatagacagacgagcgtgcgatatgtcgggactggataaattgctatttctggtttcacttccactttcacttctgtcgtcgcattcgatcatctctccatttgcgctcccatcgatctctctgggttatggagagaatacgcgcagggaacgcagcagagtagccaggacattggccagacactcggcctgcagggccaattgtcctgcgccaatgggtccgatctccacgcctaccagctccctgaaactactcgctacatcgtgtactttgagcactatgttcctggtttgcaacggagccgaagtgtgcctggtcatatcctgggccagctcagttatccttcgaatggctgtcaggcaggaagtcagatgttctggcagcgtaatcaatgtcatgtccgacatggaggccaccaggaatttgctagccgtgaccagggccaaggtctgttcggtgagctcgttcctagcacgctgaaacttctcctcatcgatggaggtgcctcctcccgccgcctgagccaccgaacactgggcggccacctggtccaacttaataagcaggccggacatggccacatctgttttggccaacaacgcctcgccatcaattaagtgaccgtttttaatgaacaacttctcgccgtgcagctgctgcggtttcttggggagcagaggaagtgttccgttggcttggttcaagtggggcagacgaacggtggccggaatgggtggtgagtagtgggcaggtggtgctgatccgggtgatgaggagttcggagaattcactccgttcgaaggacgcgggcgacaggcgatgggcggcaacgggggtttcttgggaccactcaccgcgtttgtgggactgctctggcttccatccagcgtgggacttcctctcggcggcagttgtggcggacagagttcccgccgctcctgtggctgcatcactggactagcggctatacgcacctgttttttgggcgagtagcgctgcaggagctcggcacttttcggtggtctcgccggcggcggtgaaagttgctctgtagtgggtgttctcggcggtggttgcagttcctcctgacccggctgctcctcctttttgctggtgggacaacagctgaacttgctcttccgctccacagtggcatactcgataatgtggggtgagtgactaacagttccattgttgccattggcaaccgattggaagaactccctctttgcctgaacagaattgctatacaggcactcggtttctaccggtgcaaccacctgctgttgctccaaattcggaggtggtggtatgatgaaagacattatttcctcgggtgtcagttccttggcgggtgtcgctttctgcgtgggtggtgccaccattatctgctgcaggaaactgtccagctcctcagccttgccttcgaatcccttcgggggagctgcattcatcagcgacaaggaatccaactcatcgggggtttgaggtggcggaatggcacgcagatctataagatccgtatcggtttcaatgaacgtatcttcccttacttcaaatccatatatctcggagagctgacgggcagcaacatctgtgtccgccgatgccgcattgctaatctccttcagttgctgcagatactccctcagattgtagtcctttgtttcggcaccgaaatgtgtgccatcgggactgtgcaagccaaagctgctcctttgcgagagttgctgtttggctggtgctacagatccagcggaagaccccgctgcctgtagaagcatcatctgcggtcttctagttgtaggagattgcgccggtgaggccacagattccgaatcactttcgctctgggagaaatcggtgcccagagcttgcaagtcactcagcagctgactaaagccatttagtttcctttgcggtctcgggctggaagtgctgcacagacttggctttcgcttgggcgtagctggagtcggaggagcagatgtggagactggagcagactcgggaatggcgttcagtccctgggttatgccactcaactcgtggttaatggtctccgccaatagcgtcaaggaatcgctgtgtttcagaggatgtcctggcggaatgatagcgcctggtcccagaatcgttccaccctgcgacccttccgtcgatgaaaccttactgctgttgaggctatcgcaatccgaatcgaattccagcatggccacgcctcctccgccgccgccctgctcctgttcactcagatattgctcagaggtctgaactaggtgctgcagttcctgaacccttctcagaacttgctcgttcttagcctccagttgatggctgcccaaatggctgcgtccttcgcagtagttgctgccactactgtcactcagtcccgaatccttggctgcctcctccagcagctcggtggccatcacgctgtgcaaatcgaggtccatgacgtagggcagtgaggagggcgcctgaatggaggactgctgctggagctgacccctttggactagcggatggtagggtggcgccatcaggaagttaacgctgtgcgctcgagtgtggaagggaagcaggtagctccatcccgctgggagcactgtgtgctgggacaggaatccgggcgcattgtcctcgtcgttcggttcccgttctcgcagaatattcaacacattacctgaaatagaaaagatataataatggcattgcaaatatagatccttgaattcctcacctgtcagcagtcggtagtagccacctaggacaaggctaaactcgcagccatcccgatcctccattatgaacttcacagctcgatctccgagcatgaatatggatacgctgcaggtgacatcgtcctcgcgattcaccaccacatgggtgaagtcctcgatggcggaaataggctggggctgcttggaatggggcaataagttatagaagttatccaccatcaacagaatcgagatagacttaccaccgaattgcgggcactggatatctggctgagtccaaagcgtggactcaccagcaggacgcgttcgacgccctctctttggtttgtgctgaaacatttggctccatagcttggtaagctagcgattatatctagataatggagtttggcctgcaaatgatgaacgattttagttctgatttgatgttcttatttctctctattccatttttgtatgccttaagctacgttaagtgccttttgctcacctgcagctgtgtgagaaccttgctggaggagccagtcatctccgcgttgagcttaaggaagtgagaaatcagccggcgcagttccttccgcttcatgccctcgaacagactcactggcacaaagcgctccagaccgaactcgcgtctgaaagaagtgagaatgttgtattcatagaaaggcggtgtctcaaggattcgtctgaacctactcgactagtttgacagtgagcttggcgggcgcaaagttgttggccagggcgtgctggtgcatgtggagggcggccaaacgcagggccaattccggctgca

SEQ ID NO: 27764 - DNA, 2418 bp, DROSOPHILA
atggcgccaccctaccatccgctagtccaaaggggtcagctccagcagcagtcctccattcaggcgccctcctcactgccctacgtcatggacctcgatttgcacagcgtgatggccaccgagctgctggaggaggcagccaaggattcgggactgagtgacagtagtggcagcaactactgcgaaggacgcagccatttgggcagccatcaactggaggctaagaacgagcaagttctgagaagggttcaggaactgcagcacctagttcagacctctgagcaatatctgagtgaacaggagcagggcggcggcggaggaggcgtggccatgctggaattcgattcggattgcgatagcctcaacagcagtaaggtttcatcgacggaagggtcgcagggtggaacgattctgggaccaggcgctatcattccgccaggacatcctctgaaacacagcgattccttgacgctattggcggagaccattaaccacgagttgagtggcataacccagggactgaacgccattcccgagtctgctccagtctccacatctgctcctccgactccagctacgcccaagcgaaagccaagtctgtgcagcacttccagcccgagaccgcaaaggaaactaaatggctttagtcagctgctgagtgacttgcaagctctgggcaccgatttctcccagagcgaaagtgattcggaatctgtggcctcaccggcgcaatctcctacaactagaagaccgcagatgatgcttctacaggcagcggggtcttccgctggatctgtagcaccagccaaacagcaactctcgcaaaggagcagctttggcttgcacagtcccgatggcacacatttcggtgccgaaacaaaggactacaatctgagggagtatctgcagcaactgaaggagattagcaatgcggcatcggcggacacagatgttgctgcccgtcagctctccgagatatatggatttgaagtaagggaagatacgttcattgaaaccgatacggatcttatagatctgcgtgccattccgccacctcaaacccccgatgagttggattccttgtcgctgatgaatgcagctcccccgaagggattcgaaggcaaggctgaggagctggacagtttcctgcagcagataatggtggcaccacccacgcagaaagcgacacccgccaaggaactgacacccgaggaaataatgtctttcatcataccaccacctccgaatttggagcaacagcaggtggttgcaccggtagaaaccgagtgcctgtatagcaattctgttcaggcaaagagggagttcttccaatcggttgccaatggcaacaatggaactgttagtcactcaccccacattatcgagtatgccactgtggagcggaagagcaagttcagctgttgtcccaccagcaaaaaggaggagcagccgggtcaggaggaactgcaaccaccgccgagaacacccactacagagcaactttcaccgccgccggcgagaccaccgaaaagtgccgagctcctgcagcgctactcgcccaaaaaacaggtgcgtatagccgctagtccagtgatgcagccacaggagcggcgggaactctgtccgccacaactgccgccgagaggaagtcccacgctggatggaagccagagcagtcccacaaacgcggtgagtggtcccaagaaacccccgttgccgcccatcgcctgtcgcccgcgtccttcgaacggagtgaattctccgaactcctcatcacccggatcagcaccacctgcccactactcaccacccattccggccaccgttcgtctgccccacttgaaccaagccaacggaacacttcctctgctccccaagaaaccgcagcagctgcacggcgagaagttgttcattaaaaacggtcacttaattgatggcgaggcgttgttggccaaaacagatgtggccatgtccggcctgcttattaagttggaccaggtggccgcccagtgttcggtggctcaggcggcgggaggaggcacctccatcgatgaggagaagtttcagcgtgctaggaacgagctcaccgaacagaccttggccctggtcacggctagcaaattcctggtggcctccatgtcggacatgacattgattacgctgccagaacatctgacttcctgcctgacagccattcgaaggataactgagctggcccaggatatgaccaggcacacttcggctccgttgcaaaccaggaacatagtgctcaaagtacacgatgtagcgagtagtttcagggagctggtaggcgtggagatcggacccattggcgcaggacaattggccctgcaggccgagtgtctggccaatgtcctggctactctgctgcgttccctgcgcgtattctctccataa

SEQ ID NO: 27765 - protein, 805 aa, DROSOPHILA
MAPPYHPLVQRGQLQQQSSIQAPSSLPYVMDLDLHSVMATELLEEAAKDSGLSDSSGSNYCEGRSHLGSHQLEAKNEQVLRRVQELQHLVQTSEQYLSEQEQGGGGGGVAMLEFDSDCDSLNSSKVSSTEGSQGGTILGPGAIIPPGHPLKHSDSLTLLAETINHELSGITQGLNAIPESAPVSTSAPPTPATPKRKPSLCSTSSPRPQRKLNGFSQLLSDLQALGTDFSQSESDSESVASPAQSPTTRRPQMMLLQAAGSSAGSVAPAKQQLSQRSSFGLHSPDGTHFGAETKDYNLREYLQQLKEISNAASADTDVAARQLSEIYGFEVREDTFIETDTDLIDLRAIPPPQTPDELDSLSLMNAAPPKGFEGKAEELDSFLQQIMVAPPTQKATPAKELTPEEIMSFIIPPPPNLEQQQVVAPVETECLYSNSVQAKREFFQSVANGNNGTVSHSPHIIEYATVERKSKFSCCPTSKKEEQPGQEELQPPPRTPTTEQLSPPPARPPKSAELLQRYSPKKQVRIAASPVMQPQERRELCPPQLPPRGSPTLDGSQSSPTNAVSGPKKPPLPPIACRPRPSNGVNSPNSSSPGSAPPAHYSPPIPATVRLPHLNQANGTLPLLPKKPQQLHGEKLFIKNGHLIDGEALLAKTDVAMSGLLIKLDQVAAQCSVAQAAGGGTSIDEEKFQRARNELTEQTLALVTASKFLVASMSDMTLITLPEHLTSCLTAIRRITELAQDMTRHTSAPLQTRNIVLKVHDVASSFRELVGVEIGPIGAGQLALQAECLANVLATLLRSLRVFSP

SEQ ID NO: 27766 - DNA, 4794 bp, DROSOPHILA
acatcgacttttgttccatccctatcgtggatgtttatgtggtgcgtgtgtggcagaattattatcaaaattattgaaagaatcaattttgagcccgcagatcgtcacacttgctagaaaatgtcggaaaagaagcgagcccgtcgccgcaaggatgtaagtgctaactgtttccaattagatccttctaaaggggctgcgcgtgtgtgggtgccacagtccaattgacatgccgaaagtgtttgttttttgttttgataaaaaaggagaaaaaaaacgtgtgcatgcagaaaaaaagtaaaattgactcgaaaagaaacaaaacgctgaattgcgagttcagatgggtcattcaatattttaatattatttgtggggggcaagttcagtgcaggttgcgctgctctttggagaaacccccgtgggatgccccccgcccgcaaaaggtctataattagctttatggaaaatgtcttcgctgcgtatttagctgtatctggaatttgagttctaccttttcttttttatttttcagtcaattaagttttggggtctacaatacaaacagctgagcttacaagcttttgcctatctggcaacgccgtaagtccgtcttgtaagccgatctcgctcattcgctggctcgctctctccagctctccctctcgctcattacccacacatgtcaggtgcaggcccacttatcagctgctctggttgttgttattgtggttattcgtgttgttgttggggaaagtttgagtacgcgtgtaagttgggcagaggcggcgcttaagagggttttgttaatcattggctccacacatacatgggaaattatcactaatatcatttcaatcgttaaacagctatgagtatcaatacagcttcaaacccccttgcatattttccaactgctcccctgtttagtatccatgtgtttgtttgttgtggtgatcaccagctcgtttgattcaatactttctagactctcagagcgaatgcaacacgtcacggctaagaaaaactacaaccgcttctggaatagttgtttctatttatatagttcgcagtttttaagttacgcatattaattctcgtaatgagtggagaggaggagtacttccaggaggaggaagaagaggagcaggagcaggatatttacgacgatggcacggtacttaggaaaaaataaaacccacgtataataaagccatctcaacggcttgagggtgacgaatacaaaattggtgtcgtggcctatattcgcttgtagtccccccatttaaccaatcgatcgtgaaagtgagtttctgacctggttttcggacctttttctcttttttcctcttataggaatacaccgaaccgggtgcccagaaggtagacaagccgtcaaaggacgagaagaacgtggccaagtggctgaagaagaacgttaagacgaagaagaccaaattcctgagccacatcgtcgaatacttcacctccagcaaggccatcgatgctctgctaaagtccaaattcaccgaaggcagcaatccgcttttcaccacccgggagcaggtaatcgagtttctagacgtgatgctggagcacaagttcttccatcgcgccaagaaggtgcccgtcactctggaggagatcagaggaaagtctggaggcgacaagaaggcggacaaggagaagacccaagataaggaaaaggacaaggcaaaggatgagaagaaggataccgatccggaaggcgataatggccaaggagacggaggtgcgtctggcaacgaaaaagagaaggagaaaaaggagaagaaaaagcgcaagatccgcctggacatgcatcctgagcagatcttcgtggacggctccgaggcatacgtctggatctacgatcccataccgctccactactggatattcggcttcatcctgctacttggcgccgttggcatttgcctattccctctgtggcctccactgctacgcaagggtgtctactacttgtccattgcggctgccggcttccttgttttcatcctggctctgacaattgtacgtctaattgtgttcatcatcgtgtgggcattaaccggcggcaagttgcacttctggatcttccccaacctgactgaggatgtgagcttcttcgcctccttctggccactatatgaggtttgtttcgaattatccatttatgttagtttactaaattaccttcatctctagagcaactataacagtgacccaaataattcgtccgccaagaccgacaagaaatcgaaatcgaaggacaagaagaaggaaaaagaaagcgatgccgaggacacagccgtggatgcggatggagacgctgacggtgatgtggatgctgaggtttccacgcttgaaccagagaaaatcgagctcatcaaagaacatgacaccgacatggagatccgcaaacgtcgcaaagtgggtgccgatgactacgaggaagacgatgtggatgaagaagaaacgaaggcgcagcccaaggattccaaagctgggtaagacggaaccgctcagtaatgaccaggattcctgctttattgctcgaatttgtatttataatttcttttatttccgtcgaacttttggttgtatgtttttcatacactaaatcatattgaatagcgcaaaagacatacattaactttagcttttaattgtaaatcctttgttccttaataaatattattgtataattaaaatgcattaatccgattcttggtttgcgtttcataacatttttatttcgtttacgaagcatgttatttgtaaatacatttgtttcgtgatttgtggtggctcattttattggttgctggtttttgttttctggtgatacttgaggtattccaaagttatcgcaagttatcgcatcaaagcagagtaagttttgcatcccattcatttgatattcattgtacttacagtcctacatttacttttgatgaatgcattttagtaatttccgacttatttgctttgctttcagaacgccacgcaactcgggatcggattcggagagctcgagtaaagattacgagataatcagttcaagtgaagtccaaaacgttgctggcaactaatatgaagaaaccacaatatatatatatattattatttaatgatccacatctagctaattgataagacatagaacaagaatcacacatcaagtacatcagcaaacacacacgattccaagtacagcgaattattgtcccacaagaaatgcgatcggtgtcgttattctttattgaagatttcctaatctgctttaaattgagcttaggtttgaggttttgcaatattttttattgttggatgtaggcttgcatatgaaacacaatatttttaaacggaatattatgtgagacaaagacatttggttatgcaccatgcagttggacatctttttttcgcaaaagttcttaagccgttaaacaaactacctatattttacctatttgtattcctatgtttgtaaatgtatacagtggaacgcactaggcaggtgcaagaaacgattgcaattgataataatcatagcgagtacgtacgtagatgtgagcgcatacgtttctatgtgcatgaatatttactctacatgtaattaaagcaaactaacaacttaatgaaattagtagtgtaacacgcaattaactattatataaataaagctaggcaattctgatctgatgtgagagatatttgagcgttttttagttcttgctcgaacgttttattaaaaaatatacaacatacaatttgtctttaaaattaaactcgtggtatcaaagggattaaaaatgaaaatttacgtctatagattttagttttaagtaaatagatatcctttataactaagtttgcggttcatctatgaccacagttatttgaaaagtcctttgcttatgtggaacgctgataagcaaatgatctttcgaattgactacaaattcttgaggatcttggttctcagataaatcacgtggtcttatgatcatactccgtccaatttgatcgaatggatcgtagactgtgagcttggcaagaagtttggcacgcgatggacaaccgaccagccagaagaaaacaccggctaatgcatcatcctttgccatttttggagcagctagcaaggtcagcggatgattccgcattggatgtgatctaagggttagaattagtaaatagatatatcatttttgttttcagtagctaacctttccttcgctaagctggtgtacaagagaagggccacaaaagtgtttcctttcgtgaggagatcgccatcgaagcagaactgctttggtaaaccttccactacttgatggtaatcttcctgcggtggagcatctttggttttccaaactcgatgatcttgcaggatatgcgaagaaaatgtgttcgactttataaggcttccgcacatgtgaatgggacagtaatactcttctaccagagatgactccaaatcatcctgcataatattttttggatgagctgagcccattgtgattacttgccagttcagaggaggcaatcctgcatactcggtggttcgacaggtcagcatcggttccgatgctccatcagaatcagtttctaccttagattcttcaattagacactttggttcggagtcacttgaggagtgcaggttggctataagacgtaatggcttttgacttgaacttaattccgtgaaggaatttgaaagagatatatcctcttcttcattcaaaatgacatttggttcaagtt

SEQ ID NO: 27767 - DNA, 2070 bp, DROSOPHILA
aatgcaacacgtcacggctaagaaaaactacaaccgcttctggaatagttgtttctatttatatagttcgcagtttttaagttacgcatattaattctcgtaatgagtggagaggaggagtacttccaggaggaggaagaagaggagcaggagcaggatatttacgacgatggcacggaatacaccgaaccgggtgcccagaaggtagacaagccgtcaaaggacgagaagaacgtggccaagtggctgaagaagaacgttaagacgaagaagaccaaattcctgagccacatcgtcgaatacttcacctccagcaaggccatcgatgctctgctaaagtccaaattcaccgaaggcagcaatccgcttttcaccacccgggagcaggtaatcgagtttctagacgtgatgctggagcacaagttcttccatcgcgccaagaaggtgcccgtcactctggaggagatcagaggaaagtctggaggcgacaagaaggcggacaaggagaagacccaagataaggaaaaggacaaggcaaaggatgagaagaaggataccgatccggaaggcgataatggccaaggagacggaggtgcgtctggcaacgaaaaagagaaggagaaaaaggagaagaaaaagcgcaagatccgcctggacatgcatcctgagcagatcttcgtggacggctccgaggcatacgtctggatctacgatcccataccgctccactactggatattcggcttcatcctgctacttggcgccgttggcatttgcctattccctctgtggcctccactgctacgcaagggtgtctactacttgtccattgcggctgccggcttccttgttttcatcctggctctgacaattgtacgtctaattgtgttcatcatcgtgtgggcattaaccggcggcaagttgcacttctggatcttccccaacctgactgaggatgtgagcttcttcgcctccttctggccactatatgagagcaactataacagtgacccaaataattcgtccgccaagaccgacaagaaatcgaaatcgaaggacaagaagaaggaaaaagaaagcgatgccgaggacacagccgtggatgcggatggagacgctgacggtgatgtggatgctgaggtttccacgcttgaaccagagaaaatcgagctcatcaaagaacatgacaccgacatggagatccgcaaacgtcgcaaagtgggtgccgatgactacgaggaagacgatgtggatgaagaagaaacgaaggcgcagcccaaggattccaaagctggaacgccacgcaactcgggatcggattcggagagctcgagtaaagattacgagataatcagttcaagtgaagtccaaaacgttgctggcaactaatatgaagaaaccacaatatatatatatattattatttaatgatccacatctagctaattgataagacatagaacaagaatcacacatcaagtacatcagcaaacacacacgattccaagtacagcgaattattgtcccacaagaaatgcgatcggtgtcgttattctttattgaagatttcctaatctgctttaaattgagcttaggtttgaggttttgcaatattttttattgttggatgtaggcttgcatatgaaacacaatatttttaaacggaatattatgtgagacaaagacatttggttatgcaccatgcagttggacatctttttttcgcaaaagttcttaagccgttaaacaaactacctatattttacctatttgtattcctatgtttgtaaatgtatacagtggaacgcactaggcaggtgcaagaaacgattgcaattgataataatcatagcgagtacgtacgtagatgtgagcgcatacgtttctatgtgcatgaatatttactctacatgtaattaaagcaaactaacaacttaatgaaattagtagtgtaacacgcaattaactattatataaataaagctaggcaattctgatctgatgtgagagatatttgagcgttttttagttcttgctcgaacgttttattaaaaaatatacaacatacaa

SEQ ID NO: 27768 - protein, 428 aa, DROSOPHILA
MSGEEEYFQEEEEEEQEQDIYDDGTEYTEPGAQKVDKPSKDEKNVAKWLKKNVKTKKTKFLSHIVEYFTSSKAIDALLKSKFTEGSNPLFTTREQVIEFLDVMLEHKFFHRAKKVPVTLEEIRGKSGGDKKADKEKTQDKEKDKAKDEKKDTDPEGDNGQGDGGASGNEKEKEKKEKKKRKIRLDMHPEQIFVDGSEAYVWIYDPIPLHYWIFGFILLLGAVGICLFPLWPPLLRKGVYYLSIAAAGFLVFILALTIVRLIVFIIVWALTGGKLHFWIFPNLTEDVSFFASFWPLYESNYNSDPNNSSAKTDKKSKSKDKKKEKESDAEDTAVDADGDADGDVDAEVSTLEPEKIELIKEHDTDMEIRKRRKVGADDYEEDDVDEEETKAQPKDSKAGTPRNSGSDSESSSKDYEIISSSEVQNVAGN

SEQ ID NO: 27769 - DNA, 4902 bp, DROSOPHILA
gtcgggcaaaatcccccaatgaatacgggtgtcagccctaatctccgtcgcatactgtcatatttggccaagagcaagactctaaagtatagatagggtccaggaagaaaatgactaagctcgaaaataacagctcgagtcacaatcgaggggtgttttcattgcgtattttatttatttttaccaacttactaattgacaagtacaagtacaaacaggtatttcgttcaagtggaatatcatttcaccggggcggttttggcccagttgaatcagtccaaaccccaaaccccttcgctgggcgaactttgaacacagcggtactttgacagtcagcggtactaaaataacccccaaaaaacgtcacaaggggagcttttgccgttgttccgactgcttcctgcttttctctttggccatacacattttgggccaaaataatagacgctttattgccggctaattctaatgcttatcgcaggcgacggacaacaggtgatgatttacactccgctgattgcattgtctgcctttctagtccacctgtcgtgtagtttattactgttttctgcgttgctaatctgccttgacctccacaactgccatggaaatggctttccccattactttcatagtttcatgactgaccgtcggcgatcgcgagtgtttatatccgttttgaacgccgaaaccgttcacgatttaccccagtcacgaaatttgtttacccattcaaagctttcaaagctctgacacattccatttagtgtttaattttatattcattcatttaatagcaacaattagggaagcatttacattgcctcatatatgtatgtgaattttggattattaggattggaaatgcgattcggttttattcttttatttatttttagatacataccttagttgtacatagttttggtaacttgtgtactcgttcaaagactttttgcagctgctgtaaataaagtaaagtaggttattggcactggcttctgttgccaagttcagaacaaaaagggaaaggcatacaaagtatatacaattacacaatgctaagtcatattacatatgtacacggtaggaacacaagcggcacacaaaaggggattggatttaaatgcatttttaaatattttgttggaaatcttaccgtagctctaaaatatctctttgaaattaggtgacaatttgagttcagaaaatcgaattaagtcgggtgggcaattaggaagcctcgcataaaagtaagtgatccaattatggtcggggtaattagcccaattgtggggcacccggtatgcggccacccatttgagaacgccatcggcgcgtgctcaatgtaatactatagaaggaatactaagtatgtgtttcctcacggtcgtgtttcttttttgacattgtttcagggagggcaaccaccccgacgattattcccggggtctcacctatcgcaagttgctggaggaggtgtgccgcttcgccaacgtgctgaaggatcatggcattcgaaagggcgatcgtgtatccatttacatgcccatgattctggagctgcctatcgcgatgctggcctgcgctcgcattggagccgtgcactcgatcgtattcgccggattctcaccggactcactggcggagcggatgttcgattgcaaggccaagctgctgattacggcggatggagcctggcgtggagagaaacccctgtacctgaaggctctgtgcgacacggccttggagaaagtcgaggagatggggcactccgtggagaagtgcatcgtggtgtcgcatttgaagcgagtgactccgtgccagccggatcatgtcgaggaggaaatcccatggaccgatgaccgcgattactggtggcacgaggagatggaggacaaggagccggcctgctatccggagtggatggacgccgaggatccattgttcatgctctacaccagtggctccactggcaagcccaagggagtgctccacacgactgccggatatctgctgtatgcggccacgacctttaagatcgtatttgactataagccaggggatatctactggtgcaccgccgatgttggctggatcacgggacacacctacgtggtgtacggaccattggccaatggagccacttcagtgattgtaagtgcctgattagatctaacaaataatggattttttctgactaactgtccctattacttcgtaattgcagttcgaaggcacaccattcttccctggaaacgatcggtactggagtgtcattgacaaatataaggtaactcagttctacacagctccaacggcgattcgtgccctcatgaagttcggcgagggtcccgttctaaagcacaacctgagcggactcaagtacgtttatttatacttctataacaattttcgtaatgactttattcatttgcagagttttgggcagcgtgggtgagcccatcaacccggaggcctggctctggtattacaaatacattggaaaggagcagtgctccattgtggacaccttttggcaaacggaaaccggtggtcatgtcattacacctctgcctggagcgactcccatgaagccgggatctgctgtaagataaatcctttggctagttgatgtcagtactaaaatttattgtcttctactcttagtcattccccttctttggagtgaagcccactttgctggatgagtgcggcattgaaattaagggggagggagagggctacttggtcttctcgcaaccttggccgggaatgatgcgcactttgtacaacaaccatgaacgcttcgaggacacttatttctccaagttcccaggctactactgcactggcgatggtgagtcttgaagttttagactgtttttcattgtgattttaaagtggattaggattgttaattatttatgtttgctttgatttttttcgcacaggagcccgacgcgatgctgacggctatttgtggatcactggtcgtgtggacgacatgttaaacgtgtccgggcacctgatgtccactgccgaggtagagtcggttctcacagagcatcctcgcgtggctgagtccgccgtggtttcccgtccgcatcccgtcaagggcgagtgtctctactgcttcataacgccgaacgagaacgaggtattcgaccagaagctaatttcggacctgaagaagatggtgcgagaacgtatcggaccttttgccatgccggatgtcattcaaaacgctcccggactgcccaaaactcgttccggcaagattatgcgtcgtgtgctgcgcaagatcgcggttaacgatcgcaacgtgggcgacacatctaccttggccgatgagcaaattgtggagcaactgttcgccaaccggccagtggaggccaagtagatggtagctgttggaccaactggcagcagccaggatcccttaacccaaggctttctccggttgcactgaccactccactttgccatcgcatttccaccacttacgtatcgcgattacgtatcctgtaaatctccctctacttatatgaattacccactgcttaatgtttgttccgttccgggctacggcgtggttagcacctttcaaattctacttagctcgtaagcctaagcgtgtgcgtaagtaagtgactggatggtttccgatcccagttatatatcgtctatatgattttgtgtacttgcctgttcatcgtagttgacatgctcaccacgcacacattttccagttcttttgtttcttcgttgtagtcgtagtttaagttctcgctaattcgttgtgatacaaatttaattatatcttacttatgtatgtatttttagtagaattgatatgagacaaaatatatacacgattccaattgtcgccacaatttacacagatcacctttttttagttgtatcttttttttgtagtgtttctttcacaccttttcagatctgaggagatgcgcacgtaagttcggaaaccataggggatatcggtttcttccccgtcccattagcccataagtttgagaacgatacatatctgtgtggcattatgcttgccacattcctacatacgatctacatgttaaagagaaccacgcggatatactatatacactatatatatatatatgttataaggtcagaagacttactgcaacgaaacatatcattgaagttactgctgcaagcctatggatattatagaagcttttattgttagagatcgttatcttgaggggagatcggctagaaagtaatggatatcttggattggctgattaggggcagcggtgcccagtctgaatgtaaaaagattgttagttatacagcgatggcgaacgaaagattgcaatttacatatctataaatatatatatatatatttctgtatatgaacatatgtgtataataaagtttattgttttaatgtgtttgaacctgcaagtgcaacgactatattttatagttagaaattcgtatgaagtgtcagtcctgagaattaagatcgcactagccgagcatgatacttccttgtgaatcagtcaactctcggcctttgtcacacttgttttgctgaatttaggctcggtctttcaacaccttggtggcagtaacagatctttgtccgggttgttgtttggggctgtggacgagcaccaccagaatggtcgacgaaaagctaccaccaagcaaggaaccggctgaacggcctccagaccagaccacccccggaaacgcggctacccgattcggcttggaggatcacgaggccactcagcaggatgcccgggtgaacacactgcgccaagcagaagagcgacgtggttcaatggtgcctcccgacaagcgggcgatgtccatgaagatgtcgcaagcgcgcttaca

SEQ ID NO: 27770 - DNA, 2619 bp, DROSOPHILA
tctgttgccaagttcagaacaaaaagggaaaggcatacaaagtatatacaattacacaatgctaagtcatattacatatgtacacggtaggaacacaagcggcacacaaaaggggattggatttaaatgcatttttaaatattttgttggaaatcttaccgtagctctaaaatatctctttgaaattaggtgacaatttgagttcagaaaatcgaattaagtcgggtgggcaattaggaagcctcgcataaaagtaagtgatccaattatggtcggggtaattagcccaattgtggggcacccggtatgcggccacccatttgagaacgccatcggcgcgtgctcaatgtaatactatagaaggaatactaagtatgtgtttcctcacggtcgtgtttcttttttgacattgtttcagggagggcaaccaccccgacgattattcccggggtctcacctatcgcaagttgctggaggaggtgtgccgcttcgccaacgtgctgaaggatcatggcattcgaaagggcgatcgtgtatccatttacatgcccatgattctggagctgcctatcgcgatgctggcctgcgctcgcattggagccgtgcactcgatcgtattcgccggattctcaccggactcactggcggagcggatgttcgattgcaaggccaagctgctgattacggcggatggagcctggcgtggagagaaacccctgtacctgaaggctctgtgcgacacggccttggagaaagtcgaggagatggggcactccgtggagaagtgcatcgtggtgtcgcatttgaagcgagtgactccgtgccagccggatcatgtcgaggaggaaatcccatggaccgatgaccgcgattactggtggcacgaggagatggaggacaaggagccggcctgctatccggagtggatggacgccgaggatccattgttcatgctctacaccagtggctccactggcaagcccaagggagtgctccacacgactgccggatatctgctgtatgcggccacgacctttaagatcgtatttgactataagccaggggatatctactggtgcaccgccgatgttggctggatcacgggacacacctacgtggtgtacggaccattggccaatggagccacttcagtgattttcgaaggcacaccattcttccctggaaacgatcggtactggagtgtcattgacaaatataaggtaactcagttctacacagctccaacggcgattcgtgccctcatgaagttcggcgagggtcccgttctaaagcacaacctgagcggactcaaagttttgggcagcgtgggtgagcccatcaacccggaggcctggctctggtattacaaatacattggaaaggagcagtgctccattgtggacaccttttggcaaacggaaaccggtggtcatgtcattacacctctgcctggagcgactcccatgaagccgggatctgcttcattccccttctttggagtgaagcccactttgctggatgagtgcggcattgaaattaagggggagggagagggctacttggtcttctcgcaaccttggccgggaatgatgcgcactttgtacaacaaccatgaacgcttcgaggacacttatttctccaagttcccaggctactactgcactggcgatggagcccgacgcgatgctgacggctatttgtggatcactggtcgtgtggacgacatgttaaacgtgtccgggcacctgatgtccactgccgaggtagagtcggttctcacagagcatcctcgcgtggctgagtccgccgtggtttcccgtccgcatcccgtcaagggcgagtgtctctactgcttcataacgccgaacgagaacgaggtattcgaccagaagctaatttcggacctgaagaagatggtgcgagaacgtatcggaccttttgccatgccggatgtcattcaaaacgctcccggactgcccaaaactcgttccggcaagattatgcgtcgtgtgctgcgcaagatcgcggttaacgatcgcaacgtgggcgacacatctaccttggccgatgagcaaattgtggagcaactgttcgccaaccggccagtggaggccaagtagatggtagctgttggaccaactggcagcagccaggatcccttaacccaaggctttctccggttgcactgaccactccactttgccatcgcatttccaccacttacgtatcgcgattacgtatcctgtaaatctccctctacttatatgaattacccactgcttaatgtttgttccgttccgggctacggcgtggttagcacctttcaaattctacttagctcgtaagcctaagcgtgtgcgtaagtaagtgactggatggtttccgatcccagttatatatcgtctatatgattttgtgtacttgcctgttcatcgtagttgacatgctcaccacgcacacattttccagttcttttgtttcttcgttgtagtcgtagtttaagttctcgctaattcgttgtgatacaaatttaattatatcttacttatgtatgtatttttagtagaattgatatgagacaaaatatatacacgattccaattgtcgccacaatttaca

SEQ ID NO: 27771 - protein, 522 aa, DROSOPHILA
MILELPIAMLACARIGAVHSIVFAGFSPDSLAERMFDCKAKLLITADGAWRGEKPLYLKALCDTALEKVEEMGHSVEKCIVVSHLKRVTPCQPDHVEEEIPWTDDRDYWWHEEMEDKEPACYPEWMDAEDPLFMLYTSGSTGKPKGVLHTTAGYLLYAATTFKIVFDYKPGDIYWCTADVGWITGHTYVVYGPLANGATSVIFEGTPFFPGNDRYWSVIDKYKVTQFYTAPTAIRALMKFGEGPVLKHNLSGLKVLGSVGEPINPEAWLWYYKYIGKEQCSIVDTFWQTETGGHVITPLPGATPMKPGSASFPFFGVKPTLLDECGIEIKGEGEGYLVFSQPWPGMMRTLYNNHERFEDTYFSKFPGYYCTGDGARRDADGYLWITGRVDDMLNVSGHLMSTAEVESVLTEHPRVAESAVVSRPHPVKGECLYCFITPNENEVFDQKLISDLKKMVRERIGPFAMPDVIQNAPGLPKTRSGKIMRRVLRKIAVNDRNVGDTSTLADEQIVEQLFANRPVEAK

SEQ ID NO: 27772 - DNA, 13631 bp, DROSOPHILA
ctgcggcccaacatctcgcaatttgacttatttgataataattccaggaaaataaagttcgcagtgggtgcgcagaatagagatgacaaatggtcgatagctgccgtgcagctctgctgattacgttacgttaacgttaatgcggtttctgttaactttgcctttggcttcacaaaaaatacattttatttaaaaaaaataaatttgtaaaatgtaatataagaatttcctaggtatcgcttgactaacatttatacggcttaaatacttcgtaagtatttcgtttttatttatttaatatttttataagtactggtgaaaaacgtagtcattccttcattgctggtacttactagttcatttattaggtgcaacgtaggtacttcaaatacaccacttgggcacccggtgcactacataactattttcaaacctcaaaccaaatcccaatccatttaaatgtaaatttttaaattcttaactgcttttaaaaactattaaattttattcgtttctctcgagtgatgtgtcctttttctaaatgactgccatccgtaatgtcccgtacacagcatgctaaatataattagtaaaaatttgtttcattttcctcttaaattttagaaatattttccctttatataaaataaatatatataacagtgccgtgtttttattttaacgtaaataaaatttgaatgttatctatttatatatttatttgaaatcatttaaaattaataataataaaaagaattttacgttaatttgcttccaactacgcccacgcgaattgttgttaatttataataacgagcgagtttgacacggtattaggggtattcgattttatctattcaggggcttaacagacactaagcgctctgttatcttgtcaaaaactatcggcaactagggccatcgctggccccatcaaacacgccgagcgctcatctctattgcgtttcgaatatttcatttatacgcacgggtacggtagactcgatccaaacagacaaacgttcaaaattattgcacaaaattataagtaaacaccccgcgtccaccccaccgcccatattgggtacctcgtgttttcggtggttccctgaaataccggaaaagtgtctgttaatcgtgaagttttcctaatgaagcactgaaacagaacgaccgacagcaacaacaacgcaacagaaaagagtggataaagaaaacagacagcaaaatgctagaaccgccgaaatttatagagaatgattgctacaacggcagccggaccttcacttggctggcggatatggtgggcctctccgtggacttggtgagtaacacactatttactccctggttcttaagacccctcctcccctaccgttatctttcgaaacgggtgtgtgcacgtgtgcgtgtgtatacgcgtgttagttgtgtgccaatcatacgggataaaagccgctgagcaaatctctctcttcctgagaacaatgcacttcttgaaggacagagctgggatttacttctgcctgaacggcatatttttccgggaattatgcaaaacttacctggcaacgggaggtaaatagattccatgccggttgcccaaacaaagatttagtttacagtgaacgatctatgtattgaaccttttaacataagagactatctgaaaatttatttatttaataatttaatttaaataatttatttattataatatataaaaattgtttatttgcaaatcatgagaaaacaaacttaaagcagtgatattttcacaatcacatataattatgaattagctttagttgtttacgttaataatagcgtaaggcagctaatcgcatctggcaagtgctttatattttacccactttgtagtttttctaatttaattaagacatcttgaattatatgaagaccttatcagctgacaagaattatctaccagtggaattttccagccctcaagcggggtaccgtgaaattttgaaattactattgttgcggctgacgcaccgttgatttcgctaaatttaaaatgctttgcatcacttaatagtgcggtgggtactagaggggggcactgattaatctcttcgcagagagtgtcgcacagccacacttacttccccactgtctcctgtaaccccctttttgtgcaccattcatttggcgtaatgtaatttgcataactgcagctggcatatagaaatgtgattcatagcaaggcattttctggcccaaatcaagcgacatacacgtacgtaatcctcacatttttcaattctgatgacctaatgcaaacttccgatgtaaggaaagcacaactaacggaaaatcagtgttagttcgccatcgggccgttgtctctatcaatagccgcactaaattcaatttggcttggttcaaactatgaacctctccatctcagataattgaatttttagcgcttcttttgtttgcaaacaaatatcaacagcttgtcggtgtgttggttagcggatttcttgttattccgaatcagctgatgtagaccgcatgagtcaaccagtctgtcgagcaaaaaacagtaaacgcagcaaaaaataggtactttaggagggtatagcaataaaaacataaacaaaaacactacatttatataatacatttcaccaatcagcgatcaaaatgagttttcttaagatgtgaataagaaatttaaaaacaaacgtttaccggcctcagagttgactgtacctcgtaatggggttttgtggatgggcgacacttttttggaaatcgctacgcccgatatttgatttgtttgtggctttttattgcgctaattcgaagcgaaggccgcagcacgcaactgcgcaaatgccggtgaattggccaattgttccgtggaatcgccccatgtttaaggcacctacatatccatatattacttggatagtacaacgatgtgctcaatagcaacgtgcgaggccttaatggccaaagatgcattcccggccggtcactcgcggtttattctcaacagtttgctttgccttccactcgcaatcttgagttttcctcccacgcctcacgctttcttcgtacacctgacgtcgcgtttatagcaccttttacagtagtcattttttaaatttgtgtcgtacataaacatgactaatttaatataaaaaaaattgtttatccccaattttccaaaatcctttataaggattcggtattttattttaaaggctcttatcaatattattttcaccgctgtagttatacatatgtatgtacatctgttgtacgatatttttattaataaacatcaataaacaactcgttgctattgtgcttgttttactagcttatagatacgtatgtacatatgtacatataatttttattgtatatacttatttcccaacttttgcgttgccgtggaggtttttaaccggttcgcgcgatagcttgaaaatatcaattgaaacttttgtgtatgacactttgcatgagctaataaaaaggtattatatatgtatgtacataaataaatacatatgtatgtatgtacatatgtacatgaagataaagggagagcagagacaaacgctagaccgccacccttcccacaggcgtgatatgcattatattattattatatctacgaccttgagtttggggtgtcgcagttgtttgaactcgttgcttctgtgctcgtcgtctgttttgtgcactcttcgcaatgttttctgcttttgacagctgtttggcgcctctaacggttgttggcatacccttcactttttatgcgaacgggtctattggctgcagaaaagtctaaaatgttttacgatgaagtaatcgttttgcattaatagcttttatttgtgtgcgtttgttttggttggctgtttctcagacgatttccatatcttggcattcttgactcatttcgccattcgtctttgttttgacttttgcttttatcgtgcgttcgcttgttgcttgggcatatctcttggcggttcttttattgttttatttataccgatcacgccacctttttcgtttcgcgcatttccacccctttcctttcctaattgccccccttccttgcctttttttggccatccaacttacaatatttggcaatggaaacacaccatgctaattaaacgatttatgatttgtttgcactcaaactgcacgtgtgtttattcaaatgtttgatggtattcctaatggagctagttcacatcgcaattgattgatgagaattcccatttatatgtaccatactcataatttataaccaaattttttaacataaaaacagtacactaaaaaacgatggcaggtttatcactgcttgaaaatatattttataaataatttaaaataataatgatgatgtaaaaaatgatgttttcgatttcaaacgcggttaactacatatcaaagtagtcccaactgcaactaacgccttctatgacatcaaacactttaatagcgctcttctgggtgaagaggggcaaagtcaagaaacttaagcgcagcttcgtagccaaggaacaatggcagacgagtacacacaaattgctggcgctgcgaaccacattgcattgttactggccggaactatggcaccgtcttatctcgatgagcagacaactatcttctcataatagcgaaaataatgcatccgaacggaagatgaagggctgggtccacatatttgattttaaactgtttgccctcacaacaggcaatatttgccgtgttcatttgttgcaagtttaaggtggccaataatgttcaatgttggtaaattgggatgcgcattgttatctcaagtctgcgtgcttcgaaattccaatctgtgcccctgaatttatgttcgatttaattatttcaccttgagcacagtgcgcagagacatgaccattgcattccatgaccacatagaaaacttgctctgccgaaaccattttttcataaacaaaccaaaacaaaagctgggagcttcttttctgtacttgtcccaaacgtcttgcactgaaatgaaaatagtttataaaacgaaaagtattttttcatatttaccaagaacttacattttcttgtcaccgcattttttccaattctaattataaaacaaattcttttaagtccccgttttccgttaaaaacaacaagttgcccacccacttgttgcacttttttttttgtttgtcttagatccattattcttgagcaagattttccttttggttgctcccttttgcgcttgtgttttagccatatagcttggattgagttaagaaagaaccggttttggccagcagcaatgcgaagcaacttattgcgcatgaggcatgatgattacaacatgcgtctgagtgggaaaactgctcttttggtggctattcttcttaccaaagtgattaaccttgaatcgatttgatatccaaatcgttcgagccttgtaaattgacgcactttattgttctgcttgacttatcaagcgatatcaaaaatcgtttcagggtctcctttgtttttgacccgtggcatgagggtggcttgggagacgtggcccctttgtgggggctatttctcctattgacaaagaaaggcagataaagtatgtacgagtgtatctagactagtacgtgttatcggtaaaacactgaagtgtgcctgtccattatgaaattcgactgagtaacatcatatattctacaaaacgtgtaaagattgtttcacaaaggagaattacgatcagtttgtgtgcagtaaatcattggctttacattagtcttaaataaaaaatgaaaaacattaggctaacgcgcaccaaaagcagctcacaaaattccaggtttccataaaatcattttttaatatgattgtttattcaaccacggttacattgtaacttttgctgactgcactttgcaaattggtcaaaagttatctggaaaatgtgtaacttgtaacccggtagccaagaacatttccaccctttacgagccgggtactcctataaaaagaagctgcaggtgggtcagttgtcagagcaccgaagcgaaagcggtaaagtagccaactgcagttagttatccttttgcgcctcccgaaatattcgatgaatctgtgtaagtgtcccggtaaattgccttgaaggagccgtagctaaagctttcccttgcagcaagcctttttcttttggccctcgtggcatcagtcgctatcggcgctggatctgcccacagaataaacaggcccgaacaggagcccccaaaggagtcgtgccaggttaccaccacaagcccgccgtgtgagacgaccactccaccatgtgctagggaaaccacgacaacaacgtgttcccctactaccacaacaaccacaacgtgttccccaactaccacgactacaacaacaactaccacaacaacaacaaccaccacaactacgacaacaacaactaccaccacaactacgacaacaacgacatgttccccgacaacaaccaccaccacaacaacaacaacgacgacgacgacaacaactactactacgacaaccacgacgacgacaacaacaaccaccaccacgacgacaacgtgtactccaacgacgaccaccaccacaacaactactactacgacaaccacgacaacaacaaccaccacgacgacaacaacaaccacgacgacaacaacaacaaccacaacaacgacgacgacaacaacaacagcatcctgcgaaacaacaacgactgagtctccagaacaacccccctgtgagcccaacgagccgtcaactcctactccagccccaccctctccctctgaacccaacgacccgttaacgcccactccatcaccaccctctccctgtgagcccaacgagccgtcaactcccactccatccccaccctccccctctgagcccaacgagccatcaactccttctccagccccaccttcaccatgtgagcctaacgaaacgacaactccgccaccttcaccttgtgagacgaccaccactacgacaacaaccacaacaacgacgaccaccacgacaacaactacaaccactacaaccaccacgacaacaactacgacaactaccaccacgacgacaacgtgtactccaacgacgacaactaccactacgaccaccacgacaacaacgacgacgacaacaactactactacgacaaccacgacgacgacaacaacctccacaacaacaacaacatcctgcgaaacaacaacgactgaggctccagaacaacccccctgtgagcccaacgagccgtcaacacccactccatccccatcttccccctctgagcccaacgagccgtcaacacccactccatcaccaccctctccctctgagcccaacgagccatcaactccttctccagccccaccttcaccatgtgagcctaatgatacgacaactccgccaccttcaccttgtgagacaaccaccactataacaacgacgaccaccacaacaacaacgacgaccaccacaacaacaacgacgaccaccacaacaacaacgacgaccaccgctacaacaacaataacatcctgtgaaacaacaacgactgaggctccagaacaacccccatgtgagccaaacgagccgtctacacccactccatcccctccttctccctctgagcccaacgagccgtcaacacccactccatccccaccctctccctgtgagcccaacgagacgacaactccgcctccttcaccttgtgagacgacaacatccacgaccaccacaacaacaaccacgaccaccacaacaacaaccacaaccaccacaacaacaaccacgaccaccacaacaacaaccacgaccaccacaacaacaaccactaccaccacaacaacaaccacgactaccacaacaacaacatgtataccaacaacaacaaccactattccacaacagccaccgtgcgaaccaaaaaccacaccaacaccccctccctgcgctcgcaggaccaccaccaccccacctccgtgcgaagagacaacgacacctgcctgcgacaccaagagtgatcagagtggtctagctcaatcgattcccaagccaattaaggatctcttcgctgattcgatcaccaacaccaaagctaccatcccgatcggatccagtgccatgtgcgctggtcgcgcggatggaagtatagtccaggacccgaatcattgcaggaggtactatgaatgccgcgctggacgtcggctgttgcgcaagtgccgcgccggtctgtggtacgattcagaggcaggagaatgccttccacgtagccaggtgttgaactgcccggctcaacgtaactgagacactttagccgactcgacgcaactggaatggtttcagagattgtattgcaacttttatccgtagccaacagtaaacgcctactcaataaacagcatataaatttcacagcaaatgatatttcgtctttgaatttttattcaaaaccccaatttaaatattttcagttctgaaaatcagtaaaaactacacttattccaaaccatctaatgaacttattgaaactgaatagtttcaaagaaaatctacaacttatatgtaaatctcacttcattctattaggtgattttgtgataacatgtatcaaatagttaagaaactatttgataaaaaaatgttgaggtaaaacaatgttgtcgtttaactgaagtagtttaatctgcgcacgaaacattgttaacgcttgacttgattaaaagtcattgactttacacttgtgccaatcaaattgttcattaatgattgcgattacctatagcctatagcctattaagtatttgatttgttctctgccatactggtgagcaccgagcggagaaggtatgtgtgtacacggctactcgtatttaaataatagcacaatgttggacgttattgataagaatgacacgaatctggattcgctctcacatccgctttcgatgattatgttgtccacgaataacccccgaatgggtgtggcctgaactcgcgaccaagatcgttatttcttatcacgccttatcgaggacacttgaatatgcgttttacagaatggaaatcaatttgaaagcgtcgggcaattggtatcaattaaacggcacccacagggggctcattgcatattcattggcacgggactcgggactcgtgcgaaaaaagcaaactagcggaaaataccaccaaaacccgcccgctcttcaatgacaaaagcaggcaaaggtcatgttttgcagagatccgttcggggttcctgtaaatttgcatcggaatagaaaccaaggccgctgggggtcagaaaaagtggaggagaacgaacattgatcacaacgcgtgatcgtgatcggcaatcgccatgatcaagtgcgacggttgacaagcacttgtggccgcaattctctcggactggctgttggatggtctgggaggtaatgagtgggggatgccattctctcattacaattgcaaatctagccaggcacgtgccggctgcatgtgctctgcttcggcggatgggtccaaagatcttgtattgccttaaaaactttatttatagatataaattatttaatgctgttttaggttctttcaattattttctacaatcattgtctcatcccgctccgtattatattatctattttcaggtaaactttttgatttgccaaatatctgctctcttcctggcctcgctatttcggtcgatgctgcatccttcgaaggtttccagcaaattgcgccacacattcgccctatcgattggcctggccttcggctacttttgctttggtcagcaggcaatccacattgccggattgccggcaatatgttacatcgttatccgcacccaagatccacgtattgtccaaaggtaattacaacattggaaagtcgtagcctgtgacttaatatttaacattttagagccgtcctgctggtagccatgagttatctgctgtgcgtacatttgatgcgccagctttacgactacggatcctacgccctggacataaccgggccccttatgatcatcactcagaaggtaaccagcctggcgttcagcattcacgatgggtttgtgcggggcgatgaggtaagtgtacataagtgtacataatcatgagtcctaactcttttttcttcatcctggcaggaactcaccaaagcgcaacagtaccacgccatccgcaaaatgccctctgctttggagtacttctcctacgtgtggcacttccaaagcatcctagccggtcctctcgttttctacaaggattatatcgagtttgtcgaaggctacaatttgcttagtactccaccgggcaatgtaagtttaattatgtcacctgactttctataatcaccgcagtaatttaattagcgatgtgtaggtatgtgagccaagtactcgacctcactctcgtcttgtttatacgaatatagtcttgacgctctttattctcaattcagaaaatgaaaaaatattgtactgcatcaacacaaattatgtgcactttaaaatcaagtcttaaattacaattaattgtgttgtttttttttttttttttcagggaaatctcgacagcagcaagagagaagtagtactggaaccttcgcctactaaagcggtaatacgtaaagtagttggtagtcttgtgtgcgctttcatcttcatgaagttcgtgaaaatatatcccgtgaaagacatgaaggaggatgactttatgaacaataccagcatggtttacaagtactggtacgccatgatggctaccacctgcatacgctttaagtattatcacgcctggctcctagcggatgccatatgcaacaactcaggtctaggtttcaccggctacgataaggatggcaattccaagtgggacctgatatctaacatcaatgtgctgtcgttcgaggtgggaaatgagatgcatatatagcataatttatatatattacaacaatttctttgttgttatcctagttttcaacgaacatgcgcgatgccatcaacaactggaactgcggcaccaaccgctggctgcgaacgcttgtctatgaacgagtgccccagcagtacggcacgctccttaccttcgccctcagcgccgtctggcacggcttttatccgggctactacctgaccttcgccaccggcgctgtcgttgtaacggctgcgcgcaccggccggcgactcttccgtcatcgcttccagagcacgcaggtcacgcgaatgttctacgacatcctcacctgcctgatcacacgcgtcgtactgggctacgccacattcccattcgttctgcttgaatttatggtaagtttgatttgggaattcgatagagaatagagatagaaaggaaacatgctaatatttcatagggagggatatgtgcttaaatgtgttgtattttgaatatcaattggatgcattaggacatttggcaaaacaatgtgggtaaccgcagatttgaagcaaaactagattcatagatttaaaactagatttattgtatacggttaaaataaattcaaaataataatatgttcagggcattgtagaaaaagtataatattaagggaataatggctaaacattttttcattaattacttgcaggatatttcttctatttcttagcataaacatgaatccactcactctacattaaattatatttatttaaacgtcacatattaatcgaattcacgttttcgctttacagggcagcatcaaattgtacctgagattttatttgtgccttcacatcatttcactagtgaccatatttattttacccaagtttatacgcggcgaacgccggcttcggacgtcgaatggcaacggaaacgtgcgcttgtcgggcagcggcaataccaaggatgcagtgaccactagtgtggagtctacggcagccctaaccgctggcaatgatctcaacgaggataaagaggaggataaacacgctcaatgtaaagtccacacgcccacacaacagcagccagctgctggcccacacaaaacaaccgtagaacaaccaaccgagcaaccaaacaatgtaaatcttcgatcacgcccacagcagcagcagccacatctcgaaaagaaggcaatgccgcccacatgcgcccgggacgcggttagtgttcctcatgaccaatgcgagatggatcagttgtccagcaagcttaaggagaagatcgaggcggagaccaaaaacatagaggagtttattgataagactgttaccgaaaccgtgagcggcattgtagagttcaagaacgacctgatgcgggacatcgagttccccaagttaaagctacccggcagcaacggggcaatttctttggactcttcaaatggcggtgggctgcgcaagcgcaacatatcctctgtccatgacaatggcacagatcctggccatgctaccgctgacctccatcctcctctcgaggagaatggcgccgcctttctaaagaaggagatcgaggtaatcaacgcggtggtgcaacaagcagtgccggcagtgcttagcaacggtcatgcaaaatagtagcattggccagcaagtgtgaggagatcgaacaaaacaacgaggacgagggtggaacggcagggattggaggcagtcaggggccaaaatgggtgctccatatctgattgattgattaatatatacactgcgagaattatccaatgcgcacacgatattcgcacactccaaacaattgcaacaacttttgggtttctcatttaataaatcgttttcgttgacaatcctgaagtaaagaaattgtttaccctaatgcaagtttttaggacggctgattattaaagaaataactaaaatacactaacatactcgatatgttcatcagcagctaatacccttgtttaaatgtgcacaaagtctctaattgttgttgaaaaaatctatatacttttatagttgtttatttgttaatatcccatggcctgatacgaacagtgcgttttaaccatacccgacacatatccgctagagtaattaaaatcctgaaaaagttaagaaaatcgacaggtatgtatgcacgtcgattaccagacaagggaaggcagccaaaactttttgataagtttattttaaaaaagaaacccagaacaagaaaactaaaaacgcactgtttgagtcacgacttttatcgaaaactaatccatatatatgtaaaagcctgcatatgttaaaatgtttaccatatagtctatgtgcgaactaaaaaaaatttttcagtatcattactattgtagttcaaatcccgcccgaaggaacaacaacgtgacaagtagaaccaatgttatcatcttcaatttaaaaacaaaagcctaaacaaaagtcaaccaaatcctaactttagactgaagctattgacatttactaagcaaacaaaaagcagaacgtgcgtagataaagttagttagtaagccgtcaagttgattttgatattatatttaaaccaattcttgtacaagtgcgtaagagtgtctggacaggagtaccggcatgctccacattt

SEQ ID NO: 27773 - DNA, 2397 bp, DROSOPHILA
actcgatccaaacagacaaacgttcaaaattattgcacaaaattataagtaaacaccccgcgtccaccccaccgcccatattgggtacctcgtgttttcggtggttccctgaaataccggaaaagtgtctgttaatcgtgaagttttcctaatgaagcactgaaacagaacgaccgacagcaacaacaacgcaacagaaaagagtggataaagaaaacagacagcaaaatgctagaaccgccgaaatttatagagaatgattgctacaacggcagccggaccttcacttggctggcggatatggtgggcctctccgtggacttggtaaactttttgatttgccaaatatctgctctcttcctggcctcgctatttcggtcgatgctgcatccttcgaaggtttccagcaaattgcgccacacattcgccctatcgattggcctggccttcggctacttttgctttggtcagcaggcaatccacattgccggattgccggcaatatgttacatcgttatccgcacccaagatccacgtattgtccaaagagccgtcctgctggtagccatgagttatctgctgtgcgtacatttgatgcgccagctttacgactacggatcctacgccctggacataaccgggccccttatgatcatcactcagaaggtaaccagcctggcgttcagcattcacgatgggtttgtgcggggcgatgaggaactcaccaaagcgcaacagtaccacgccatccgcaaaatgccctctgctttggagtacttctcctacgtgtggcacttccaaagcatcctagccggtcctctcgttttctacaaggattatatcgagtttgtcgaaggctacaatttgcttagtactccaccgggcaatggaaatctcgacagcagcaagagagaagtagtactggaaccttcgcctactaaagcggtaatacgtaaagtagttggtagtcttgtgtgcgctttcatcttcatgaagttcgtgaaaatatatcccgtgaaagacatgaaggaggatgactttatgaacaataccagcatggtttacaagtactggtacgccatgatggctaccacctgcatacgctttaagtattatcacgcctggctcctagcggatgccatatgcaacaactcaggtctaggtttcaccggctacgataaggatggcaattccaagtgggacctgatatctaacatcaatgtgctgtcgttcgagttttcaacgaacatgcgcgatgccatcaacaactggaactgcggcaccaaccgctggctgcgaacgcttgtctatgaacgagtgccccagcagtacggcacgctccttaccttcgccctcagcgccgtctggcacggcttttatccgggctactacctgaccttcgccaccggcgctgtcgttgtaacggctgcgcgcaccggccggcgactcttccgtcatcgcttccagagcacgcaggtcacgcgaatgttctacgacatcctcacctgcctgatcacacgcgtcgtactgggctacgccacattcccattcgttctgcttgaatttatgggcagcatcaaattgtacctgagattttatttgtgccttcacatcatttcactagtgaccatatttattttacccaagtttatacgcggcgaacgccggcttcggacgtcgaatggcaacggaaacgtgcgcttgtcgggcagcggcaataccaaggatgcagtgaccactagtgtggagtctacggcagccctaaccgctggcaatgatctcaacgaggataaagaggaggataaacacgctcaatgtaaagtccacacgcccacacaacagcagccagctgctggcccacacaaaacaaccgtagaacaaccaaccgagcaaccaaacaatgtaaatcttcgatcacgcccacagcagcagcagccacatctcgaaaagaaggcaatgccgcccacatgcgcccgggacgcggttagtgttcctcatgaccaatgcgagatggatcagttgtccagcaagcttaaggagaagatcgaggcggagaccaaaaacatagaggagtttattgataagactgttaccgaaaccgtgagcggcattgtagagttcaagaacgacctgatgcgggacatcgagttccccaagttaaagctacccggcagcaacggggcaatttctttggactcttcaaatggcggtgggctgcgcaagcgcaacatatcctctgtccatgacaatggcacagatcctggccatgctaccgctgacctccatcctcctctcgaggagaatggcgccgcctttctaaagaaggagatcgaggtaatcaacgcggtggtgcaacaagcagtgccggcagtgcttagcaacggtcatgcaaaatag

SEQ ID NO: 27774 - protein, 722 aa, DROSOPHILA
MLEPPKFIENDCYNGSRTFTWLADMVGLSVDLVNFLICQISALFLASLFRSMLHPSKVSSKLRHTFALSIGLAFGYFCFGQQAIHIAGLPAICYIVIRTQDPRIVQRAVLLVAMSYLLCVHLMRQLYDYGSYALDITGPLMIITQKVTSLAFSIHDGFVRGDEELTKAQQYHAIRKMPSALEYFSYVWHFQSILAGPLVFYKDYIEFVEGYNLLSTPPGNGNLDSSKREVVLEPSPTKAVIRKVVGSLVCAFIFMKFVKIYPVKDMKEDDFMNNTSMVYKYWYAMMATTCIRFKYYHAWLLADAICNNSGLGFTGYDKDGNSKWDLISNINVLSFEFSTNMRDAINNWNCGTNRWLRTLVYERVPQQYGTLLTFALSAVWHGFYPGYYLTFATGAVVVTAARTGRRLFRHRFQSTQVTRMFYDILTCLITRVVLGYATFPFVLLEFMGSIKLYLRFYLCLHIISLVTIFILPKFIRGERRLRTSNGNGNVRLSGSGNTKDAVTTSVESTAALTAGNDLNEDKEEDKHAQCKVHTPTQQQPAAGPHKTTVEQPTEQPNNVNLRSRPQQQQPHLEKKAMPPTCARDAVSVPHDQCEMDQLSSKLKEKIEAETKNIEEFIDKTVTETVSGIVEFKNDLMRDIEFPKLKLPGSNGAISLDSSNGGGLRKRNISSVHDNGTDPGHATADLHPPLEENGAAFLKKEIEVINAVVQQAVPAVLSNGHAK

SEQ ID NO: 27775 - DNA, 3020 bp, DROSOPHILA
tataaccaaagctgtataaatagtatttagattgcttaccaatataaatatctaaataaaatgtaaatgaaacattcgctagcagtcgatctctttagttcttgcatttcactttaagatttgaatcagatagtttatcttttcaacaacatctcgttgagaggataactttagccaaaatgaaagcgcctgtgcgcagctgtaataatacaaatgtttggccatttttatgcatattttcactgctcattaaactggcttaactaccaacatttataattcacttcccttccgtttctggtcgttgtgctttcctatttatatcctggctaacttgagtttccacttgcgttttatttttcagctgtgcaacaaagttggcagcccataaaaatgctctggactggagtgggcgtaaattagcagccacatcaatttcagcgcggcgagtcaaacttaattaaaacgcgtgttggccagacaaattttcggaccctgtggagacttaattgaaatttaaccaaccgctcgcaccgcgaagcaaatgctttggctggcagtgctcctccaggctctgctgcccggctagattgccgatttccgtgcccacgtccatgccgatgtctatgtccaagtccttgccacactgatcgcccactgcagctgaagtgcaccaggaataacgatgccaccgctgctgcttgcgttcatgttgctgctgcagcagcaacaattgctggcaggcagcgcgaccgaccagcaattagccggagcgactgatgacggaaggtcggccgccgcattaagtgacaatttaaattcaacgcttgtactgctagctggtaaaaccataaaagccattgagcgacagacgaaagctgcagataggatggcaggcggcgcgacggataagttgcaagtgacacctgcaaaccaattacctgcgaacacagcggctacctccactcgcccagctgtgctccgtactttggattcctttatggccgccacaatggcaaccggaaaccagttgggaccaggcgcaccaagggggataaaaagtgcggcaaccttagaagcaagctcgacgacaacagcacctccacgagcagcaggtgtgtcagtagcagcagcaacatcagcaccagcagcaacagcagcaacagcagcatcagcagcaataactgcagcaattcaagccacggcagcaacatcgccgactcgggagcaacacacgctgcccccacgtcccgcagtggggcaaatggcacggataaatgtagcagcaataatagaagaccaaattggaagagcagtgattccgagcacaacaaacaaggccgagacaccagcaacaccctctaccacatccacgtccactcccacgacagaaataatactagcaaaaacaaagcgcagcgagtcggacaagaccaataagattggccagagtgttcagagggacgatataaaattcaatccggatgccgaactaacccatggctatgcaaatgccacagaggcgtggccaacaatgacaactgccaatattgtggcagcgccagcagcaccgaccatatcgccggcaataacgagcacggcgaccaggattggtggcaaggcggtgcccacgcctcggttactcggatccggtgcggcgaatgtggcccagatactggccaagtctctggacagtccgtccccatcatcgtcatccggctggccggttaagcatgccgctgtgctcgagggcgatgttatattgggcggcctgatgatggtccactcgcgcgaggacagcatcacttgcggacccataatgccgcagggcggcatccaggccttggaggcgatgctatacaccttggaccaggtgaacaagcaacagctgctgccgaacgtcactctgggcgcccacctgctcgacgattgcgacaaggacacctacggcctggaaatggcagtcgactttattaaaggtaagtgcatcccgcttttccgcgctttcccaattaagtgaaatctgaaatgggcttgaaaatgtatttaataataattacgctcctaattaataaacgaagaatttaacaatttgctaaatgtgccgttcctgaaattgaatttaatatttctaagtagtacaataatatataaataataaagtgagagtttgaatcaacaattatatttttctttatatttttttaacgctgacataatgctgatattaatgtataataatttcacaatttaaaaaaaatttctgtttttaataaagttaaatatggttgtaaaatatgtttaaagtttataaaataaatgcgtttaaattgctaaatggaaccttttccttttgacaaatttacaaagagccgaattttatgtttcttcaagctattcggcaatttacggctaaacaactttttcctttcatttattaaactttttctgttgcaacattttttttttcaaattacagcttttattttgatttgtgtggcaggtcataaattaggaaaaagttgcttccaggatggtataccacagtattgtggcttaccaaatagcaattgccatacggataaagctcagaaacgttttaattatactattaagattaaactccgctcttttaccagcaatgtagagaatggctttaaaaaatagttacttgtttcgtttgcaagaccaaattaagtctttccttttatttattatatacggcagtcttcgattttttccacaaaagcctcgtgtgaggcagcctttaaaatggtttgtttgattgcttggaaaaaagtgcatatatcacacatttatgcattttgacagcgtgtaaataatacttgtgggtggctctacccagccaagccgtggtcagattttttaaagttttaatccagaaaaaagtgtgaaatgaaatataaatgtaaaataatatttacaaagggcgagataaggttaagcgtctgaaacgagtgttaaatccaaatgagaatctcagaatccgtgtaagtgta

SEQ ID NO: 27776 - DNA, 1020 bp, DROSOPHILA
atggccgccacaatggcaaccggaaaccagttgggaccaggcgcaccaagggggataaaaagtgcggcaaccttagaagcaagctcgacgacaacagcacctccacgagcagcaggtgtgtcagtagcagcagcaacatcagcaccagcagcaacagcagcaacagcagcatcagcagcaataactgcagcaattcaagccacggcagcaacatcgccgactcgggagcaacacacgctgcccccacgtcccgcagtggggcaaatggcacggataaatgtagcagcaataatagaagaccaaattggaagagcagtgattccgagcacaacaaacaaggccgagacaccagcaacaccctctaccacatccacgtccactcccacgacagaaataatactagcaaaaacaaagcgcagcgagtcggacaagaccaataagattggccagagtgttcagagggacgatataaaattcaatccggatgccgaactaacccatggctatgcaaatgccacagaggcgtggccaacaatgacaactgccaatattgtggcagcgccagcagcaccgaccatatcgccggcaataacgagcacggcgaccaggattggtggcaaggcggtgcccacgcctcggttactcggatccggtgcggcgaatgtggcccagatactggccaagtctctggacagtccgtccccatcatcgtcatccggctggccggttaagcatgccgctgtgctcgagggcgatgttatattgggcggcctgatgatggtccactcgcgcgaggacagcatcacttgcggacccataatgccgcagggcggcatccaggccttggaggcgatgctatacaccttggaccaggtgaacaagcaacagctgctgccgaacgtcactctgggcgcccacctgctcgacgattgcgacaaggacacctacggcctggaaatggcagtcgactttattaaaggtaagtgcatcccgcttttccgcgctttcccaattaagtga

SEQ ID NO: 27777 - protein, 339 aa, DROSOPHILA
MAATMATGNQLGPGAPRGIKSAATLEASSTTTAPPRAAGVSVAAATSAPAATAATAASAAITAAIQATAATSPTREQHTLPPRPAVGQMARINVAAIIEDQIGRAVIPSTTNKAETPATPSTTSTSTPTTEIILAKTKRSESDKTNKIGQSVQRDDIKFNPDAELTHGYANATEAWPTMTTANIVAAPAAPTISPAITSTATRIGGKAVPTPRLLGSGAANVAQILAKSLDSPSPSSSSGWPVKHAAVLEGDVILGGLMMVHSREDSITCGPIMPQGGIQALEAMLYTLDQVNKQQLLPNVTLGAHLLDDCDKDTYGLEMAVDFIKGKCIPLFRAFPIK

SEQ ID NO: 27778 - DNA, 2760 bp, DROSOPHILA
agttttccaaaatagccaattcattccattcgcactccacaatccacaatccacaatccacactttccaaattcaaaatgctgttaaaacgctgcgggaaaaccctaatgccagtcgtcgtccgattggccagctgtgccagctccaagggcggcacctcggactccaagtgcaactccaattcgaaggataaatgcaagccggagcccagctgcaagcgctccgcgaagaggaagaactgctccaaggtcccaacaccattcccgagctactcggagtgcaagcgaaaacagactgaccctaatccttccaaggagtgcgattgctgggactttgacaagtgctgatccccggcaatttggataccggagctccggggatgtctctcgcttatggccctcccacattttcattccataagactgaggactctgtactcataatcccgttggtggcactgggagcctaggtgttttgtccatgtccaacctttgcagttatcctggacgcctattataaagctttaatccacgtcaaactgaccgacgttgaacgaaatacaagaactaaaaaagtttcaatcattgatttttaattaactggatgggcaatagggttccatcaaagatattagaatttctagtgccttcggttccatactcgaatcgatatttaataattccatatttaagctgctaatgcaacatcatttatgtactaaggagtttaatttgcaggcggcgaccgattggtcccgaaaggcatattcttgttacttttttaatttttgaaaaaatagttttccgataatccgaaaaccacatgggtattcgacagatcgagtaggcaaaccgtcgacaatcaccaaaaaccatgtgcgtatttgaaagatcgaattttaaatctatctagtaagccctgcattttcatttccccactagtttttcccaatactttcattttcattcttggctttcacacataacaatctatatgttccggtctacaaaatttaatatatgtttattatctcttctgaaaacttgtagtttacttaaaaactaaaaaaaatcaaaatcataaatcaaatcaaaataaatcatattgaaacacaatgaattcgacaaaagctttgttaagcagcaggatagtggccttcggacttgaaaatctggtgacgcgtcgcggaatgaagcagttacgtttggatgaaattcactacaaactcaactccaatcaagagcgaaaccaccagagaacttggccacaatcacagatgcagccgcagattgaggagcgcatggatgacaccaaatacaggccaggtcgttggacggagcggaaatatcaggccacctggcgggaagctgtcatcccaaatgaggaagcccataaggaggcgaaggactcgcgttcacaggaggagcgaccccacattcgtgaactccgccgaactaccgaccccaataggcgcctccagaggatcgcaatgcctgctaaacaattcatctcgcagtttatctccacccaaagcaaaaacaaaaggcgttacgtagaagctgcatcagatcgaatggcgtttgatggatactagctgatacacggcttgttttcgctatcaacttcgatcttaactattgtggatttaatttgcctttgcctcatatgttagatgtcgagttttagtttaaagtcgaataggttttctgtgttgtataacagtagaaacaaaatcaaattaaatttgcaatctttaagataattgtttgtttgtgttttatggtattaaggggtttttgatggcgttttaaaaaaatatcgtgtgtaatttatgcacttttgggcaggtaaagtcgaaaaaacataattaattccattaagcaattatttagcggtgcatggagagaatgctacagtcgagttactcgactatcagatacctgttactcagctagtgacaatgcgaacgcgtaatatcgtttttttttctggcatattaatagatattagggagtaaaatgagataaaattaataacattgttcaaaagtgtgggcgtagcagttttaggcgtcttgaaggcgttagaagaggcgtggctatgtaaaaaaatataacagcattttgcaaaagtgtggtgacagatttaggcaaatcgatagaaaagaatgaaaaaatatcagaacattttccaaaagtgtggaaaaagtgtggcagcatgggccaacaaacatgtgctgttatcgttattagttccagagatcgaggttttcataaggacagatatatatacatatatactttttaaggtcggaaacactaccaatctagtaacaagaatcgcagccacccgagtaacttgcttcaaatgacaacatttgtggaacgatcacattccgttacaacgctcatgatgaaaatttcgcagtgactcccagttttcgtttatattttaaaccaggacaaaatttttgcagtgtgtacggcatttttgcaacatagtttatactccactttgaatccggcttcattgaaacaatgatgctggccaagaacacgctctcccgagcaccggttgccataaggagtggattgacgtcaaggaccattcaggtgcgcatggagtcgttgttcgatccgtatgaatttggtgcgcccacgatggccaccgaacgaaaggatctgaaaaagaatgatcccgcggacaacaccaaggtgccggtcaaggacatctgctggatgtcgatgcggcgcagtgagt

SEQ ID NO: 27779 - DNA, 760 bp, DROSOPHILA
ggtctacaaaatttaatatatgtttattatctcttctgaaaacttgtagtttacttaaaaactaaaaaaaatcaaaatcataaatcaaatcaaaataaatcatattgaaacacaatgaattcgacaaaagctttgttaagcagcaggatagtggccttcggacttgaaaatctggtgacgcgtcgcggaatgaagcagttacgtttggatgaaattcactacaaactcaactccaatcaagagcgaaaccaccagagaacttggccacaatcacagatgcagccgcagattgaggagcgcatggatgacaccaaatacaggccaggtcgttggacggagcggaaatatcaggccacctggcgggaagctgtcatcccaaatgaggaagcccataaggaggcgaaggactcgcgttcacaggaggagcgaccccacattcgtgaactccgccgaactaccgaccccaataggcgcctccagaggatcgcaatgcctgctaaacaattcatctcgcagtttatctccacccaaagcaaaaacaaaaggcgttacgtagaagctgcatcagatcgaatggcgtttgatggatactagctgatacacggcttgttttcgctatcaacttcgatcttaactattgtggatttaatttgcctttgcctcatatgttagatgtcgagttttagtttaaagtcgaataggttttctgtgttgtataacagtagaaacaaaatcaaattaaatttgcaatctttaagat

SEQ ID NO: 27780 - protein, 115 aa, DROSOPHILA
MKFTTNSTPIKSETTRELGHNHRCSRRLRSAWMTPNTGQVVGRSGNIRPPGGKLSSQMRKPIRRRRTRVHRRSDPTFVNSAELPTPIGASRGSQCLLNNSSRSLSPPKAKTKGVT

SEQ ID NO: 27781 - DNA, 12536 bp, DROSOPHILA
aggttgtggattcggttgtgctggatgtgaatgtggatgcatcgtgtgtttgcccacagcattggatattttcataaggcagctaagtaaaccactcaagtaggacatggcaaggccggacatgtcatcgctggcgccatccgccgacgccatcggctcggttctgggttctgtgctctcctccgtcctcggatctcggtgctcagttcccagttcagttgggctggagtgagtgagaggctaccactgccactggccctgccactgccagcgatcttggatgttgttctttcccctcggacttgtggctgtttacacagaaactgatattttatttcaaaatatcaacagacatcggggaacacaatggcaacagcgggagcaacattagcagcagatgaatagttgggagtatcagcccgtggaaaggaaatgttcctctccccttgcagtttttccactttccaccgactgtttacccagcagtctgtgtttttttttcgaagaaaagaaagttagctatgtaatgtgcaggacattcagacatttatattcttgcttattgatttttaggcagaagcatattctggtcataaaaacattggttcaaacggtatttagtaattttagtaattgatataagtaagctttaaattattcccacattacacttatgaacgaccaaaaactaatatatttgaaatattcatattcatttcgattttaattagctggtaaggatattcataaggagctattaccattcatttgaaaataattaatacagaaattcatataaatataatcattttcactctgattcgattcccaccttatatctcaaaagaaagaacgcatttttgtataatgattcaaattcttaactgttcattcggttttattgcaatctaattgtatacgtaagctctatgatttgcatacttaaactctatttacaaatacgtacacacacacaaaattagaatgaaaacgtctcgaattcaatttcagttttggggccactgggaccgccatctgtattagctctaaatctgtatctcagtttccatccggcttaaatggctatctttgaagagtgagtgtgcgacgcttgcgatttgctgctgctggataacggtataggtataggtataggtaaaggtatggtaattatgggccatgatataggaaacagttccggttcgaatattgctcgaactccgccgctgggatgcgcttaactacgggctaacttagaaatacaattgaaacaatctgaatagctgggccttagtgcttcggagcttgtgaggattgggatttgggatttcggtttggggttgttgatttagtctgggtggggttacaggtggacacctcagacccgctgatatcatgtgatctcgggagcactgtgcttcagctccggcgacgtggagaagggccgatgcagcatcagttggccactgtgatggtagccggtcgtggtgggctcatggtgttggttgccacctcctcctccgacggatgctgccgccgccactgccgtggagttgagcttctccggggagttgatcctcagcttcggcggcggatgcggtggtccatgaccacctggaacgcactccacactgtaggcagccgcgtaggccgggtgatgcagtggcggtccgccggatgcgccgttcagtgccagcgactgcggcagctgcggatgcggacgcaggacaatcggctggatgggaaactgctgcgacatctccttcaggttgctgaagctctgcaggtaacagccggcgctgaacagactggtggccgcgtccagcttgaagggtggcagacagcccggaccggtcagaggtcctccgggtcctgcgcccgccccgcccccgtagcccggcggcagttggggcggcgtgtgggtgggcgaggccagcggcaggggcagcgagaggggcagtggcagcgatccgctcagatcccgcggcttgtcgtcgtccacgctcaagctctcctcgcggtcgttggcgccgttggaggtgctgcccggactatgctgcagctgcaggctgctcggcaccggcgagtgggtgcccagtgagatgtccgagtcggagctgtccgacggcgttggtgaggcagctccgtccgcccgccggctccgacagcccattcccgagctgttctggctatgctggatgctgtaaataggcggaagcggagggaatatgttaataatctatataatttatataatttataaaactatagcttgaccttatttatcgagctagcaatgctcttgcaatgtgtaaattccacattaaacattcagctaattgtaagtatttggaaaacgtaaaataatgtaaatggaaagttttaaatcttgttgccttgactagtccagcaaaggtattaaaagtatattaatcattatagggtcagtatttcaacattctcttgacagaccttttatctggcctgttagggctattttggagtgaatttatagtgtttaaatgtttaactttagctaaaagccgtagctgatcgaataatgctgatagaatttaagacgttccctaggcccttccctacgccattctctgcgccagatgaagacatcaaggcatcggcatcgggatcgggatcgggatcgtcggcatcgttaattagttgatgctggacagttgcagtggccgcggctaaacgcccattaaggcggcccatttgtcgttgcctccggagcaacggggggctcgaaggagcaggggggaagcacataaatctgacacaactttcacacatgcttaagataaatcgtctgtggcgaaaacaaaaggcgcgccatctgaacagaagatgacttgattagccgccatggatttaacaccggcagcgggcaggagatcccaacctggccagcaatgggcggaggagcattctcatatacatcatcatttgccatcacgccatgactcctgcaatgtcataattatcggttaggattcgctcaacttgctgcaatttgttccccttctggctgcctttggctgcccccgagatcctggagcggctcgtgttgtgtgattaatggtgctccagcggcatgggcaccctggttgcgggagcagggacaccaccaacatcaccaccatcaccaccaccgcgactcagttggagctgcgaaatgtatctgcggctacctttctgggccctttgtctcagagggagcagtaaatcgtttagttgcctaatgtgccaacttgatggatcactcacagtccgatgaattgctggccaagagatcgggacttcccgctgctgggatacttctcaaaaaagggctttccgattagaaaggttttatcggctcgttttttgtgttctcagctattggatttgggtgctcgtaattggaacctaactatgggaacttggacatatatggctgtgtgtggtgggtctgggaggtgaaactctagaagtagctcatgaaaacctttaagggaggagcttagagtctcctaactttttacttcgatttaccagaacaaaatggtgtttcgatgagaaaggtatttgattctcttttcccgaatgtttcgcttatatgatatggttaattgaagttgtaaggcagtggattatgattttctacaatagatgggtaccaaagataaaattattaattgagcaacgggatcacttgattgtcagaaccatgtcttatgaatataatgtaatccaaatataaaataaagaattatatttattaaaacgattcccataggtaaggttacttatgacacatcaatctgaattaataatcttaaaaggtttggttattatacttctcagaaatggtaatttgagcccgtattatagtattgggtcgatgagatgaaatcttaagccaaagcccacgatgctggaatccttgcgagagcttctggtagccagatttttggcacgggcgactcaaggccattttcacgcacgaatggagcgactggagttgctggaacttggcacgctcggcttgagccgagaaaccgaaaacttggatgcacgaatatgatatacattttccacacaattgactagccagcgagaggtttacggcgaatgtgaagccaagggacagggacaagggcaaggacaagggcaaaggcaaagggttgagtgaaatcggataccctgtggcacctaacctaaccgaagtgacacgtatgtaattacccgcctgaacatggccagtcggaggagctggctgtgcggagtaacccgagatgcattgaaatgctccttaatcggctcatgtcagaagatggggattccgattcgactcgattcaattcgattcgagtcgagtcgaacttaaacccattcaggctgcaaagaatgccagcggagtaacacgatccgctaggccaacaaaagatgcccggtattaaagatgtggcttaaggaccgaaaagcagctagaatggaataggtggggaaatcaatgaacctgtaggtaacacagagtcaatagcgcgacaaaatcagacggaaaattgcagcgctctgctcgagtatttttctaataattgtgtcaattcaaattgaatgccgtaaattgtgtaaatatttggacaggcgcgagcagttagcagttggcaataagagcagtctgtagtcccaagggttcctaaatgcaatcaacatttattttatatttattccccttctctcgccacggagatctgttgacaaacgggatttaaatttgctcgcatttgaatatttcacttccaacccttggagcggagtgccctgttccgccgcctgtccgcttatttgtcgagcctctttcacttgtcaagtgaacaaaggccacatccggtgatgctgcctgcccaaccatccagccatccaaccagccagccatccaatcatccagccatcctatcctatcctatccaactggctagccgtcgatgaagagtcatccgcctgccgatgatgatgactcgaagctgacttcttattaatttctttaatacactttctatgcggcattgaagtgtccgacattgaagcttcgcttccattcagctcattctggcagttcagatacgaatacacagagagaaatcaaatttgctttggttaatggttttcaaaatatttgtatcgataaccatttaagttgagcataagactgctgagcatatgactactttgttgctatgatgtatcataaatggcccaagttcttctttgtgtaacttctgggtaacttcagcttctgctcccattggagagctgattgtatatttttctcacaagccaccgaaaacggtagttggtgttgtgcaaacagcgtcgagtggtccgagttcagctccctccgatcgcatggagctgggcatgggcatggatggtatgggtacttatggctctcgagagccctgtccgagcgctcggacaagtgggccctccgattcggatattgacaatggttggggttggagatggagttggggatggggatgggaaaatcagcttctgcatcttcctttcttcattagaattcgagagaggctgggaatcgatggacgaaaacctcttcaagtttggtccctgtacatcgtacgatatgtgctgtccccaagtgcgtgtttgttgatttgattgataattgacatttacaacatatttgctgggtgctcaactttattacacttagcccgcaacccgaataatgttggctgaacgattcgatttcgtgttctggacaaatcgctcgctcaacgacgcccactgtgctcctaatttggccagcgcttctgggctcgagatgcttggatggatggatggatggatggatgactggttgcatgtgggcgaatctcatcttatatccatctccagtggctgtccacgagccacgcatttcgctcgccgggtaattcacgcaataaaaccatcggcgcgaggcggattcggtggattgaatggattcactttattcacttgattcgggggctccgtttggccaagagtttcgccgtatcgctgtcgtgcatcgtcgagtggcaattgtaattgatcaaaatcaagtctcgagccggggtttgggcttaatgaatttgcacaatatgttagaagcttctcgttttgttttctccaatgatttgtgaaatcttctgtgactcagccattaatgggcgcatcgaatcttcttaatccattcaactagcaatgacagtatcattaacattaacattcgaaattgatgttttacaacttaggatgtgttattaaagcatttgtactatgattttagtaaggaaagtatcaatagtacgatctgggtagatgttttcatgtatgtaatgtacatacatatgtattataatcgaaaaaattctagaattcttctcaaacaaagtcagttataactgaatcaatatccagttttagtaatgccagataaattacgttcccatccgctcttcaatgggcattgcacgcctcgagggttccgctgaatcagacaaatggtgatgactggggcatctgtgaggtacggcaggccattcagatgcctgcccagaattcctgtataatgcgcggcaatcttgattttgaatatcttgcaactgcaactgcgactgcactgcactccacttgcaatggccacttggtggttggaggcatcagagcatgacaagtcagcagcgccaagtttccgccgtaacgactcaagtcgagttgagtcgatcaatctccgatgtcttaattactcaattcgggagcgggaaacgcgccgagccgctgcctttctccgcggagcctttctaatagagtggattgcattggagctgtgcatttgattgatttaccatctcgtccggagcagcaaacagccgtttgacatcgcggctccttctgccttcacgatctcgtttcccagctccagctgccatatccatgcccttactcggagcacttctgttctggccaagagttggcagctttaaggcagctttctttaaccaaagatactaatactttatgtatcttattaaaggtagcagatactttgtaaggaggatcaagggattcagttcattaagttctcttcacttattccattggaattagagctcttaatgaataatgatttaaatgattgtgaatagtgccatctcacttataacctagccatctttaaccaactagttgtttttgggtgaaaagtatctgggcaagggtgtgcaaagattcggttaggaaactcatcttgctgctcgcgattccgacttctccgcctgtcgcattcggttcgcacaagtgcagtagcaaaaatgttaacaatttttcagcgcacaatgcttgaacagtcagcgcctggtggtttgggtcgggttgtcggttagaatgggtctggaaccccctctccgctgcccacggaggccgcgttgaggacgcccctgtctgccgcctggcgctgtcgaagtcttgtctggccgtcgcatatgaacggcttttaatttcatattttttatatggccatacttggtgtttcgtatcgccagtgcgcctttttgtctcatctctggggcttttgctgtgccgccgctgcttaataacacgatgactacacgaaaccgcggagccaaaaactcgaacctcaaattcgagttgggatccgcggatctggggatctggggatctggggatcggggatcggcggatctgcggatagagtgcggatggagttgtaatggccgcgtatccgtggctgctgccgctttacaagcgaaataatcgccatcattttaactaatgacccgctcgcatctggtttttattcgtatttgtatactacttattttattttgtttggcggcgatgccatacgcttggcgctttgtgcagattcattcaatttgagacgagaccgctgccgaagctgctcctaacttaataaacacggctctttggatgggatctcggagctctcggctctgggatgtgttggtgtgttgctgtggggctgccaggtttccgaggaatgccaaatgttgtctcgatttcttttacttttcctttttcctctttgctctttttgtgagcaggtagaacttgaaatatttgcgcatctgcaggagcagccaaacacttgagtggactacgatttcgactccagatctgcgactccagtccagtccagtgcagctccgactccgaatccggatttcttgcagtgtcattccacttaacttgccttctttcacttcgagcggatcttcttcatttcaacttcgcgcgaattggtcgagttttaacttctcctgcccattttcgcaagcggttgcacctttccagctgaagcatgagctgcatttacactgtcatcatcgtcatgaaccatcgctatcatgatcgtcatctctgttcgttgtctccttcaccattacgtccaggccaagatccatacccataccaatactcatacccataaccaagcccaaacccatcgtcatcgtcggcggtcagtttaatgtggccaaaaagcgacgaccgcaacaaacagcagaaatcgagaacgcttcactgggtgccgccaccgctgccgcagatcggcacggatcaatgaaatggaaacgctcctgtgcgacccccccacggcatccaactcgtccacctcacccactgcacccactctccggaggatgatatccgcttacccggccccgatcgggttaccagcccatccagggcccagaccccagacccgtctaactcccaactccaatggctaattgaagcggtccatggtcgataacttaccgattcttggccgcagcagcccgatcccgctggcggcggttcttgaaccagttgcccacttgcgtgggattcaggccggtggccttggccagctcccgcttcttggtgggattcgggtagggatcctgtaggtaccattcgcgcagtaggctccgcgtgcgctccttgaagcagtgcgtcttctgctcgccatcccagatcgtcggcggcagggggaacttctttcgcacccgatacttgtccacggggcctgcaagtttcaattgcaattggattaattaaaataattttaatttttgtctaattttacagtagttttgtttgaacaaatgctggcaatagctttctgaaattttcattagggagtttgaaactcctcgctctaaaaacaattgtcttgattgctacaattcattagagatttttttacatcaactatttgtgtactgattattcgatttcattcaagttttttctaaaaggatcgttttaaacagcgagtttaaagtgtgtctattatatattcaaaaacaattgtattgctttatttgttacttggattgtaaatatcatcgtaaaatatcaaagaaatattacaagtaacaattatgaaaaatatttgtaaaactggtttgaacatcttaaagtaaaatatacgagcgtaaatttctgaatatgttattacataatcattacataattaagcactgaaaaactggtctatacccaatacatacagttagagaattagctaaatatcaaaaattgttcaaacactttgaatcgatgttcagtgacgactttttaagtatcgaatttaaagtaagctctgttttagtcatttaactgagtcaataatacaattagaattataaataatctgttaatccttcttattactatgatcggattttctaaaacacgtttagtatttattcgaccgcttttcaatgcatttgaaataacaaatatgtgtaatcaatatgcttaatgaaaacatttcgtggtgttatagtaaaacttaaacttgtatttctacgtttgtgtttgaaattccctcatatttttttcagcattttatcacgacatctatcttggaagtgaatgccttactcacccagtgatcgaccgcgcagcttctcggcctcaatgtagtgggcctccagccacatggcctgcagtttgccgtaggacgccttagtaaacttatgattctctattattgcataaagttccctgaaaagaggtggtccagtgtgagtgttagtatccggagttgagcttaaagttaatgcgctgaatttgccatcacgatttcaaccccatcaaccacccctgggtcctttggacttttgggacacttgggacttcccgctgcgaaagccatccccgcctccgagtttctacacccctcgacactcgacgctcgacaggcgtccatatgtattttgaaacaatttcataagcatttattgtcgtcactggtgctgacagctcggttgagtacgtcaaatggttttaattggaagtcgtttatttaccaagtcaaagcaatcaaatcacttgcatagcatcgccagatccgtaagagtatatgcacgaacaggccatatatgtactgtatctggacattgattgattatactcgaattacacggccgtgtgctcgagctgcagtcagatgagatgcaaaacctgatgcaaccgtttatagttgtgattgcctgagccgatcggataattgtcgatatcgattgccaggggacctgttttgcccacttcgagacgcggcaaatggccgattcgtctaggcgaagatcacaaggctaagtctatctcggagataccatgggtaagctaatctttcgtcatcgtttgcgagggcctattgcaaaattcaccattcgagcgaattgtttccggttgtcttagaagcccccgtgaaatgtgagaacttagaatgtcgtggcgacggaagccgaaaccccgatcctggcgtggaacctattgttcggtcggtgttttattaatcaagcctgctccacttggctttgggcagcagcgagttctttaattagtaaattaatgccattgtttattaatttagcggctcattgtgccctcattaagctgtcgctgtgcaaaactatcggatgtcggttgtcggggttaatcaggacaggaggctgggactctggctgactggttttctgtttttttttttggtttttggttttctgatcttcccagagagtgtcattcaagcagggggcttttgtgtgtggcggattcctacctgaagttgcccacatggtaggcgaccactgcgcgggcacggagcaccgcctcgcagttgaggatctcgtgcatgttgggcagggccaccggcaggctccagaggaagcgggccaaccgctcgatgtcgccggagtcctcgagcgtcttgcaaacgatctccacctgggcggcggagaaggccagcgttggaacggccaggatggggctgggtgctataatctggtggtgcgtgggcgagaagctctctgagggcggctgtttgccctccgtcggtccaacggccattttattcgttgaatccactgtgaacaaattggcatactattctccaccggaacgaagcaatcttgctgggcactacactggtttagtcactaattcaattccttggctgttattcgttttttttttttttttttttgatgtgttcactagcacttgggtggcttgatccgactcgattcagtccgcctcgataaggttttactgattggtttggggttagcactttgcacgcgcgatcgagggcatctggccgtctggatgtgtgaggtggccaccggttcgactggcgtacgaatccaaatgattgccaatgagccagctcatgaatgcgatacccgtgcccggaccacgaacggagcgcaactgctgctccacatcgaggcgataaagggggcctttggcaatggatataaccgatgcggttcggtgtggtgcgatacgatccagcgagcgagagagcgaccaaccaaacggccaaccgagcgcgcaaaaaatacgtcaaataatggtcttgtaactgagctgcccactaggcgacgggaacggcacagaagctatacacgctatagaggctatagaagctatggcaatggagctcaatcggcagaggcagcagcagcggcagtagcggcagtagcagcacaacaatgacgcgccacagatacagatactctggctggcggctcggctcagctctccggctgccactgctactgcttgccagctgcagacacggatacagataaagatacagctacagatacagatacagctgcggacacagatacgggccgagatatggaaacagaaacgagttggcaccaataccaggccacaaccagtttgccgcacacacagataaagatacgcgaacagatgcggatacggatactacgacgcaccaccataccataggcaccactaccacggggtgggcgtggtcgtcactgctcgttgacgtacgtacgtctcgctctggcacacggccatgcaatggcgccactctcgacagctgtctccttttctcctttatgcggtggtggcatcgccttcatgggtctcgtttaaatgaatcgtacataagagtcgcacgtacactg

SEQ ID NO: 27782 - DNA, 1464 bp, DROSOPHILA
aattgaattagtgactaaaccagtgtagtgcccagcaagattgcttcgttccggtggagaatagtatgccaatttgttcacagtggattcaacgaataaaatggccgttggaccgacggagggcaaacagccgccctcagagagcttctcgcccacgcaccaccagattatagcacccagccccatcctggccgttccaacgctggccttctccgccgcccaggtggagatcgtttgcaagacgctcgaggactccggcgacatcgagcggttggcccgcttcctctggagcctgccggtggccctgcccaacatgcacgagatcctcaactgcgaggcggtgctccgtgcccgcgcagtggtcgcctaccatgtgggcaacttcagggaactttatgcaataatagagaatcataagtttactaaggcgtcctacggcaaactgcaggccatgtggctggaggcccactacattgaggccgagaagctgcgcggtcgatcactgggccccgtggacaagtatcgggtgcgaaagaagttccccctgccgccgacgatctgggatggcgagcagaagacgcactgcttcaaggagcgcacgcggagcctactgcgcgaatggtacctacaggatccctacccgaatcccaccaagaagcgggagctggccaaggccaccggcctgaatcccacgcaagtgggcaactggttcaagaaccgccgccagcgggatcgggctgctgcggccaagaatcgctgccgcagtcgctggcactgaacggcgcatccggcggaccgccactgcatcacccggcctacgcggctgcctacagtgtggagtgcgttccaggtggtcatggaccaccgcatccgccgccgaagctgaggatcaactccccggagaagctcaactccacggcagtggcggcggcagcatccgtcggaggaggaggtggcaaccaacaccatgagcccaccacgaccggctaccatcacagtggccaactgatgctgcatcggcccttctccacgtcgccggagctgaagcacagtgctcccgagatcacatgatatcagcgggtctgaggtgtccacctgtaaccccacccagactaaatcaacaaccccaaaccgaaatcccaaatcccaatcctcacaagctccgaagcactaaggcccagctattcagattgtttcaattgtatttctaagttagcccgtagttaagcgcatcccagcggcggagttcgagcaatattcgaaccggaactgtttcctatatcatggcccataattaccatacctttacctatacctatacctataccgttatccagcagcagcaaatcgcaagcgtcgcacactcactcttcaaagatagccatttaagccggatggaaactgagatacagatttagagctaatacagatggcggtcccagtggccccaaaactgaaattgaa

SEQ ID NO: 27783 - protein, 225 aa, DROSOPHILA
MAVGPTEGKQPPSESFSPTHHQIIAPSPILAVPTLAFSAAQVEIVCKTLEDSGDIERLARFLWSLPVALPNMHEILNCEAVLRARAVVAYHVGNFRELYAIIENHKFTKASYGKLQAMWLEAHYIEAEKLRGRSLGPVDKYRVRKKFPLPPTIWDGEQKTHCFKERTRSLLREWYLQDPYPNPTKKRELAKATGLNPTQVGNWFKNRRQRDRAAAAKNRCRSRWH

SEQ ID NO: 27784 - DNA, 5396 bp, DROSOPHILA
ggccaagctttgcaggtatgagccaactctgtcactgctgacccagaatcgttgtatcaaacgtagttgttatccatccatttgtgcgttaagttgaatgcaatttagtttgtggtactgttacttttagctttattacatatccttcaagctctccccaatccaattgttgtcgtgacagtcattcggtggcaattttctaacgctctggtgcactttcaggtcgtcgctcgcgcagaaactcctccagcgaggactcccagctgaccattgagaactttggtggctcgcaggatcagctgaatacgctgggacgatacgaacgcgacagggaacgcaaattgtccaacaccagtgtgggcagttatccagttgaacccgctgtggccgttcgctcttcaattgccgatgctaggggcacgttgcagttgggctacgatacggactccggctctgagaagcaggatcgcgaaacggaaaagtattcgatgcgccggcaagtcaggtgagtcattgaaatgtttgcatttatgtataaaccatggtcgattacatttttgattttaaccttatcgacagtgttgacaatgtgcccacggtgtcgtcgcacaatctttcgaatgcgggcagcccgttgccggtggctaggcacaagcaacattccagcgacaaagactacagcagcaacagcggcatgacaccagatgcatacaacgattcccgctccaccagtggctatgatccggagagcacgcccgttcgcaagtcctcgactagcagcatgccagcaagtcccgctgcctggcagttagatgtgggagacgacgatatgcgctcgctggaaaacgccagcaagttgtccacaattcgaatgaaactggaggagaagcggcggcgcattgagcaggacaagcgcaagatcgagatggccttgctgcggcaccaggagaaggtaggcgttgagtaaatagtgtagagccttataatcagcactatttgtatgtattcgcaggaggatttggaatcgtgtccggacgtgatgaagtgggagaccatgagcaacgaatcaaagagaacacctgatatggatcccgtggatttggacaagtaccaggtgggtgtgacaagatttcccccaattttcctctcccgtctaaccaatacaattcgagtgccagagaatttatgtctaacgcctgtgtctctcttttacccccattttgtgtctgtgcctgcttctacattcacacatacttacacgcaacaattacacaacacaaaacacgcccaataaccaatcaaaccacattaacataccacctaatcgccgggatgtggatcaagcagcaaagtatcgccattatgaacatgaatctgcaggatatccagcaggatatccaccgcctggccacccagcaaagccaaatgcaggcgcagcacctccaagcccaacaactcatgcaggctcagcaaatagccaacatgctgaaccaggtaatccatccgcccataacacactgtccgaccttaagctcattgcagcagttgctcaaattaacgaaggatgtggaatgcttactgttttgttttgtttattggctgggaatttaagaactgattagtgattattgctgaaatatactggcttatgatatttacaagtaggaagtctgataattcatgaatttctgtttgatcttttaaattttatattgcttagtagttgaaatgcagtaatcactagcctgattctttactaaaagtacgccaaatttgtcgccaaattgaattccaataatgcatgtttgtcaactaaaaaattgttctttgatctcgttccctgcaacttgcaatacgccacttttgaaatctgcaactcgccacctgcccacactaaccgtgcatccacagcagcagacctatgggtcgcagcagcacctggctgatcaccattaccagcagcagagacccatgcagcaaagctttggttcatcgccccatcttccgcaggcctacaacgccccagtcagcgcatacagctcccgtccgcccagtcgcgatccctaccagcagcagctccaccatcagcagcagcagcccatgcccatgccgcaaccgatgcagtacgtcaacgagcatgggcagtatatgtcgccgccgcagcccgcacactacatgccgcagcaggcacaacagccgcagagcatttacagcgacaacggggcggcgtacaatcacagtaaccactcgccatatggcggaactccacagtatcggagcagcgtggtgtacgacgattacgggcagcccaccaaccacttctacctgcatgagtcatcgccgcagcctcaagctcatcagcatccgcagcgcaggacttgggctcactccgcagcagccgccgcttatgaacaacagcaacagatccagccttccctggtggatgtgaatgcctggcagacgcagcagcaccaaaagcagaagcagacctggatgaacaggccgccctcgagtgcgggagccccgagtcctggcagctttatgctgcaccagaacggtggaggaggaggtggtggcggtggtggtggcgagctacagcacctgtttcaggtacaggcctcgccacagcatggccaacggcaggttagtggatccaatggcgtgcagcgccagcagtcgttgaccaacttgcgagacaatcgctcgcccaaggcaccacaaaacatgggaatgcccatgggtatgccaatgcagcaagaggacatgatggcaccgcagagtatttgctttatcggtgacgaggaggatgttgatgagctggagcggaacatcatcgaatctatgcagtcgacgcacatctccgactttgtacaccaacagcagcagcagcaccaacaccaacagcaacttcagcagcaacaacggttgcaggggcacagcggacgaggtagcagctcggaggattatgacagcggggagatgatctccaacaagctgaacatcaccagcggcaatctcacctatcgcataccctcgccatcccgtccctccatccaagccaacagcttccaggatccccgagccatggcagctgcttccggtggcgaggaccagccgcccgagaagggtttctacatctccttcgacgatgagcagcccaaacgacccaagccacctctgcgcgccaagcgatcgcctaaaaaggagtctccaccaggaagtcgggacagcgtcgataaccaggcgaccctgaaacgtgaatcgctaagtcatctgcacaacaacaacaatattggattcggaaatgatgatgtcaacagcaaaccggtgaccaggcacagtatccatggcctaaacaactccaacagtgtcaaatctcccggaaatgccacgtacaacaagtacacggatgagccgcccatccaactgcgacagttggccgtttcgggagcaatgtcaccaactagtaacgaacgtcatcacttggacgatgtcagcaatcagtcaccgcagcagacgcagcaaccaatgtcgcccacgcgactccaacagagcagcaacaacgcagaggcggccaagaacaaggcgctggtcatcggagcagattccaccaatttggatccggtaagagcactaaatgggtcttgtgggttccgaggcttttttgctattgaacagatgaggggatctgacaacacaataagttcttcgcatattaagcgtatccatttatatgactacaggaatctgttgatgagatggagcggcgcaaggagaaaatcatgctgctgtctttgcaacgtcgccagcaacaggaggaggcgaaggcgcgcaaagagattgaggcttcccagaagcgagaaaaggagcgcgaaaaggaggaggaacgagcgcggaaaaaggaggagcaaatggcacggcgagcggccattttggagcagcacagactcaagaaagccattgaagaggccgagcgagaggtacaagagagttgctttacttaacacggcaaagcatgaacttaaactttgatattcttccatagggtaaaaccctggatcggcccgatctgcacgtgaagctgcaatcgcattcatccacctcaacgaccccacgactgaggcagcagcgcaccacgcgtcccaggcctaagacaattcacgtggacgatgccagcgtggacatcagcgaggcttcaagcatctctagtcggggcaaaaaaggctcaagctcgaatctaaccggtgagcaatttatcggtgctcaaaagcccaaaaagcacgccacaataatcgatgcccggtttttaggaatttcggcacgccgagaatactatacttttgtgttttatattgttttgtccaactattattcctattttctgctaatttgttaacttttcgtttcgttttgaatttgaacttaacaggctacggtcaactaagctcaaattcaatgaaaagagattactacaggggctcccaagactccctcactgtaaaaggtaatttatgtttttgttattttaccctaattgcattgtcttatatttcatctgttgtagtttgatctaagttaagcatgtttagttaaactttaagttgattttgtatctggccactttccgataaatgggtcttagaatctaactatttgaattgcacctgtacatgaatgtagctctaagttttcattataactatggtatttggacaacctatttgataagacataacaactaatttcgtttaaacagagtcacccgatgattatcccagtacaagttcaactccgattggacgacggggatcgtacaaaacttccagaggttggtgatggataacacgcccacttagttctcttttttgttttctttttttgtttccctctgtttaatttcacaaattcgcattcgaacacgctaagaaatgaaacgaaagttgaaacgctccagcgcttatagttttttatggtttgtctttaacttactaacaagttttgatttcggttcaagtactgaattatggctaacagcaaactgcatacaacctcaactaatccaatgcactgccagtaagattgcacctgagctgaaaagtggacctgaggcgcgcttaaggatgtacacatatcagatattataattagttttatttatctggtttttgggtctacaattttgaagatgaattttggttttttgggggtgccgggcgatctaagtttgatttacgatatttgtacctcattttgtgccacccattcatttgtgttaacgaattgcgaatgaataagaatcatgtgttccacctgtatactgatgcactcggctcgcgtctttcgtgacctgactccacctgatttcagagccagccggcgtagaaaggggccgcact

SEQ ID NO: 27785 - DNA, 2511 bp, DROSOPHILA
atgtattcgcaggaggatttggaatcgtgtccggacgtgatgaagtgggagaccatgagcaacgaatcaaagagaacacctgatatggatcccgtggatttggacaagtacagcaaagtatcgccattatgaacatgaatctgcaggatatccagcaggatatccaccgcctggccacccagcaaagccaaatgcaggcgcagcacctccaagcccaacaactcatgcaggctcagcaaatagccaacatgctgaaccagcagcagacctatgggtcgcagcagcacctggctgatcaccattaccagcagcagagacccatgcagcaaagctttggttcatcgccccatcttccgcaggcctacaacgccccagtcagcgcatacagctcccgtccgcccagtcgcgatccctaccagcagcagctccaccatcagcagcagcagcccatgcccatgccgcaaccgatgcagtacgtcaacgagcatgggcagtatatgtcgccgccgcagcccgcacactacatgccgcagcaggcacaacagccgcagagcatttacagcgacaacggggcggcgtacaatcacagtaaccactcgccatatggcggaactccacagtatcggagcagcgtggtgtacgacgattacgggcagcccaccaaccacttctacctgcatgagtcatcgccgcagcctcaagctcatcagcatccgcagcgcaggacttgggctcactccgcagcagccgccgcttatgaacaacagcaacagatccagccttccctggtggatgtgaatgcctggcagacgcagcagcaccaaaagcagaagcagacctggatgaacaggccgccctcgagtgcgggagccccgagtcctggcagctttatgctgcaccagaacggtggaggaggaggtggtggcggtggtggtggcgagctacagcacctgtttcaggtacaggcctcgccacagcatggccaacggcaggttagtggatccaatggcgtgcagcgccagcagtcgttgaccaacttgcgagacaatcgctcgcccaaggcaccacaaaacatgggaatgcccatgggtatgccaatgcagcaagaggacatgatggcaccgcagagtatttgctttatcggtgacgaggaggatgttgatgagctggagcggaacatcatcgaatctatgcagtcgacgcacatctccgactttgtacaccaacagcagcagcagcaccaacaccaacagcaacttcagcagcaacaacggttgcaggggcacagcggacgaggtagcagctcggaggattatgacagcggggagatgatctccaacaagctgaacatcaccagcggcaatctcacctatcgcataccctcgccatcccgtccctccatccaagccaacagcttccaggatccccgagccatggcagctgcttccggtggcgaggaccagccgcccgagaagggtttctacatctccttcgacgatgagcagcccaaacgacccaagccacctctgcgcgccaagcgatcgcctaaaaaggagtctccaccaggaagtcgggacagcgtcgataaccaggcgaccctgaaacgtgaatcgctaagtcatctgcacaacaacaacaatattggattcggaaatgatgatgtcaacagcaaaccggtgaccaggcacagtatccatggcctaaacaactccaacagtgtcaaatctcccggaaatgccacgtacaacaagtacacggatgagccgcccatccaactgcgacagttggccgtttcgggagcaatgtcaccaactagtaacgaacgtcatcacttggacgatagcagcaacaacgcagaggcggccaagaacaaggcgctggtcatcggagcagattccaccaatttggatccggaatctgttgatgagatggagcggcgcaaggagaaaatcatgctgctgtctttgcaacgtcgccagcaacaggaggaggcgaaggcgcgcaaagagattgaggcttcccagaagcgagaaaaggagcgcgaaaaggaggaggaacgagcgcggaaaaaggaggagcaaatggcacggcgagcggccattttggagcagcacagactcaagaaagccattgaagaggccgagcgagaggtacaagagaggtaaaaccctggatcggcccgatctgcacgtgaagctgcaatcgcattcatccacctcaacgaccccacgactgaggcagcagcgcaccacgcgtcccaggcctaagacaattcacgtggacgatgccagcgtggacatcagcgaggcttcaagcatctctagtcggggcaaaaaaggctcaagctcgaatctaaccggtgagcaatttatcggtgctcaaaagcccaaaaagcacgccacaataatcgatgcccggtttttaggaatttcggcacgccgagaatactatacttttgtgttttatattgttttgtccaactattattcctattttctgctaatttgttaa

SEQ ID NO: 27786 - protein, 43 aa, DROSOPHILA
MYSQEDLESCPDVMKWETMSNESKRTPDMDPVDLDKYSKVSPL

SEQ ID NO: 27787 - DNA, 3682 bp, DROSOPHILA
gccggcgtagaaaggggccgcactctgtcgcgtatctccgtcgctaagggcagcacgcttaatttccggggccgaaagtccaattcgctaatgaatctgtgcggtaagaagcgttccacagcagcaacaatcaagctgcctgcctgttacctttctctgttaccccatactctattctctatttagtcctattaagtatttacctgtctgccactttctttctgttgaagttgttttgggtatttctagtggtatcttttggttaaacctgtgactgtgctttggttctggtatctttagtggtgataagtaacttactttctcctttctcatttcttttcatatatttgtatatatttgattatactattctttgctgttccttgcgattttagtttgtaacctttcactggaatgattcggtctaccacgttccttacgatgatgcggtggtggtggtggtggtgtggttccctctcaagcttttttcttgtgttcgtcagatgatttgcagggggccttgggttggtttctacagctttatatgcgcaactggttatggtatattgtggaccgatcgaatttgcttacttactccatttgtgagatatggtatacactagcacaaatacactcatgcaaacatctgcaccgccaacactaatcagtacattttttcgattttaatccagatcatgattcagatcaactagctattaagatatctacgaaattgcctaactaaattttgtgcacacattctcttcttttattcctctttctttcaactcaatcttgtctaaaaacgaatcttgaaattaaccaacaaaaatccaaatccgataattaaccgaattaaacgaactcatcgaacttgccatccatccacgtgactggtgactaacaataacgcatccatcgactggtttcacctgcatggacgacctgggtgataccgttctgatccaatctgttttgtgcatgtgaccgtccgcgctgaatgcctcgacttacacggattccatccctgctctttgcttgccggttagacacagattcgggactgggacgcgccactccgccgaggcgtgctccgtcgcctggaatgggaatgggcgcttcaggtaggcatatgccatctccctccggaccgggctcattgccgccaggtttgatatcgaaacgtcgcggatttgatgatggatccagcgatttctctttaactccgaatttgaacatggaatattcgggtttgtatctctctctctcgtcttcaaaacaatcagaaaacaaatcatatcagccataccaatacttcaaatcaatcctcagttatccaatcaccttccaccaatccatacaccattggtcatctgcatctcacctgcatctgtactacctaagttggaacgcctaattatgatttcagaattttgtaattttatcggtttgttcattcattacgaattggcatactctgtgcagaatgcacattatttattcgacatcaatacatatgagttctacatagatatacaagttctagtgggctgcggcagtctgtagaatccgattcttcgttcgtccacctgtaatcttccctagcgtcgtcaaatccacgactttcgatgttcaaatgaaacccaaaaaaatgtgttcttagtgatataaaaacaccgcaagagttgcaagattaaccaaaaagaaaattgcaagcactgtttattgttacattttatttgcttataagttatgcaatttaagccaagcttattattttcgttattttttgtccgaatgtttttttttttttcataatttgtttaccactccctagtatcttaaaaatggatcccgtagattcaccaacgttttgcattaattcttgcacgtttcctgcattttgataaatggactagaagattttgcgatctagaatctagaagcttgacattgccaccaaaaagtagaaggagatatccgaaaatatgcgaatgtgtctaactttatctgtactgcattcacaggtcctaaactctataaacaaccagcggccaaatcgaatcgtggaatcatcctgaatgccgttgaatactgtgtttttcccggcgttgttaaccgcgaggccaaacagaaagtgctggagaagattgcgcgctcggaggcgaagcacttcctggtactcttccgcgatgctggctgccagttccgcgccctctacagctaccagcccgaaacggaccaggtaaccaagctgtatggtactgggcctagtcaagtcgaagaagtcatgttcgacaagtttttcaagtgagtgatttgtctatcctctaatttagttgatttttcaaacgtattgcttccccattcctgcagatacaactcaggaggcaagtgcttctcgcaagtgcatacaaagcatctgacagtgaccatcgacgccttcacaatacacaactccctgtggcagggcaagcgggtacagttgcccagcaaaaaagacatggcgcttgtaatctaagcggtgggctgagtattctgagtggcatctcgattcggatgcagaagggtggcggcagtggagcggtttggccaacgggcgcttggcgcggttttggtcgcaaccacactattctacaagattgcgcattaagacatctatggaagcataacaaaacatataccgaatgtttttctataggtcgcggggttttggtgttcatcggggcatatacggctaaatactatttgcacatgtttcaagaacaacaaatcggaatttacgaaaaatattgtagtgattaatacaatgcgattgaatatttattttgaatataaatgcatatatccagcctaagaatttattgttcacgcaagcctgaagcagtaggagaagcattcaattgtaaacgaagaacagatagagcaggtagattgcactcgacagccaaaagaatgtaatggaattttgaatgaatgtattttttgtttgcaaacagtaagctccgctgtacgatgatgaggaacaaatgtagaaaatcctttttattaatttgttttatattgttatgaagttattcatgtaaaactttttcttggccttgggcaggcggaaatgaaatcgtgtatgggccgcagccaaagtcgaaactaattttaatgccactagctatttattttaacactaattaatatttactttttatgcgtatttaaaaaggaataataatacaactaatacttaaacttatgtatatctatacaaacagaaaaagacttttgactgctgaaagggaaatccactgttcttttagatttctttttgcaaagtcagatgcacgacgagcagtccgactctaaaatctctacaaattgtattgcacttctaaccacactagaaccatttcgaatgcatttgcttcttatgcctgagcctggcttgaatcgactcgtctaactgccatcgatcttacttttaactttgttcattagtcactttttagaccgctcaactgttcgatgcacctgcctgcaccttagtccctaaccacaaccacactcatctcgttttataaataaagcgaccgatcaatcccacgctggtatcttataatttattgtgtacatccgctggctctcacttgtttccaaaactgatattactttaacatccgcaaggtat

SEQ ID NO: 27788 - DNA, 839 bp, DROSOPHILA
atgcctcgacttacacggattccatccctgctctttgcttgccggttagacacagattcgggactgggacgcgccactccgccgaggcgtgctccgtcgcctggaatgggaatgggcgcttcaggtaggcatatgccatctccctccggaccgggctcattgccgccaggtttgatatcgaaacgtcgcggatttgatgatggatccagcgatttctctttaactccgaatttgaacatggaatattcgggtcctaaactctataaacaaccagcggccaaatcgaatcgtggaatcatcctgaatgccgttgaatactgtgtttttcccggcgttgttaaccgcgaggccaaacagaaagtgctggagaagattgcgcgctcggaggcgaagcacttcctggtactcttccgcgatgctggctgccagttccgcgccctctacagctaccagcccgaaacggaccaggtaaccaagctgtatggtactgggcctagtcaagtcgaagaagtcatgttcgacaagtttttcaaatacaactcaggaggcaagtgcttctcgcaagtgcatacaaagcatctgacagtgaccatcgacgccttcacaatacacaactccctgtggcagggcaagcgggtacagttgcccagcaaaaaagacatggcgcttgtaatctaagcggtgggctgagtattctgagtggcatctcgattcggatgcagaagggtggcggcagtggagcggtttggccaacgggcgcttggcgcggttttggtcgcaaccacactattctacaagattgcgcattaagacatctatggaagcataacaaaacatat

SEQ ID NO: 27789 - protein, 225 aa, DROSOPHILA
MPRLTRIPSLLFACRLDTDSGLGRATPPRRAPSPGMGMGASGRHMPSPSGPGSLPPGLISKRRGFDDGSSDFSLTPNLNMEYSGPKLYKQPAAKSNRGIILNAVEYCVFPGVVNREAKQKVLEKIARSEAKHFLVLFRDAGCQFRALYSYQPETDQVTKLYGTGPSQVEEVMFDKFFKYNSGGKCFSQVHTKHLTVTIDAFTIHNSLWQGKRVQLPSKKDMALVI

SEQ ID NO: 27790 - DNA, 4014 bp, DROSOPHILA
gccgaaagtgtgcgtagtcctctcccaagcagtgcccaccattggtataattgctctaaggattgggtgcgaggtttgtatgtgtctttcagtgtgtgggagggtcaaacgcacctgaccttggcccgtctgctggtcctgcgtctgctgttggtgctggtgctcctgcttctcgccggcgaccttgtccttggcgcttttgttgttgttcgcacacccctcgcagcggaagtcctgcagcaggcgggttatcgtctcaatgtccttgcgctgcacatgctgcaggttgcgcacttgctgcctgcatcatggtcaaggcaaaatcggtgtgaacttgaactataccagtagcaaaaggacactcatggcaatttgcctgtctcaaacgcacctgagattgttgatctcgttccgcgcgatggtcaactgactcttcagatcatcctcgtgcattttcgctgccggcaacgcgcacttgactcccaaataatccgcaattgcagcgttctccgctgttattgaccaatatttacctcgattctcaatggttacatccagctagagttggccatcacttacgcacggcaccgcgacgttatcgattgtcgataggttcacctgtgcttagttacggccaactgccttaattccagttagatttagcttgcgctcaatagctttttttacaaacattttcttaagaaataacgttgtaagcctcaacaaaaattatataagataacgttactgagcagtaaaagttttgtcttcaatttacatatgtttgttaatatttttttttacaaatccctttgctctatgttgactaatttacaataattcacaaataaaaataggaataatttaaacattttgtaagcgtagcttaacactattttggctttttccaaatattcgatttcaatgataaacgatatatcccagcgcgcgtttctttttggtattttttaggttcattttcgggctgagaatgacaatctgaattttgcacagtaggttcgatttgaagcgacattttccctgctatatacaaatttgtaaattttaattgttcaaaaggtgtgttgcttgcggcagacttgagaactgaattttaaccggcgttgtctattgcagctatcgaagcacgaagaaagcatcatgtctcgcggaagttcagccggctttgacagacacatcacgatcttctctccggagggacgcctctaccaagtgggttagtatcctggcacttgcggctccattgtatccagtctgacattctcatttccccgccagagtacgccttcaaggctattgcccaggagaacatcaccacggtggcgctgaagagtggcgactgtgccgtggtggccacccaaaaaaaagtgaccgagaagaacatcgtgcctgaaacggtgacccacctgttccgcatcaccaaggacattggatgcgcaatgaccggacgcataggtatgaaccatagatactttaaattcttgtttatcccggcgtgattcgagtcaaattccagtcgagttagcacagagttatcccattgttgatatgtcccatgtaaccaagtagcgattcacttatgattgtgctaaaatcagaagaaatagcctgccagacattagggcaaaggcgtatagcgtggagccattttaaacgtagttttcacacggtgcttcaactagaaaagaggacatatcaacccaagagtgtcactaaatacttaaaattatttctctcccctagctgattcccgctcacaggtgcagaaggccagatacgaggccgccaacttccgctacaagtacggctacgaaatgcccgtggatgtgctgtgtcgtcgaattgcggatatcaaccaggtgtacacgcagaatgccgagatgcgtccgctcggctgcagcatggtgctgatcgcttacgacaatgaaatcggccccagcgtttacaagacggacccggctggctacttcagcgggttcaaggcctgcagcgtgggtgccaagactctggaggccaacagctatctggaaaagaagtacaagcccaacttgtcggaggagaaagcgatccagctggccatctcctgtctgtccagtgtgctcgctatagacttcaagccgaacggcattgagatcggcgtggtcagcaagtctgatcccactttccgtattttggatgagcgggagatcgaggaacacctcaccaagatcgccgagaaggactaagttctgtcccgctagctgtaattttgtcatattttataaagcctcttggatctatggttaaataaaaaatgctcttggcttgcattcaaaacaaaggcaaatccgaaaacgttttatttcttcttgtgcaccttaccgccgtatcgcatgacaaaggcatttacatcgaatttgcgacggcatccctgatagttcatgtacctaaccttaccgaagatagcccgctccttccagcccatgtcatggacgccgccaatggaccacatgcagcccacatagccgttggggtcgcgaccatccagactgtacttgtcgttcagcaggattgcgtactccaacgcatgctccggtgtcgctgtccattccagaatctttttggcccagtacatgcgcaaaaagccgtgcatctttccctcgcgtaccagctgcagttgcgccgagttccacaggtcgtcataagtgagagactaggaaaaaattataaaatcattttagtctcaaatcaaaagaaaaagaatccgtggtgaaccttttctagttcttctaagctgtagcagggatctcgcttgtccttgcgatgtgcatctagcgtttgatatgcccaagaacttagacctttaagactatcatagtgctcgttgtagaagcaaaagttatccgccagttcgcggcgcacaatggcctcctcgcaaaacgcatccgccgaggctttgtgttgtcctcgaaaccgctgcacctccagtgcacagcgctgagccgaaatatgaccaaagtgcagccacggcgagagtccggacaaggcgtctgccgtgggatcgtttcgtttgtcattgaaatggcgcaaacgacgactgcagaactcgtagagctgctggcaggctgctttataccccggcttggcccactgcacctcgtccacttccatgtcgcactgcagcgaagcataagcagctgaccagtccacggtattcacattcttgcagccagttccatgaggatgccgcacaactggtgggaatacgctgaggtactcccctagcttggagttgatcttgttgcggatggtacgcgcagcgtactcctgtttgtcggaggccacccacaaggggactacattgtgagcatcgacttgcaccaacggcacgctcttgggcagtgccttgcccacatcctcgacccattggcgtggcaaacgcagcggagcaaagtcacagactacggctccgatgtccttggatttcacaaattgtggtaacttttcaacagcggagcccatcagcaggtgaaacggtatgtcaagggcgcgacactgctgctccacctcctgcaggccgcccatcatgaatttgtagtgcctgatagtggcattcaggaatttgggaactaggcaaaataccacagttaagggtaattccagcttgagagccagacgctgggcaaagagcagggcccagttgtcctgtacgcgcccgtcgcgggacatccagtagacgacgccgcctaggctggattcctttacatcttcggttttggacagaacgcgcactcgtttctttcgaaaagagaactcctgtatgttggctgccgtgcagactcgctggtgttccaagtgggtaagaaactgctcgaagttttggtaatccggcttagaaaccaacaaagccttcgatgtggaggcctcctcatcgctgctttcctggtcacttttgggctcggagctggccttctcgttttttgctgcctttttggaaggacctgccttctgcgc

SEQ ID NO: 27791 - DNA, 1545 bp, DROSOPHILA
tgaattttgcacagtaggttcgatttgaagcgacattttccctgctatatacaaatttgtaaattttaattgttcaaaagctatcgaagcacgaagaaagcatcatgtctcgcggaagttcagccggctttgacagacacatcacgatcttctctccggagggacgcctctaccaagtggagtacgccttcaaggctattgcccaggagaacatcaccacggtggcgctgaagagtggcgactgtgccgtggtggccacccaaaaaaaagtgaccgagaagaacatcgtgcctgaaacggtgacccacctgttccgcatcaccaaggacattggatgcgcaatgaccggacgcatagctgattcccgctcacaggtgcagaaggccagatacgaggccgccaacttccgctacaagtacggctacgaaatgcccgtggatgtgctgtgtcgtcgaattgcggatatcaaccaggtgtacacgcagaatgccgagatgcgtccgctcggctgcagcatggtgctgatcgcttacgacaatgaaatcggccccagcgtttacaagacggacccggctggctacttcagcgggttcaaggcctgcagcgtgggtgccaagactctggaggccaacagctatctggaaaagaagtacaagcccaacttgtcggaggagaaagcgatccagctggccatctcctgtctgtccagtgtgctcgctatagacttcaagccgaacggcattgagatcggcgtggtcagcaagtctgatcccactttccgtattttggatgagcgggagatcgaggaacacctcaccaagatcgccgagaaggactaagttctgtcccgctagctgtaattttgtcatattttataaagcctcttggatctatggttaaataaaaaatgctcttggcttgcattcaaaacaaaggcaaatccgaaaacgttttatttcttcttgtgcaccttaccgccgtatcgcatgacaaaggcatttacatcgaatttgcgacggcatccctgatagttcatgtacctaaccttaccgaagatagcccgctccttccagcccatgtcatggacgccgccaatggaccacatgcagcccacatagccgttggggtcgcgaccatccagactgtacttgtcgttcagcaggattgcgtactccaacgcatgctccggtgtcgctgtccattccagaatctttttggcccagtacatgcgcaaaaagccgtgcatctttccctcgcgtaccagctgcagttgcgccgagttccacaggtcgtcataagtgagagacttttctagttcttctaagctgtagcagggatctcgcttgtccttgcgatgtgcatctagcgtttgatatgcccaagaacttagacctttaagactatcatagtgctcgttgtagaagcaaaagttatccgccagttcgcggcgcacaatggcctcctcgcaaaacgcatccgccgaggctttgtgttgtcctcgaaaccgctgcacctccagtgcacagcgctgagccgaaatatgac

SEQ ID NO: 27792 - protein, 244 aa, DROSOPHILA
MSRGSSAGFDRHITIFSPEGRLYQVEYAFKAIAQENITTVALKSGDCAVVATQKKVTEKNIVPETVTHLFRITKDIGCAMTGRIADSRSQVQKARYEAANFRYKYGYEMPVDVLCRRIADINQVYTQNAEMRPLGCSMVLIAYDNEIGPSVYKTDPAGYFSGFKACSVGAKTLEANSYLEKKYKPNLSEEKAIQLAISCLSSVLAIDFKPNGIEIGVVSKSDPTFRILDEREIEEHLTKIAEKD

SEQ ID NO: 27793 - DNA, 3433 bp, DROSOPHILA
ttaattcttggggctaagccaagtaaatcgaatgataattatatgacatgcagctgtttgataataactacaattttaatatagtctaagtcacagtcgcacaagacgctttgcaatgtgtattgagttcgtaagtgcaccaccactcatgagatcgatcagtagatatgttcgtacgtacaccatgcattttgtcatcttaatactccgagcaccatgaccgaaatgacttgactgggagaactggatcatatatgacatgtaaataccgacagaagtcatagatgtttgcgcaataatatcaaaccgaattgtcacacattcatcttcataaaagtgaaagtattaggcgttagaccgactagactcccctggggataattgcccggttcatggggcacctctcagcttacttggcacccatccatggactgcgattcaccttgtttctgctttcgaattgtgtgttttgctttgcccgcttccgatgcaacgagtctcaatgaataaccaaccgaaatattcaagttcatttacctcgcaagccgaacaaattgattttacttatttacgtttttctttttcttttctgtttttgtgacttttcgtatatttagttccgcactcgaattcatttggcggcggcttaaatcgcagatcaaccccgcccaacgaataccagacggttcagtcaaataattttgacggtaatcatgccgaaggtaatttatttattattattacttaattactttaattatttctctctaccttttattttcattaatttttgtgtacgtttctgtttgctctttatttgcactcagaaactgcaactcaatgtcttattggtttctgattgaatttaaattttgtaactttttcttttcaccacccaccgacccacacacgcttaaccaccaaccacaacgccaccgctgcccgtcaacctgcagccttcgtggtgcacaagtcgcgtggcatcaccacactcgcctccatgcactcgcagcagcagcagcagctccatcagcagcaacagcatcagcagcaataccatcagcagccactgcagcagcacccgtcccagtcgcagcttcaaatccaacagcaggagcccttggttccagctcgcttgcgccaggctaaagaaaagaccaatgttgagtcgaaggcggacgagagaggtttgcccagcttgcagttgatttcttaatttcctagacaagacgacttgtatgtggcggatgaatgtgctattagctccgccatgtgggaactggttaattgcttgaatcaagctccagttaaaatgattatcgtttctgctgcatacaagtcactaatttgatttcatttattatttatttaatttgttttatcttcttttcatttacttctgttttgtttgttctcgaatgtaaatcgaataggcgattttgtcgctgcgggtcgaccaagtaactgggaacagagccgccggccaagctttgcaggtatgagccaactctgtcactgctgacccagaatcgttgtatcaaacgtagttgttatccatccatttgtgcgttaagttgaatgcaatttagtttgtggtactgttacttttagctttattacatatccttcaagctctccccaatccaattgttgtcgtgacagtcattcggtggcaattttctaacgctctggtgcactttcaggtcgtcgctcgcgcagaaactcctccagcgaggactcccagctgaccattgagaactttggtggctcgcaggatcagctgaatacgctgggacgatacgaacgcgacagggaacgcaaattgtccaacaccagtgtgggcagttatccagttgaacccgctgtggccgttcgctcttcaattgccgatgctaggggcacgttgcagttgggctacgatacggactccggctctgagaagcaggatcgcgaaacggaaaagtattcgatgcgccggcaagtcaggtgagtcattgaaatgtttgcatttatgtataaaccatggtcgattacatttttgattttaaccttatcgacagtgttgacaatgtgcccacggtgtcgtcgcacaatctttcgaatgcgggcagcccgttgccggtggctaggcacaagcaacattccagcgacaaagactacagcagcaacagcggcatgacaccagatgcatacaacgattcccgctccaccagtggctatgatccggagagcacgcccgttcgcaagtcctcgactagcagcatgccagcaagtcccgctgcctggcagttagatgtgggagacgacgatatgcgctcgctggaaaacgccagcaagttgtccacaattcgaatgaaactggaggagaagcggcggcgcattgagcaggacaagcgcaagatcgagatggccttgctgcggcaccaggagaaggtaggcgttgagtaaatagtgtagagccttataatcagcactatttgtatgtattcgcaggaggatttggaatcgtgtccggacgtgatgaagtgggagaccatgagcaacgaatcaaagagaacacctgatatggatcccgtggatttggacaagtaccaggtgggtgtgacaagatttcccccaattttcctctcccgtctaaccaatacaattcgagtgccagagaatttatgtctaacgcctgtgtctctcttttacccccattttgtgtctgtgcctgcttctacattcacacatacttacacgcaacaattacacaacacaaaacacgcccaataaccaatcaaaccacattaacataccacctaatcgccgggatgtggatcaagcagcaaagtatcgccattatgaacatgaatctgcaggatatccagcaggatatccaccgcctggccacccagcaaagccaaatgcaggcgcagcacctccaagcccaacaactcatgcaggctcagcaaatagccaacatgctgaaccaggtaatccatccgcccataacacactgtccgaccttaagctcattgcagcagttgctcaaattaacgaaggatgtggaatgcttactgttttgttttgtttattggctgggaatttaagaactgattagtgattattgctgaaatatactggcttatgatatttacaagtaggaagtctgataattcatgaatttctgtttgatcttttaaattttatattgcttagtagttgaaatgcagtaatcactagcctgattctttactaaaagtacgccaaatttgtcgccaaattgaattccaataatgcatgtttgtcaactaaaaaattgttctttgatctcgttccctgcaacttgcaatacgccacttttgaaatctgcaactcgccacctgcccacactaaccgtgcatccacagcagcagacctatgggtcgcagcagcacctggctgatcacca

SEQ ID NO: 27794 - DNA, 843 bp, DROSOPHILA
atgcactcgcagcagcagcagcagctccatcagcagcaacagcatcagcagcaataccatcagcagccactgcagcagcacccgtcccagtcgcagcttcaaatccaacagcaggagcccttggttccagctcgcttgcgccaggctaaagaaaagaccaatgttgagtcgaaggcggacgagagaggtcgtcgctcgcgcagaaactcctccagcgaggactcccagctgaccattgagaactttggtggctcgcaggatcagctgaatacgctgggacgatacgaacgcgacagggaacgcaaattgtccaacaccagtgtgggcagttatccagttgaacccgctgtggccgttcgctcttcaattgccgatgctaggggcacgttgcagttgggctacgatacggactccggctctgagaagcaggatcgcgaaacggaaaagtattcgatgcgccggcaagtcagtgttgacaatgtgcccacggtgtcgtcgcacaatctttcgaatgcgggcagcccgttgccggtggctaggcacaagcaacattccagcgacaaagactacagcagcaacagcggcatgacaccagatgcatacaacgattcccgctccaccagtggctatgatccggagagcacgcccgttcgcaagtcctcgactagcagcatgccagcaagtcccgctgcctggcagttagatgtgggagacgacgatatgcgctcgctggaaaacgccagcaagttgtccacaattcgaatgaaactggaggagaagcggcggcgcattgagcaggacaagcgcaagatcgagatggccttgctgcggcaccaggagaag

SEQ ID NO: 27795 - protein, 281 aa, DROSOPHILA
MHSQQQQQLHQQQQHQQQYHQQPLQQHPSQSQLQIQQQEPLVPARLRQAKEKTNVESKADERGRRSRRNSSSEDSQLTIENFGGSQDQLNTLGRYERDRERKLSNTSVGSYPVEPAVAVRSSIADARGTLQLGYDTDSGSEKQDRETEKYSMRRQVSVDNVPTVSSHNLSNAGSPLPVARHKQHSSDKDYSSNSGMTPDAYNDSRSTSGYDPESTPVRKSSTSSMPASPAAWQLDVGDDDMRSLENASKLSTIRMKLEEKRRRIEQDKRKIEMALLRHQEK

SEQ ID NO: 27796 - DNA, 4029 bp, DROSOPHILA
ggatcactcctatgggccgaaagtgtgcgtagtcctctcccaagcagtgcccaccattggtataattgctctaaggattgggtgcgaggtttgtatgtgtctttcagtgtgtgggagggtcaaacgcacctgaccttggcccgtctgctggtcctgcgtctgctgttggtgctggtgctcctgcttctcgccggcgaccttgtccttggcgcttttgttgttgttcgcacacccctcgcagcggaagtcctgcagcaggcgggttatcgtctcaatgtccttgcgctgcacatgctgcaggttgcgcacttgctgcctgcatcatggtcaaggcaaaatcggtgtgaacttgaactataccagtagcaaaaggacactcatggcaatttgcctgtctcaaacgcacctgagattgttgatctcgttccgcgcgatggtcaactgactcttcagatcatcctcgtgcattttcgctgccggcaacgcgcacttgactcccaaataatccgcaattgcagcgttctccgctgttattgaccaatatttacctcgattctcaatggttacatccagctagagttggccatcacttacgcacggcaccgcgacgttatcgattgtcgataggttcacctgtgcttagttacggccaactgccttaattccagttagatttagcttgcgctcaatagctttttttacaaacattttcttaagaaataacgttgtaagcctcaacaaaaattatataagataacgttactgagcagtaaaagttttgtcttcaatttacatatgtttgttaatatttttttttacaaatccctttgctctatgttgactaatttacaataattcacaaataaaaataggaataatttaaacattttgtaagcgtagcttaacactattttggctttttccaaatattcgatttcaatgataaacgatatatcccagcgcgcgtttctttttggtattttttaggttcattttcgggctgagaatgacaatctgaattttgcacagtaggttcgatttgaagcgacattttccctgctatatacaaatttgtaaattttaattgttcaaaaggtgtgttgcttgcggcagacttgagaactgaattttaaccggcgttgtctattgcagctatcgaagcacgaagaaagcatcatgtctcgcggaagttcagccggctttgacagacacatcacgatcttctctccggagggacgcctctaccaagtgggttagtatcctggcacttgcggctccattgtatccagtctgacattctcatttccccgccagagtacgccttcaaggctattgcccaggagaacatcaccacggtggcgctgaagagtggcgactgtgccgtggtggccacccaaaaaaaagtgaccgagaagaacatcgtgcctgaaacggtgacccacctgttccgcatcaccaaggacattggatgcgcaatgaccggacgcataggtatgaaccatagatactttaaattcttgtttatcccggcgtgattcgagtcaaattccagtcgagttagcacagagttatcccattgttgatatgtcccatgtaaccaagtagcgattcacttatgattgtgctaaaatcagaagaaatagcctgccagacattagggcaaaggcgtatagcgtggagccattttaaacgtagttttcacacggtgcttcaactagaaaagaggacatatcaacccaagagtgtcactaaatacttaaaattatttctctcccctagctgattcccgctcacaggtgcagaaggccagatacgaggccgccaacttccgctacaagtacggctacgaaatgcccgtggatgtgctgtgtcgtcgaattgcggatatcaaccaggtgtacacgcagaatgccgagatgcgtccgctcggctgcagcatggtgctgatcgcttacgacaatgaaatcggccccagcgtttacaagacggacccggctggctacttcagcgggttcaaggcctgcagcgtgggtgccaagactctggaggccaacagctatctggaaaagaagtacaagcccaacttgtcggaggagaaagcgatccagctggccatctcctgtctgtccagtgtgctcgctatagacttcaagccgaacggcattgagatcggcgtggtcagcaagtctgatcccactttccgtattttggatgagcgggagatcgaggaacacctcaccaagatcgccgagaaggactaagttctgtcccgctagctgtaattttgtcatattttataaagcctcttggatctatggttaaataaaaaatgctcttggcttgcattcaaaacaaaggcaaatccgaaaacgttttatttcttcttgtgcaccttaccgccgtatcgcatgacaaaggcatttacatcgaatttgcgacggcatccctgatagttcatgtacctaaccttaccgaagatagcccgctccttccagcccatgtcatggacgccgccaatggaccacatgcagcccacatagccgttggggtcgcgaccatccagactgtacttgtcgttcagcaggattgcgtactccaacgcatgctccggtgtcgctgtccattccagaatctttttggcccagtacatgcgcaaaaagccgtgcatctttccctcgcgtaccagctgcagttgcgccgagttccacaggtcgtcataagtgagagactaggaaaaaattataaaatcattttagtctcaaatcaaaagaaaaagaatccgtggtgaaccttttctagttcttctaagctgtagcagggatctcgcttgtccttgcgatgtgcatctagcgtttgatatgcccaagaacttagacctttaagactatcatagtgctcgttgtagaagcaaaagttatccgccagttcgcggcgcacaatggcctcctcgcaaaacgcatccgccgaggctttgtgttgtcctcgaaaccgctgcacctccagtgcacagcgctgagccgaaatatgaccaaagtgcagccacggcgagagtccggacaaggcgtctgccgtgggatcgtttcgtttgtcattgaaatggcgcaaacgacgactgcagaactcgtagagctgctggcaggctgctttataccccggcttggcccactgcacctcgtccacttccatgtcgcactgcagcgaagcataagcagctgaccagtccacggtattcacattcttgcagccagttccatgaggatgccgcacaactggtgggaatacgctgaggtactcccctagcttggagttgatcttgttgcggatggtacgcgcagcgtactcctgtttgtcggaggccacccacaaggggactacattgtgagcatcgacttgcaccaacggcacgctcttgggcagtgccttgcccacatcctcgacccattggcgtggcaaacgcagcggagcaaagtcacagactacggctccgatgtccttggatttcacaaattgtggtaacttttcaacagcggagcccatcagcaggtgaaacggtatgtcaagggcgcgacactgctgctccacctcctgcaggccgcccatcatgaatttgtagtgcctgatagtggcattcaggaatttgggaactaggcaaaataccacagttaagggtaattccagcttgagagccagacgctgggcaaagagcagggcccagttgtcctgtacgcgcccgtcgcgggacatccagtagacgacgccgcctaggctggattcctttacatcttcggttttggacagaacgcgcactcgtttctttcgaaaagagaactcctgtatgttggctgccgtgcagactcgctggtgttccaagtgggtaagaaactgctcgaagttttggtaatccggcttagaaaccaacaaagccttcgatgtggaggcctcctcatcgctgctttcctggtcacttttgggctcggagctggccttctcgttttttgctgcctttttggaaggacctgccttctgcgc

SEQ ID NO: 27797 - DNA, 1493 bp, DROSOPHILA
ctgagaatgacaatctgaattttgcacactatcgaagcacgaagaaagcatcatgtctcgcggaagttcagccggctttgacagacacatcacgatcttctctccggagggacgcctctaccaagtggagtacgccttcaaggctattgcccaggagaacatcaccacggtggcgctgaagagtggcgactgtgccgtggtggccacccaaaaaaaagtgaccgagaagaacatcgtgcctgaaacggtgacccacctgttccgcatcaccaaggacattggatgcgcaatgaccggacgcatagctgattcccgctcacaggtgcagaaggccagatacgaggccgccaacttccgctacaagtacggctacgaaatgcccgtggatgtgctgtgtcgtcgaattgcggatatcaaccaggtgtacacgcagaatgccgagatgcgtccgctcggctgcagcatggtgctgatcgcttacgacaatgaaatcggccccagcgtttacaagacggacccggctggctacttcagcgggttcaaggcctgcagcgtgggtgccaagactctggaggccaacagctatctggaaaagaagtacaagcccaacttgtcggaggagaaagcgatccagctggccatctcctgtctgtccagtgtgctcgctatagacttcaagccgaacggcattgagatcggcgtggtcagcaagtctgatcccactttccgtattttggatgagcgggagatcgaggaacacctcaccaagatcgccgagaaggactaagttctgtcccgctagctgtaattttgtcatattttataaagcctcttggatctatggttaaataaaaaatgctcttggcttgcattcaaaacaaaggcaaatccgaaaacgttttatttcttcttgtgcaccttaccgccgtatcgcatgacaaaggcatttacatcgaatttgcgacggcatccctgatagttcatgtacctaaccttaccgaagatagcccgctccttccagcccatgtcatggacgccgccaatggaccacatgcagcccacatagccgttggggtcgcgaccatccagactgtacttgtcgttcagcaggattgcgtactccaacgcatgctccggtgtcgctgtccattccagaatctttttggcccagtacatgcgcaaaaagccgtgcatctttccctcgcgtaccagctgcagttgcgccgagttccacaggtcgtcataagtgagagacttttctagttcttctaagctgtagcagggatctcgcttgtccttgcgatgtgcatctagcgtttgatatgcccaagaacttagacctttaagactatcatagtgctcgttgtagaagcaaaagttatccgccagttcgcggcgcacaatggcctcctcgcaaaacgcatccgccgaggctttgtgttgtcctcgaaaccgctgcacctccagtgcacagcgctgagccgaaatatgac

SEQ ID NO: 27798 - protein, 244 aa, DROSOPHILA; identical to SEQ ID NO: 27792

SEQ ID NO: 27799 - DNA, 7248 bp, DROSOPHILA; identical to SEQ ID NO: 9733

SEQ ID NO: 27800 - DNA, 1856 bp, DROSOPHILA
cacgacgaagtaaatcaccgcgtgtttttttctaatcgctgcaactggctgctgcaatcactattctcttgtcgaaatgtctgtgacccagacgaaacaaatcaagttctacaacccatcgagttccgctagctccgacagcgatgaccgttcactctcggatgtcacagagcaactctatgtggatccgtatgccgacctaagcaatggcttgcccggggatctcaactgctgtccggcctcgcccaccacagtgcctgctaaagcatcgttggattcgcctcttaaacgttccggtaggagacagcgaaccacatccattggcaaccagaccaccacagcgaatccgtccgaatgcatcatacgcgcaaataaccgcacgatctacacggccggacgaccgccgtggtacaattgtgctgggcaacaggtggagcccttcgtcataggaatctgcggcggtagtgcctctggcaagaccacagtggctgagaaaatcatcgaaagcctagacgttccatgggtaacactgttgtccatggactgtttctacaagatccttaatgagaaacagcatgagcaggccctgatcaacgaatataacttcgatcacccggatgccttcgacatcgagctgctgctggacgtgctcaccaagctgaaggagggccgaaaggtggaagttcctgtctataattttgtgacacatggtcgtgagagccaaacgaaaaccatgtacggggccaatgtgatcatcttcgagggtattcttacctttcatagtcctgaagtacttaaattgctagacatgaagatatttgtggacacagatcccgatattcgtctggccaggcggttaagaagggacatctctcagcgcggacgagacctcaagggcgtgctgaagcaataccttaatatggttaagccctcctattgcaattacatagctccaacaatggcccatgcagatatcattgttcctcgtggaggcgacaacaaggtggccatccatctcattgttcagcacgtgcacacacagctgcaactgcgcggatttaagctgcgcgaaactctggccaactcctacaaggaccagccaatgccacattctctgcacttgctgcatcccacgccccaaataaagggcctgcacacgttcatccgttgccgaaatacgtcccgcgatgagtttattttttactcaaagcgcctgatacggctagtcattgaatatgcgctaagcttatttccctttaagaaaacaacagtggagactccacaaggtgtcctttacgagggcaagcgtatggaatcgcgaaaaatatgcggcgtctcaattctccgagctggtgaaacaatggaacaagccgtttgtgatgtgtgcaaggacattcgcatcggaaagatcctcatccagaccaatcttaagaccggcgagccggagctttactacctgaggctgcctaaagacataaaagactacaaggtgatactaatggatgccaccgtggccacaggagcagcggccatgatggccattcgggtgctgctggatcacgatgtacccgaggacaacattatcttggcctcgcttttgatggctgagatcggtgtgcactccattgcctatgccttcccaaaggtgaaaattgttacttccgctctggatccggagattaatagtaagttttatgttatacccggcattggtaactttggcgatcgctactttggcacggaaccctctgatgagtactaaggagatctgggccaatccatacctatatggaaccatcaagtttctaatgtatcttaggttaagttcaaaacgttacttaaattatgaatttgga

SEQ ID NO: 27801 - protein, 407 aa, DROSOPHILA
MDCFYKILNEKQHEQALINEYNFDHPDAFDIELLLDVLTKLKEGRKVEVPVYNFVTHGRESQTKTMYGANVIIFEGILTFHSPEVLKLLDMKIFVDTDPDIRLARRLRRDISQRGRDLKGVLKQYLNMVKPSYCNYIAPTMAHADIIVPRGGDNKVAIHLIVQHVHTQLQLRGFKLRETLANSYKDQPMPHSLHLLHPTPQIKGLHTFIRCRNTSRDEFIFYSKRLIRLVIEYALSLFPFKKTTVETPQGVLYEGKRMESRKICGVSILRAGETMEQAVCDVCKDIRIGKILIQTNLKTGEPELYYLRLPKDIKDYKVILMDATVATGAAAMMAIRVLLDHDVPEDNIILASLLMAEIGVHSIAYAFPKVKIVTSALDPEINSKFYVIPGIGNFGDRYFGTEPSDEY

SEQ ID NO: 27802 - DNA, 7248 bp, DROSOPHILA; identical to SEQ ID NO: 9733

SEQ ID NO: 27803 - DNA, 2319 bp, DROSOPHILA
cacgacgaagtaaatcaccgcgtgtttttttctaatcgctgcaactggctgctgcaatcactattctcttgtcgaaatgtctgtgacccagacgaaacaaatcaagttctacaacccatcgagttccgctagctccgacagttatcgaataaatattggccgcaacgcaaaaggtgaatcgctgcgtacgaaataaaaactctaaatcacatgtgatccacgccggcggcgattcgcgtgagcgttgtgtgagtgagtgacccattttggcttggcatcgccggttgctgtgttcttgctgcctccacatccaagttctcacgcccacgccgacggactgagtgattcaaaatcgctggcagatcgggatcgggctaaaaatgagcagcatcacgtttttgtgcagcaagtcgggccacaacaccaacaacaacagcattaatagtagcaataacgatgttccaaaaggggcaaaagcgaactcagcatttgcagccgcatccgccggtttactaaccatcgcaaaccaccagcagcaacagctacttcagcaaccacatcaacagcagcagcaacaacaacaacagcatcatcagcagtcaaaggttaaggctatagcagccaaaaccaatgagcaactctatgtggatccgtatgccgacctaagcaatggcttgcccggggatctcaactgctgtccggcctcgcccaccacagtgcctgctaaagcatcgttggattcgcctcttaaacgttccggtaggagacagcgaaccacatccattggcaaccagaccaccacagcgaatccgtccgaatgcatcatacgcgcaaataaccgcacgatctacacggccggacgaccgccgtggtacaattgtgctgggcaacaggtggagcccttcgtcataggaatctgcggcggtagtgcctctggcaagaccacagtggctgagaaaatcatcgaaagcctagacgttccatgggtaacactgttgtccatggactgtttctacaagatccttaatgagaaacagcatgagcaggccctgatcaacgaatataacttcgatcacccggatgccttcgacatcgagctgctgctggacgtgctcaccaagctgaaggagggccgaaaggtggaagttcctgtctataattttgtgacacatggtcgtgagagccaaacgaaaaccatgtacggggccaatgtgatcatcttcgagggtattcttacctttcatagtcctgaagtacttaaattgctagacatgaagatatttgtggacacagatcccgatattcgtctggccaggcggttaagaagggacatctctcagcgcggacgagacctcaagggcgtgctgaagcaataccttaatatggttaagccctcctattgcaattacatagctccaacaatggcccatgcagatatcattgttcctcgtggaggcgacaacaaggtggccatccatctcattgttcagcacgtgcacacacagctgcaactgcgcggatttaagctgcgcgaaactctggccaactcctacaaggaccagccaatgccacattctctgcacttgctgcatcccacgccccaaataaagggcctgcacacgttcatccgttgccgaaatacgtcccgcgatgagtttattttttactcaaagcgcctgatacggctagtcattgaatatgcgctaagcttatttccctttaagaaaacaacagtggagactccacaaggtgtcctttacgagggcaagcgtatggaatcgcgaaaaatatgcggcgtctcaattctccgagctggtgaaacaatggaacaagccgtttgtgatgtgtgcaaggacattcgcatcggaaagatcctcatccagaccaatcttaagaccggcgagccggagctttactacctgaggctgcctaaagacataaaagactacaaggtgatactaatggatgccaccgtggccacaggagcagcggccatgatggccattcgggtgctgctggatcacgatgtacccgaggacaacattatcttggcctcgcttttgatggctgagatcggtgtgcactccattgcctatgccttcccaaaggtgaaaattgttacttccgctctggatccggagattaatagtaagttttatgttatacccggcattggtaactttggcgatcgctactttggcacggaaccctctgatgagtactaaggagatctgggccaatccatacctatatggaaccatcaagtttctaatgtatcttaggttaagttcaaaacgttacttaaattatgaatttgga

SEQ ID NO: 27804 - protein, 614 aa, DROSOPHILA; identical to SEQ ID NO: 9735

SEQ ID NO: 27805 - DNA, 9142 bp, DROSOPHILA
aataaaataaaatgaagtcttgtttttcgattttttacgtatctgctggtagtttttattggtaattgcattttttttttttgttttattaattaatcataataattccatttttgttgatttttcttgttcttgctcgtatatgtatatgcatgtataaagttgccgatttctcggatcgagccattatgcagaagcgaaaacaagggggaaaatcacattcacataactgccaaatttgtattgagagaggttgttcgttctgcataatgcagttcagttaagtggcatttatttcaagtatactttcatagtggctcaagtattctacagattagtggcttgcagttgcttcagttcaattgtattgctaagtattgggtgcgcgtacgtacataatataaaccatagtatggcgtactaagaatttgtctggttcagagtcgcgatcccccaatggagctcccaggaagctgccatgggtggtggtagtcaaggaagtttgcgtcgctaggagacttgttcgtgggctctgagctccgttgccttggggtggactcagttttgagggactggagggttttggggcttttgaaggagtgttgagtttcagcatgctttcatcgaactctaggttctctttgctctggttagttgttttgatcttacattaacactaagttgcatttgctcttcgatttgttattagttctctctcgtttaatatgtattaattacattgataattagtttaattgtaagttctgttcttcgtgaacaattttacatgataggattcatcttcagagtgttcatgcgtgtgtgtctgtaaagatttacgtgtgtggtgagttctccgtaattggctacaacaaaaactatgccttaaaataatactttagttacaatttattttgtttgcttcctctgctcgcttggcatttcaattttgttcctctacccgctggcacaactaaaaacaatcaacaaaaggggtgttaagttcaaataaacttgtttgtaactaatatatttgttatattcttaatagtggggggacgtgggggtaaaaaggaaaacgacaacttaaactaaggcttacgaataacgaggatttcgtgggagaagggttgtttttttaggtgcaatttgtgggaaataggggcgggataaaaaacactaattacaaagcgatatggcaacacttaacgagtgttctgcccacaatctgctgttttctgctcttcataattgtttagataactaaaaaactgtataacttataacgtataaagtcggtgcgtccgtctttccgtccggccaatcgtctgtctttctcgctttcagtccgtcggtctccaagcagtcctgtcagctcctttgcacacatcttaaagctatacacaaaaagttaagttaaattgtatataaagattttcttccttcgctctccggcctctgacagacgccgaggagcgcctactcctcggatcaggttctggaacacgatcattgtccgcctgcacgaccgccatagcggtcaagtgctctaagccctgtccacatcctggttgctctggacgccggtgtcaacaattcgtgtagacgccctgtgtgtagtagagctccgtgattcgttccggtaacgtgctgtacaggttggtgatcaggtcgagtggcaggtgggaccacgcctccttgatgcggaatatcaagtcgtccttgcgcgagaactttcgtccgccgtcgaatacctcgcgaatgagccagccccacacgttctccatgatgttcaaatcatgggcaatggtgggccatttctgggtcttgaggccttcggcattgagaagatcctgggcggtgggcagggcgtgcgacatccaattatgatcctgcagcacaaactccgaattgccacccaatttggttacaatattgggccgctcgcgcatgatggcctcgatgcaggattctggtcgctgtttggcggatgacacctccagaagcacggctcctcccacgcagaccatcaggtaaatgtacacagagtttcctcgcggccgctgcgacaacgttcgctcgtagttgcgtaaatcgtggaaatagtatgagaagccatctggtccgtccagattgaacctacgctcgtcgtggaacaccacccgtcgccaatgctcttcgctccacacgatgtacgtgttcgcaaaattaaggcgctccgtttgattgtactgcgacagtattggttccgtcttcagctttttggcgcagttcgctgaactgctggcgctggaggaggagctgctggacgaggagctcgacgacgcggatgaggacgaagaggacgacgaggcggaggagctcggagctgtggatgcggccgatgcccgtagtagagcattggccgcggctgcaatattgctgctgctgggtgtcccaacggccgccaccctcgacacaatggtgggtgatacgctggaaccattcgattgctgggtgggcgcatggctggaggcagtcccgcccgtactggaactggccgccgagaagttcgagttctgattgagggcgtgaacgggcaggtgcgactgcggctggcttttcagaggctgtggttgcggtggcggtgcctgctgtggctgctgctggtagtatggatgatgatgatagctgatgtgctgctggtgctggtggatcgtaggctgcttaagctgcagttgtttcagctgcgtctgtgactgggccaacaactgttgctgatgctgctggtggtgttgctgctgttgctgatgctgctgctgatgttgctgctgtgggatgggcatctgctggataccgggatgtttcaggtagtagtgcagcgccatcagattattggcactgttggctgtactggtgggtacgggcacagaaactggcactacgcccggattcattgagccgccgactccaccgctctggagcagctgtactgtggttccagctggcggaccatggaccgctgctgctgccgccgccgctgctccaattgcaccagcactggcggccagctgggcggccgactttgggtcatagatgaacttgttgaagttctgcaggtcctcgggactgagcactaacgttttcatttgaatgtgcacgggatcggatgtgttcaaggtataagtctggtttccgttttagctgctgccgctggctcagctgctcatgggcttgggttggaaaccctttaagctggtctggcctaaatgcaagtccgggtctgcgggtatctgaatttttttttgtttgtttcaacttttttgggggctacgtacaaacgatcacgctcacgcactttcggctgtctcgatttccaaattcgttgcgcgttcgacttggcaacctgttcctctcttattctccgtttctgtgcgctgcgctgagctgagctgctcccttctctctccctctctctggcttatcaaagggctgaccgatcgactcggcttggctctccgacttcttctgattgcaaaactctcggcggtcgtaaaaagatgtcggtttactttcccaccgtcgtgcacgtacagtatgaatgtgtgtgtgtatgttgctgggcaggagtgtttgtttgtttgtgtgtgtgtgtgtgtgtgtgtgtgtgtgtgtgtgcgatgcgagtggagcacttccagtatgttatcctcttttgttgaagtggtttttcttgtcgctggtggtgctctggtgcagttgctccgctggcgtgcaaatgtttccttgtttctttattctttcgctgctttggctcttaggtattccgcagttgtcgacgtcgatttacctggaataaaataaaaagcaggtatgtgaaaaagagtcttgtttcacactttgcattgtatgcatgtaagtatgtagatatgtgactgtgtttgtgccagttgtatatatctttcaagcgatatatacaatgcactcatgtattcaatattttcttcgcctggtgaaatcaacaaccagcacacacacagtatattttggaacagatgttcgttgagctcggatttcaggtccctttttcttttacccctaaccgcctttagtacaaactaaaaaaaaaaaaagaaaccaaaatgggagcacacacacatgtgcagttttgttttcggcattttttggaaatcttctgcttctgcttcagcttcagaatttgcaattttcggtttttgccagcaggtcttttccggtacctatatagaacattcttttgtgtgctccttttcgagcgaaaacaagtggttgaagggtcaaaagtgcagcggctgaaaaggagaagcgagataaagatgccgaaaacagagagcaggtgttgcaaatcctgcagagagaattgtttagcgattggcaatccaaaaataggtttcccactggtattggtgttagttattttgctgtgtaccctcgcagagtatactagattttacatcattaatgaaggaaattcggaatcctttcttctctcttcatactcacgagtatcaagagtcttgatgtaaatgttacaatttttttttttaggtattttaacatatttagaaaagacaacagtgtcagggtattaagaattcggttcgacgctatttatgttttggttttgttcgaaccagcagagcgataaggctgcgacttcacatcccatactatattattagctttatggtataacttggggtacttgtatgtatttgccgtgttatcatctgactctggctatgacgattcctatgccgacacgcgcacgcagcacatgccccattcataatccccgcacactcccggcactgtccagaaatcccaccatgtaacacacctatatctaatcgcgcatataaatttcactcccagggaatagatttttccctactccgagcaaacagcgactttaatacgcatgttttccactgtttcccttcgcctgtagtctgtaatgaaattaaaactaaattctgttcgccacggggatgaaaatcgagttttcgattcgcctaagggaagaaagctgctgcctgcatacatatacatatatctatatctgttgtgtctgtgtgtgtgtgtgtgtgtctgtatgtgtgcggggtggctgtgtcaaccgaaggactactgtgtacttttgtgtagctgctgcagcaaactcggtcgctttccgatcgaaactgctgcagctgtgtgcctcgaaactgctgactgctgactagctggggcaaaagtttcaccggggcctggtcagcgggtcgaaagttcaacgggaggagaccttcgacgcgctgctgtcagaacgaacagcttttgccaagatgctgggggatggcctaccaataagcagccaatatggcaggaatccgcccaagaaatggttgcttaacttagcctttaaaatcgatcctacagtactgcattgtcacacccaaaacgcgaattcttcagtaagaaacagctgatgagaaaatgggcagctgatttcaagaacttgcctgcagtacatttatctgcataggaagaagtgaaaacgtgccaaagtgttcagtttatagacgagaattacaatcgagaccgtcaataaataagcttgacgattttttcacctatcaacattattttaatctttacatagtatatattacaaccgtatgtgtgcgtcaaacgtagcagccatttgaaacttaagaccaaaccaatcagattgtttgatcaactgttttgccaagttttctaattatcattatgtggatacgactttctacgatttgcgtagaacagctgcaggctttgatcgtttgcacagcattttccactcattttccaagctgattgcgcactcggcattcttttgcgcaattagagggaagttgtgagtttaaaagctgtagagatagataataagcgccgggctgattgatagttctgtgctgctgctgctctgcgaattcccaacgcacatgataagatacggcacattgttcatacaacaacgaatggttcgagaacctttgtttagtgttgtgtgaactttggccttgtgttcggccaaaaaatccgaagaaaaaaaaaaaatccgaagaaaaaaaaaatgggaaacaaaacgaaaaaaaaactggttgtacttggtggggaaactatagattcaagctcgaaacgatgctggtcgccagtgtttcaaagcccttggaatgctggcaggcctaaaagtatctgttttttttttttttgtacaatctaatcatacgcccttgataagtctctgaactcggtacgagatcttttaagtcggctgactaatgaaattttaaggaattgagtcatgttcaggcaactgtttatatgcactcagagaaaatcacatcaaattaatgattatatcaattgggagtggataacacgaaacgtggtaaaatacaaaatcgacagttgaaaatcttcgaaacaataaaaattctgttcctaacttggattgaacctgttggaaattacagggcctccaaagcgggaaaacattgaaaagcctagccctttatatagttatctactttgttctacagggtttatatcggaattttatgcacaatgacagtattaatatgaaaaaacaagcacagcaaagttcaacaacttctaccaatataagattttcaatagctttgctttgacatattttttataaagagcgtagtatgcaataagaatgtatagtattcaaccgtatatagcacttaatcataaaactaatagtaataagcaatatttttcttcagtgcactggttcatgtttgggacgcagtttcgctgttaaggtgattcactcggtatattttccgtaattcgtaatgattttcacttggcacttttgagtcctgttcgacgaggtcgttttcgtgggtgatcactgtgtttatgaacgcaagtgcggagccatgcgttgcggggggctacgaccgtctcccttacacccgtttgatgactgcagtcgcccgtttcccgttacgttgcattcaaggagtcacgcacgcacacacacacacacacacacattcataaacgcacgcgaaaagagagcgaacgagagatgcatgtgggagaggatgcagatgatgcaggggaatagacgggcatatggacatgtgtaaaatatccaaaaatataaaacgaacccagcgaccgacgaccgaaacgtccgacgtaataaaatcccttacgcgctgcaggcagcgacgctgacagcgcagccacatgcttctttctatattgagccagccagcccttatgtgttcaactctccgttatgtacaacaacaaccagtcccatatataaacacacgtacgtacatacagaccctgctctgtgtccgcacgtctgtttgtttgtacggtacgtgcgtgcgtgtctgtgtgcgcgtcgtgtttttgtgatgccatcgtcgatattgaaagtacatgtgtacatacataagtacgtatgtatgtacggcaggctatgtaccaacgtacgttgaacgagaatcgcgttggaaatgaaatgaaattgcgaacaacgaaacggtgcgatgacgatccgatacgaagtgcttcattttatttagttaattcttagcacatatgtatagacagatatatatgcaccgacgactatatacactcgactttgcccgtgtgtgtgtgtgtatcgttttcattttcacggaacaaatatggctgcagcacattttttttacgttttttattcacttttttcacgttcatatagctcgttttttcacccaaagtaatgctgactggccgattgagggttcgtggatttggattccgtttgcgttgcgtttgctggctgccttttgggtttcgaagtgcgtgattacgccattttctttactcgttcgcttttcgctgcacgcccatctttcgaattaccttttttcaatacgatttgatcgatcggtggatctcttaactcgctgcacacgcgtacactgggtcgaaacggtggctgattgggctctccaatcaatttattgactattccgttgaggggttttctttaaatgcaagtacgcaaaactcacgggttttcaccgacacacgaatccgtcttcctcgactttgcatcagtgtgaccgtggcgtgcaacgacgatggccaaacatcgatagtctgggactttgctactatcgaagttattttatacatattcgataccttctgtccctgcatatggtttttaaaggatataattaccacaccgttgtaattattgtaatctttccaattatgtacaagccgtggtagtctttaattgccaacataacataaatgttcacctaatagcaacggaaacaatttcaaaggtaacaagagaatacatatctctcgcttcgaaagtattcgataaatacgtcggtgaagcggatgcttaaaccaactacccaaacatcaaacaacttcaataattataataatattataataattaattgttcgtgttagaattagcgttaaaataaatttatcttttggagtcatttgtttcaattagagaacgcatatttcagtttttgaaaataaagaatgaatgcccctatcaatagttatagcggactaacagctgaaaacacctgaagtttacagagcccaaaatgtttacgtgatgtcattttatgcataaatatatttattgtatggagtacaatttcattacattataatttaactttccatttatacgctgatgattagaatacagatataaatgtgcagataattcagcaatagtcgcgatgcaccatgccatttagtcggttgggttttggatgacaatcaggatgaagtccttgtcgggtgccaccatgatctcgtgcttcttggatcgcacccgcaggaatgtcatgtcgttggaaggatccaagtccctcaccacacttcgtgccttgtccgccagctgactcattaggccagcgtactgaacggtggtagtgttgtccagcgtggatttgaccggaatacctatttgggaggcgttgagaattagttagatatcttagcacacactggggtgcagttgaaccacccaccttcattgttgaccacaattgtacccacaacacct

SEQ ID NO: 27806 - DNA, 1973 bp, DROSOPHILA
caaagtcgaggaagacggattcgtgtgtcggtgaaaacccgtgagttttgcgtacttgcatttaaagaaaacccctcaacggaatagtcaataaattgattggagagcccaatcagccaccgtttcgacccagtgtacgcgtgtgcagcgagttaagagatccaccgatcgatcaaatcgtattgaaaaaaggtaaatcgacgtcgacaactgcggaatacctaagagccaaagcagcgaaagaataaagaaacaaggaaacatttgcacgccagcggagcaactgcaccagagcaccatcagctatcatcatcatccatactaccagcagcagccacagcaggcaccgccaccgcaaccacagcctctgaaaagccagccgcagtcgcacctgcccgttcacgccctcaatcagaactcgaacttctcggcggccagttccagtacgggcgggactgcctccagccatgcgcccacccagcaatcgaatggttccagcgtatcacccaccattgtgtcgagggtggcggccgttgggacacccagcagcagcaatattgcagccgcggccaatgctctactacgggcatcggccgcatccacagctccgagctcctccgcctcgtcgtcctcttcgtcctcatccgcgtcgtcgagctcctcgtccagcagctcctcctccagcgccagcagttcagcgaactgcgccaaaaagctgaagacggaaccaatactgtcgcagtacaatcaaacggagcgccttaattttgcgaacacgtacatcgtgtggagcgaagagcattggcgacgggtggtgttccacgacgagcgtaggttcaatctggacggaccagatggcttctcatactatttccacgatttacgcaactacgagcgaacgttgtcgcagcggccgcgaggaaactctgtgtacatttacctgatggtctgcgtgggaggagccgtgcttctggaggtgtcatccgccaaacagcgaccagaatcctgcatcgaggccatcatgcgcgagcggcccaatattgtaaccaaattgggtggcaattcggagtttgtgctgcaggatcataattggatgtcgcacgccctgcccaccgcccaggatcttctcaatgccgaaggcctcaagacccagaaatggcccaccattgcccatgatttgaacatcatggagaacgtgtggggctggctcattcgcgaggtattcgacggcggacgaaagttctcgcgcaaggacgacttgatattccgcatcaaggaggcgtggtcccacctgccactcgacctgatcaccaacctgtacagcacgttaccggaacgaatcacggagctctactacacacagggcgtctacacgaattgttgacaccggcgtccagagcaaccaggatgtggacagggcttagagcacttgaccgctatggcggtcgtgcaggcggacaatgatcgtgttccagaacctgatccgaggagtaggcgctcctcggcgtctgtcagaggccggagagcgaaggaagaaaatctttatatacaatttaacttaactttttgtgtatagctttaagatgtgtgcaaaggagctgacaggactgcttggagaccgacggactgaaagcgagaaagacagacgattggccggacggaaagacggacgcaccgactttatacgttataagttatacagttttttagttatctaaacaattatgaagagcagaaaacagcagattgtgggcagaacactcgttaagtgttgccatatcgctttgtaattagtgttttttatcccgcccctatttcccacaaattgcacctaaaaaaacaacccttctcccacgaaatcctcgttattcgtaagccttagtttaagttgtcgttttcctttttacccccacgtccccccactattaagaatataacaaatatattagttacaaacaagtttatttgaactt

SEQ ID NO: 27807 - protein, 146 aa, DROSOPHILA
MVCVGGAVLLEVSSAKQRPESCIEAIMRERPNIVTKLGGNSEFVLQDHNWMSHALPTAQDLLNAEGLKTQKWPTIAHDLNIMENVWGWLIREVFDGGRKFSRKDDLIFRIKEAWSHLPLDLITNLYSTLPERITELYYTQGVYTNC

SEQ ID NO: 27808 - DNA, 2727 bp, DROSOPHILA
agtgctggtgaatatatttaagccaaatccccgagccaggctgcctggaaacagagcgaggaaagccaagtgggaacttggcacgtaactcacgtttccgcgacgatcttacatcggtttgttcagctgcaatcggcacataaatatgtacatacatacatacatatgtgcatacttacttgtgaatgtttaaccgctaccgcaaactttgttgcaaacgtatgtttttatcaaacaatggctaggtcttatcaccaaccagggcgccaaccttcgatttgattttccacaagtattttcctattccttatctatctgccagctattcgaaggcacaaacaaaacgctgctactgccccttgatacaaagcattgcatttttgatggggtgcaaagggtgaattatgtgtgcgcttctctctcacttgtttatttcccagtctcctcggggttcagggttaagtttagccacaccgattagattaggcgttcgcccagccaaagtcacaatacctaagcaaatgacgtaggcaggcgatgaggtttatagcttacagagaacgtatgtaagaaccattaaatgggttaaatatacgagctaataaggtcaaaatggcatttaaattgcagctaaagataatattgctacctgaaatatatttggaaatctttaaattgaaattgaagagctttccaaattcataagttttactcctcgtcttatcgcagcaaccaaaaacaagcaatcctcttaaaaggactcagaaaaaaatcgagtgaataataagattgagtttgctccaatttacatcaagacatggaaatatttaatattcaacatccatcaaaaaaaattacacttatttatgttggttcaccacaaaaaaaaatacatttatatatgtagatttgctaaaaaaaaaaaatcaacgtacatttaaaaagtttcgcagtagacgccgaccgacaatcgttggacaattattgtatgcttatggacttagaaaccctggaaactccggcggaactcttcctcgaaatccgcgtggccaagatcaagcttgtggtagtcggtgaatccctcgcgatccagcttggcctgggcccaaaggattagcttgatgaggaacatcattcttggctccatgggctcctctttgctcttactctcatcctcgtggcagcgtaacatggctgcattcatttcaccggccaccttttggcgatatgagtagtacatcagctccccgtagggactgtattccggccgatcgaaggccagcagacccatggtccgctccacttcgtggtagtgacttggatcgaccttggaaaagcccgctgccttgctctgggcaaacttcaaggccttctccatcttctgatccctgatcatctcgatcaggcgcaactgttgcatgtgaaaaaatacatagttgtcggtctcgaagagccgtggatagatccgtgtggccaggtccatggcgtacttgacctgacccacacgcacggcatcctgaatccttaaacgatccccgatggtgtccatgtgtggacccggcttcacagacgcctcggtcatgaaacgcttggcggcctcttgatatccctctaaatttgaagttatgtacttcagttaggggggaagcatactagtgaggctcacctgtaaccagatagttcatcaccaggcgattcaggtccgcctgccggcactggaagctcatcatccgatggggccacgaagtggatggtctatactcggccattctcaatttttatagtttgatttaggtactgaaaattgaaacataggtaaacatgcaaattgacattagtcctgctttacttccttagttctttaattatttctcgtttttatctatctactaattgtaaacatgttctttccatttatgtgaagacattagaaagctgtcgagttttgtcttctttgttttattgattcccacacattttgttgccatataggaaagttccgctgatgatcatctattaacaatgtgctgatcattatatcacttttgttttcagcgagtgagttacacatcatttttgcgcattggttgtacgtactatcgccaactgatttatttttatggcctggcattgaaaactgttgcagttgcgagtgtgtattgggatttgcatttgtattaagtatctgcgcgggtggggtggaccatctgtctgctcgtgtgggcgccaaaaagtcaatccctggccaagcagagaaatgccagaaatagcagggaaggctttttcttcataaatatctcactttcgtaaacattttttgtccgcgcgtcttgccgtgtgtttgccgttttttgttgtttttatttttatatattttatttgtttatttgcacagtgttaaaacccacctgttgttgtttttgttgctgctttcgttgtcaatcaaagattgttgcaaaaatttcacctgctgaaaacgaagaaaaggctgaaatgattttgcaatacaatggaatatggaaaacgtactctgttgtatgtattgttttggatggctagcgatggctagctgcagtttttcttctattttctttttggcaacaatcggcttaatccaaaccaattggaccaaaaatggccgcgttgcgagcgctgcctttggcgcctgctggaacactactctggtcccaggagctgcaggacctggactgcagctactcctccgca

SEQ ID NO: 27809 - DNA, 672 bp, DROSOPHILA
atgagcttccagtgccggcaggcggacctgaatcgcctggtgatgaactatctggttacagagggatatcaagaggccgccaagcgtttcatgaccgaggcgtctgtgaagccgggtccacacatggacaccatcggggatcgtttaaggattcaggatgccgtgcgtgtgggtcaggtcaagtacgccatggacctggccacacggatctatccacggctcttcgagaccgacaactatgtattttttcacatgcaacagttgcgcctgatcgagatgatcagggatcagaagatggagaaggccttgaagtttgcccagagcaaggcagcgggcttttccaaggtcgatccaagtcactaccacgaagtggagcggaccatgggtctgctggccttcgatcggccggaatacagtccctacggggagctgatgtactactcatatcgccaaaaggtggccggtgaaatgaatgcagccatgttacgctgccacgaggatgagagtaagagcaaagaggagcccatggagccaagaatgatgttcctcatcaagctaatcctttgggcccaggccaagctggatcgcgagggattcaccgactaccacaagcttgatcttggccacgcggatttcgaggaagagttccgccggagtttccagggtttctaa

SEQ ID NO: 27810 - protein, 223 aa, DROSOPHILA
MSFQCRQADLNRLVMNYLVTEGYQEAAKRFMTEASVKPGPHMDTIGDRLRIQDAVRVGQVKYAMDLATRIYPRLFETDNYVFFHMQQLRLIEMIRDQKMEKALKFAQSKAAGFSKVDPSHYHEVERTMGLLAFDRPEYSPYGELMYYSYRQKVAGEMNAAMLRCHEDESKSKEEPMEPRMMFLIKLILWAQAKLDREGFTDYHKLDLGHADFEEEFRRSFQGF

SEQ ID NO: 27811 - DNA, 3114 bp, DROSOPHILA
aaacctgactaactgtgaactcaacttgttttagatctagaaccagccccatttcagtgcccggatcaaatgcgcggcaaagacaggagtctacatcgtccaatggtagctggcaggtggttaccgacacgggttcaattgactccatgatgaacggcagctacatgatgcgctttgtggcgcaacaggcagccgatggtggcggctcctcaaacattcctttatgcaatggcggcaatggttaccactgcagcatcaatgcagcatcgagtggcagtgggagcggaagtggtagcagtatcagtaacggcagctcgacgcacggtttcgcaaacggttcctccaaagacgtaggcggcagcactatggccagcaagcaatgcatcaacttgtaagttgtagtctgattattcgacagcaaatacataatgacataattttgttttacaattggagacgaaagcaacgcctgaatgcagtgcgcgccatttttatacaagcctacggcaagacgattggactgaaattcaaggagggctcatccatgaacctggccacgttcattgggaacctggcggaccaactgttttgagaaaggattagcagctatgaccgtttgttagatttcatcaacattgtttgtttcttgttaagtgctacgctttcaaccaacgactgtatttatagacctgttaaattgcgttctttagtatctgttgacgattgtgtagtgtaacggattactgattaccgataagcatcgaaagaaccaggcgatcgtaggcaacgagcaaacaaaatcctgtcgtccttctgccccggctaaaccgctctcctgttctctaggttctcccgctccttgtttgtttagttattagttcttcgagaatgcaaagcaagtgaaatataaaatgctatttggattatacaatagttttaagttgtaatttatagtaatgtattttttaataaacttatgtgcattttatacgaaagaaagtcatgttctcagcgtaggccgccttgagcgccgtattctagctaagggtaaataatcatcaatttccactcgcttcagccggatgcgacaccttttaatgtagtatttcgcgcttttaagaggaacgaagcgtggtgtttctatcggtcgttcgtcacattttgttgtatctttaattttaggttcaatagctgtttctattttgattttgacatcatttgatcctttgcaagcattattatatctgattcttttattggcacttgcgacattgggtcttattttgtgtgggctaatgccgaatctgtccatggccggactgagtaaattgtctgctgggagctctttcacccgtatcgctttaagaaattcgtcgtattcgctctgaaccgtctccaggtccttaggacccagctttcgagtagctttctcttggcgctcttgctccaggatgagggcgaggacctccacttctaaatgccggcgttccgcttgcgccatagatttcacgaaaggcaactgactgagaagaaactcctgacacttggttttcggcacatccgccggattcggggcttgcatgcgaatgtgcacatcgtgcatcacccgccacagaggttcagggatttgccctttggaaccggccaaggctctgaccagcgggcgcagcttcacccaacgcagcttcagttcacttacggagaacggagtactcagctcaacgtgctcgtagctttggttaaaggacttggccagctgatcccaaccccaggagtcgtagtcaacgtccattttgggctccacctgcgggatgataaggaagggataccgggcgagcatctccatgagcagcaagtcgtttaaaacaatctggccgctgatgttggtgtttgatatgttaatctccaaatggggaacagtggaatggatcaccgtttcctcggcgctgtcggtactcattttaatatttttcgcactgtgtttctccaacgttctacaacacatttgtgtactaattcatccgtatgttttaatataccacttaacggtaatttctttaataaaatctatgtttttagaatccgagttttaatttgtgtttgctaactaatagcgatggaaattgtttgagaacagcaatcgataggtaagcgaccaaagcgataggtaggaaaatatttggcttaaacaatcgataacttatcagaccatctccagcgaggaagaagcgtcgtgaaaaaagccgcaaaatatacacagacggaagtattttcgcgaattacttgaacacaacgtgcgaaaaaaataatcggaacgccccaatatgagtggcggcaccatgctatatggcggcgacgagatcggcgccctggtcttcgatcctggacatcattccttgcgagtgggctacgcacaggaggattcgcccaaggcggagataccctcggttgtggggattggagcagctccagagaccaatctcgatccggaaactaaaacagacaacaatgccacgccaaatagttagtttctacatcgcctttatttagtttatggcttttaaaaacccggaaaaaccggcaatccctacccctactctagatgctgaccagcgcaagttctatgtggacaccaactacgtgaccgttccccgttccaatatggaggtgcagacctatatgaaagacggcatgattgacaactgggacctgtttgagaaggttattgattatgcctacgccaatgtcattcagtcggagccggaataccatcccgtgctcttttccgaggcatcgtggaatgtccgcaacaaccgcgagaagctaaccgagcttatgttcgagaagtacaatgttccagccttctttctggtaaagaacgccgttctggctgccttctccagcgggcgggccaccgctttggttgtcgatagtggagccacccacacctcggccgttcccgtccatgagggctatgtcctatcccaggcggtggttaagtcacccctgggtggagacttcctttcacgacagtgccgccagcatctggagaagcacggcattgatctgtcgccggtatacaagattgcctccaaagacgttgttaaggagcgc

SEQ ID NO: 27812 - DNA, 1114 bp, DROSOPHILA
ctattagttagcaaacacaaattaaaactcggattctaaaaacatagattttattaaagaaattaccgttaagtggtatattaaaacatacggatgaattagtacacaaatgtgttgtagaacgttggagaaacacagtgcgaaaaatattaaaatgagtaccgacagcgccgaggaaacggtgatccattccactgttccccatttggagattaacatatcaaacaccaacatcagcggccagattgttttaaacgacttgctgctcatggagatgctcgcccggtatcccttccttatcatcccgcaggtggagcccaaaatggacgttgactacgactcctggggttgggatcagctggccaagtcctttaaccaaagctacgagcacgttgagctgagtactccgttctccgtaagtgaactgaagctgcgttgggtgaagctgcgcccgctggtcagagccttggccggttccaaagggcaaatccctgaacctctgtggcgggtgatgcacgatgtgcacattcgcatgcaagccccgaatccggcggatgtgccgaaaaccaagtgtcaggagtttcttctcagtcagttgcctttcgtgaaatctatggcgcaagcggaacgccggcatttagaagtggaggtcctcgccctcatcctggagcaagagcgccaagagaaagctactcgaaagctgggtcctaaggacctggagacggttcagagcgaatacgacgaatttcttaaagcgatacgggtgaaagagctcccagcagacaatttactcagtccggccatggacagattcggcattagcccacacaaaataagacccaatgtcgcaagtgccaataaaagaatcagatataataatgcttgcaaaggatcaaatgatgtcaaaatcaaaatagaaacagctattgaacctaaaattaaagatacaacaaaatgtgacgaacgaccgatagaaacaccacgcttcgttcctcttaaaagcgcgaaatactacattaaaaggtgtcgcatccggctgaagcgagtggaaattgatgattatttacccttagctagaatacggcgctcaaggcggcctacgctgagaacatga

SEQ ID NO: 27813 - protein, 319 aa, DROSOPHILA
MSTDSAEETVIHSTVPHLEINISNTNISGQIVLNDLLLMEMLARYPFLIIPQVEPKMDVDYDSWGWDQLAKSFNQSYEHVELSTPFSVSELKLRWVKLRPLVRALAGSKGQIPEPLWRVMHDVHIRMQAPNPADVPKTKCQEFLLSQLPFVKSMAQAERRHLEVEVLALILEQERQEKATRKLGPKDLETVQSEYDEFLKAIRVKELPADNLLSPAMDRFGISPHKIRPNVASANKRIRYNNACKGSNDVKIKIETAIEPKIKDTTKCDERPIETPRFVPLKSAKYYIKRCRIRLKRVEIDDYLPLARIRRSRRPTLRT

SEQ ID NO: 27814 - DNA, 3120 bp, DROSOPHILA
aaatgtacacggtagaaatttaacttctctttttcttgcagtccaaaatgtcagaagaagaagccccaggatctccgggtgaggctgttgaagaagaagataccactacatccgatgctgatacaaccacagctggtgcccgcatgatgatgatccacccatggctgacggccgccgcagtggccatgtatgccaccaaggtcatgtgggtcaagttccgtgagatcggcctggctaaacaggaaaaacggctcaaaaatcaactggcgaagcagtctaagcccttgcagactattgatgaagatgtttccgaatctgatgcagaatatgatgcagaatctgatgcagaatctgatgcagaatcagatgcagaggacgaagacgtcgtcgggccccaagtcgaagatgcagcagagggaccgggattcgagccaaaccgtgtggatatatgccatcgcccgatcgaagtctctactgactgctgatgttcgaatcggggatgaaggaccgcggaaggatgaacatgcacacacacactggacaactacactaattgttgtaatgcttgcgttttccgtaggggaggatccacggacaatgtttgacatgtaccaccacattgggggacacaaattgttagttttaaaacattaaccaaatttcttgtaccacattgcgatatttgaattagtttttatgagtttatattaaatgctgcgatgaaagtatggtaccctattaacaaagagcaattcgttttgggagggggaaataagaaatcgtctactacgacacatgggcaggttcgatttcagttttcccatatggcaacagattctttcgtatcggtgtggtcatccaagggctttacttttgtgttaagattttcaagaacaaatttggattcacgtcatctcgataccatacacctaactgtcaaaaaactgcttttatataagattattgtgattaattccctttaccaggcaggaaatacaacatgagtgagtccgcatctgaggacacagattctgaaggggttgctgccgtgccagttcccgataccacgcctcgcgatgcggacgccacaacttccggagcccggatgatgatgcaacacccatggttgacggcagccggagttgccgtctatgccaccagagtcatttgggtcaagttgcgtgtgctccggttggccaaacagttgcgcctccagaagcaaagattttggaagtctaatccctggcaggacaatgaatctggctctgaggcagagagtgataccgatggcgaggaaggcgattctgacgagtctacagatacagatgtgaatcgtaatagaattgaagctactgataatgatcggttagtccgagtgccgcaatagtttttcaagatgtttttcgaatttaaattcaatgctgcaagttattaacattgttagctggattagagggtaccatatgctttaaaatacaaatcgtttctcatattcaattttaaaataccattaacgattgatatcactgctttaaacaatgcccatataagcagtttgaaaccagtttatctactgtcatttttcagattacagattaaatgcccaactgaatcgtcaaaaggcctttaatgtaagcaatcaaagttgtgagttatatttatactttgcatttttattgatttgtaacaattttgacaccttgctgttggttcagcctgccggctctcccggtttcagtttttgttcctgtttccgtctcgatcgatcaatcaaaaacccgagcggcgcgtcattatgtcatagtggtgaaaataggggggaaaaaatggaaaatttatacataggcagttgcaaacgggaaattcatggaacaggcagcggcagcggtcacggaaactggggcacatgcaactgcaaccgagcggtgtctgtgtgctcagcatgtttgcacccgccatcatcatcctgtcgccaaaagccacgcccactagctaccgtctcccctgtcaaccgcctcttccgcccccttgcccatcgaccatcgggtgtttggggacaggaagaggctaatgaatgccgctgtcaattagcaatgggcgttggtaaatcaattcaatgacactgtggcgctgctcaaatggcattcgccagtacaattggtaagtgaaaagtgtctgaagttgtcttaaacgccattaaattcgagctaaaaaggtttaaattttacagatttacttatataaaccattttatgaatatcacatgaagttgtaaaataatgcttatagaaattggcatttctatcagttacttaaaaaccatttaaaaaacacttaaacatttttattatcccatttaccacataacactccttcagatcgacagaaattaattaatattggataaccagcaagacagcggaaacaattaccccttttagccccattttgattgcatgttgatggattgcttagctcaatcacttcttcacatttcgcattatttaattatcaataaaatgtgccaactgtgctgcctctgtgagtcttttaattgttcgccaatgttgctgaagtttgaatgcaactccggattgatttcgtaacgtgccacagaaacgtggtctaaataaagtaaaatgccgcgccgccaagcaactttaagcaccaacaactttcgttacatattacatttttgttgttcggcttttcttagccgtttttcatttgcttttctaaaacgcgaacctacacacacacgcacacctcttatttgctactcgatttccttgacggcttttcctcaaatgatttaagcttcgttttattttttctgactcgaattcaatattttatctttggtttcttttcacataataaacgcgcttttggcataattgccccagcggttttatgttagctgggcgggtggggggttgggaaaatcgtgtggagcgggtcgataattatgatgttgcattgttgttgcggttatcgtcatcgcctgccacgataatatgccgtttgcccgccaatctggaacctctgcccctgtccccagtcccccatccaccatccccaactcacttttccgcgctttcgtgtaatatttgctcacaa

SEQ ID NO: 27815 - DNA, 747 bp, DROSOPHILA
atgagtgagtccgcatctgaggacacagattctgaaggggttgctgccgtgccagttcccgataccacgcctcgcgatgcggacgccacaacttccggagcccggatgatgatgcaacacccatggttgacggcagccggagttgccgtctatgccaccagagtcatttgggtcaagttgcgtgtgctccggttggccaaacagttgcgcctccagaagcaaagattttggaagtctaatccctggcaggacaatgaatctggctctgaggcagagagtgataccgatggcgaggaaggcgattctgacgagtctacagatacagatgtgaatcgtaatagaattgaagctactgataatgatcgtttttgttcctgtttccgtctcgatcgatcaatcaaaaacccgagcggcgcgtcattatgtcatagtggtgaaaataggggggaaaaaatggaaaatttatacataggcagttgcaaacgggaaattcatggaacaggcagcggcagcggtcacggaaactggggcacatgcaactgcaaccgagcggtgtctgtgtgctcagcatgtttgcacccgccatcatcatcctgtcgccaaaagccacgcccactagctaccgtctcccctgtcaaccgcctcttccgcccccttgcccatcgaccatcgggtgtttggggacaggaagaggctaatgaatgccgctgtcaattagcaatgggcgttggtaaatcaattcaatga

SEQ ID NO: 27816 - protein, 248 aa, DROSOPHILA
MSESASEDTDSEGVAAVPVPDTTPRDADATTSGARMMMQHPWLTAAGVAVYATRVIWVKLRVLRLAKQLRLQKQRFWKSNPWQDNESGSEAESDTDGEEGDSDESTDTDVNRNRIEATDNDRFCSCFRLDRSIKNPSGASLCHSGENRGEKMENLYIGSCKREIHGTGSGSGHGNWGTCNCNRAVSVCSACLHPPSSSCRQKPRPLATVSPVNRLFRPLAHRPSGVWGQEEANECRCQLAMGVGKSIQ

SEQ ID NO: 27817 - DNA, 18459 bp, DROSOPHILA
tagagatgcaatgaaattgaaattattatttggacaggtcttctcacacctttgtttcacattctattattgctaagtgttagcagaattgtatcccatgtccttacataaggattctcaaaccaataacaaaattggtttgcgatttgaaaacaatttgatgctattgaataataacttcatgaaacgaataacacaaacatttgtttttaattttagatattttttattaaaatggtttttgtctcattttattataactaaacgcttaagaactaaagatttttgcaaattaccttaagtacatttagtgtgaagagagtgcaagtcactaaaaatcataatcttccaaatcgttttttgtgggcaagatgggaatggattttacaatataaactggcatttgaagtacacatacgtattagatatcaactgaacactgttacatatatcgtgaagtatataagctatggaccgattcgagttatttatgtatttagatgcacgttaggcgagtattgcttgtgattgaggtttatctaaggatcgttcctttaagttttagaattagattcgatttggggctgattcatatatccgtatgatgtgcatgcatgtgtgtacaatttttataattgtttcgctatagtacattcaaaccgagttcatggcgattatgttagttaggctgttcataaatttatcaaaacttaacatcacattgcttctcgattacattagtttgccatatttataagtaagccttgaaagttcaaagtttggatatctgtatatatataatatactcgtacgttgttatgctgaaactgatcaaagtctagattcaaataacgatatgaatgtgcgattctgcggcagttgtttaagtatcttcattgttcaattgtcgtaactaactatgggttgtggcttttgttatcgtattttatgtgaatcgatttaagtgggtgaattgcaccgtatgggaggagctgtgtcatgcgataataccctaatgtctaagtctaagtcaatggatgcattgtaaatgcttcggtaaatgcataatcctttaggaagagttttctgttcattgctgaagaaagtatgtctatgatgatgtcgctgataataatgattataatgagttcttctcgtcctgggctttttattccgcattgttattatcctcttcgctttcgattaactaaaattgattggacgacgatgacggcattttgagggcgatactctcttcgtgatatcagacattgggcttacggaaaatctcattcggatgctgattgctgctgaagttctgccgtgtcgagcattgctggaaacgaataataataaaaaacaaaaatggacataagacacacacaattagtaaatatgatttcgaaggtacatatacacacaggccaaagtgattgcattttaattacatttccattgcatctcccacccggctgagcaattaccttgcatttgggtcacaccacaggtggggtgcttggataatgacaacttaactaccttacaccgcttttattattattttccctttttgatttgacgctgcggtgtcagcctggacagccgcccaactcgaaggctattaaaataattgccattcaaatcgtttattatggcgtatgtctgcactcgggcccaccggaaccaccaaacacgaccattccaccaacctcattttaccacaaatccacccccaagggcgttggtcctcattatcacttaccgcttgcttcttttcccaggacttcattgctgttttgtatttctcgaactcgtggcaccagtccgagtagattttctgatagtcattactcttgttcggcggagtgcatctgttccaaaaatagaaaaacaatgtttggaagatattattatctaaatataattgagtagtatatgggttcacactatgctaatcgatagggcaaaatgtgttcaacttgtatttctttgagtaatatagtgcggtgtttgttagttaggctttcaatatcgacagagtgtattggcttacctgtgggcatccaccgtaatgttgtagctgcacaaaagcgagccgcccaaatggcaatcgtaccgaccaccatcggcttcgttcacggaaaccacaaccaggccacgttcggtggtctcaatgtatttggtcggcgagtaacgaatctcgtagctacgaaagaaatccatgcgattggttgtcggtgtatgaaagcaaatcatatattccactcaccgtcccttgtccttggagtgatgataccaggtcacttgctcattcttcagcacttcgggtattttgacgaaacagcccagatgtacactctggccataggtcaccacaatcttctttttcagcacactcgaatcgcaaatgtcactcgtttcattggccacatcctgcagatgtaaaagtgaaattaatcaatccgtttcagctttgattttgagtcaattgaaaaaataattagatgggtttgtggtatctttacgtattaagttgataaagaagccactcgtttcatgaatttagtatcatatatgccactggctttaaatcacccacctgcagtaaatccagctcgtacggtcggcacgtattggcctccttatcccagccgcagtagggatcacggacgcagcggaagcagttgtcgtaacggcgattgcacatggccaggtcgatttgcttgatgcgatgatcggtgccaatgtagaggctcttacgtgtctggctgatttccatcacttggatggcctcgtttggagccacctcgaagatatccagcagcttggacagcgactctccgttacggtagtactgcacgattttgtaaatgcgacccagattggtgcccacatagtacacaatgtattcctgattgaggatgtcaatgcgaattctgaaataaggatgttttaatcggcatatgagtaaccttgaattaaacctatacttcaacagcgtattacgtgattgattcattttaagagcattcttttaatgagcttacatcagtttgatttatattggctaatatttcttacattttactcgattacatttctgaataacgtacggattaaactagtaaaacaaagagtcaagcattgcacctgcaaatagaaaatatatatttgttttcaactcacttgtcaacgacgagcttggtgaagaccaaatcccttttataatagactggattgttgtgctcgtgatttacggctttgtccataagtggatgggatctgatgaaattcagtacggtatcgggcaggtttgatgtatcgttgacacatgtacccggccgtggttccggcacccgggagttaagcaccggcagccatgcggaattcgatgaagattgctccttgaatttgcctgcgcgcgcgggataaaaagtaaaagagcacaaaaacaattgctcatatgagatggcagggaatggaaaaaagtttatcaagctcggagtgctgagctgcaattgaagacttaaatctacgaccaaaggtgtcagctggttttcctctaagctgtcagccggtgaaaaataaaaagagccaccaagtgtgtgaatgtgtgtggccataatccattcaaatggattttctaatgcgatttatgttgcgcacggcaacgaatcgaacggaacccaactgaactgaactgaactggactgaaattacaaaacactcaacacacacagtggggtgctagcggtgctatcgaatggataaaacaaatgtatagattgcaaataaaatttgccaataagttgcatgcgctatttccattttcgtttccgtttccaatttcaagtcagtgccacccaatccacttgggggacaatggacaagcacagaaaattgcatgtcaacgggatgtgcggatcgctccgaaagtcggtgggcttaccattgaaggcagcctgaatctcgttaatgtggaaactgcatacggcagatccaatcaggccattagtgctcgtcgtgaatgtggcgaagaatcgactcttatcggagggcagctggtagaccgattggatctcgttgaaatagaacggaaattcgccggagatgctgcagttgagtctggccttcaggtaggtggcccagttgtgggccagcagattctttccacccacatccttcttgcacacccgtgcgatgcgcgaatagacagccttgccgcagttgatgtattccacggcggtttcacggaaaaagaaatacacgtactccccaatatcaaaggagccgacaaagtttggttctgtgaattggaaaaaagaaaaattaaacgttagtaagctaagaccatttacttgcatctctataaaagtattagagtaaattgcactcagaaggatatatgcttatttcatacttactgtccaaccacttggagtcgtatttcagagtcctcttgaatttatattccaaacgtttagccgaagtattatacagatcagtgcggaaaataaccgtatccgccttggtgaactccgcattggtgccggagtactgtggagtagcaatttacagcctcagttaaggtccgagaaagttttggtttatgcgagcaatttgcttaccaaaccgggcagaccacccggattgccattctccacataaatcgcagttgagttgtcgaggggatcgtaggggcacttggcaatgcccagacccacgccaatcacatattccgagcgcggcaggtgggttagattcgccttaaggatggagagatgggtgaataagtgaaatgctgagcacaaaagattacccttcgagtgttttgactttagtttaggtgctttatctatgaacagatgtcaaaggctgaatgagcaactgttgattggcatctaaagtcaactgtcggtggcaatcttttcatgggcgacatgaatgaaagatggcaatggcaaatatagcatatatgccatacggcgtatggcttcccaatctggccaacttacatagataacataatccttgggattgtgggcgttggtgccgcatacatagagcctatccccctggtccattgactggatgacacgcacatggttcttgcagtcgaagatctgcaataaacacacacatatcgattatagagacaaagatactggaaaaagaacaaaagaacgctggccgggttgacaatgttgtgggtcgttcttttcaatttatggtacggcgaacggcatcatctgttttgctccccaaacacagcgaaatcgaaatagtttcgagtgtgttccgtaatgcagcagcgaatttgtggcagaaatgtggacaaattgcaatagcacgcgtcgctgccgaagctaaatcaattggcaacaatgcaacgaaacgctgcagaaattactgccagcgcaccagtggcacacaggcagctttatgatgacttaagcaggatgcccatgtggcccccatatcgtgtgtgtgtgtgcaacatgcaacatgctgctactgctgctgcttctgctgttcctgccacgaataacttgaaattgatttcgaatgaaaggatttgctgtcacattataaacgagttgcaacagtagcgtctgccacattgccagtcgatgggattttcttggttttaaactgcaatcgagttactgaaatacctccacagggatgtgatttatttgagagtatatacatatgtagaatacataaagtagttgcagatgcacaaaggaatttaacaggagaaggtaaaacaattgtggttaggatattcagaaaagttgttatgaaatcagtataaaaaaggggattttatgaatggaactgaatattggtcaaaataatatgaaagtttttgtttgcaaaattagtgaacaatttctcttggaagtttcaaataaaaatattattatcaattagtttcatatcttttatgactgcttttcttatacgttttgtactcacctgacttttgcctttggagacgcagctaaccacatcatcccgtgttggctccaagttgatcacatcccgctgaaatgaaaagtaagcccggcataaattagctaaatatataccaaatcaaatcgcgtacacctgccaaccattaaccattaggttaaaagctcacgtgccgcggcttctatcaattcaaaaattcaatttactcaaaaaagccgaaatacaaaaattgtatattgcaaatgctgaacggggaggatgaggctgcttctgcctcatgcggcataaactacaactagcgttcgtccgtggcaccttcagaatgctttcaactaaatttatttataaatcacgtaatgttaccccagcacacacgaaatattttcacgcaccaacctccattgctccattgccgtcgcagccacccacctagccaccttcatcaacgtgctccaatcccaaccacccaaccacctattcccgcccacttgggaggcaggcagtcgcagcagcagagcgttcatataaaaccgaaatcatgtattatttagttgaatttgcatttggcgcataaagcagcgggagcagtgctacgaggagcccaggcacaggaggcggaacaggtgcaggagttgggagcaaacgaggcaaacgggtacactgagacaaaatcgagaacaaatacgtcaggctacattttcatacatttcactatatgtacatatcagagattaccaattgaagtattagagtataatctctctatgattagttgagtatattttatgttagatcttactagctcatttttttcctcagtgtaactccatgtgtataggccagaaccaaatgatgcccacggcgaatgtattcgcacttaaccgcataaaatatattgacgtatcctggctggcgagcatgctacaaggaaatataacctcttagacttttacgattcggcccggagatgcgtttgcagggctcaaaatggaatggaatggtttggtttggtttggtatggtatggtgtggaatagaggacggcaactgtgagaagcacaccaagtcaggtgtgtggcgctcataaaacaaacttttgcaagtcataaattcataaacagcccaagaccgagcccaagcttgagacccaagacacggggtagcacttcctgtaatcgaattgcctcgcaaatgttgtggcaagttcgcgtatgtggcatgtctctcaaaaaatttatatctgggcaacgcataaacctgagcctgcagaaccgaaccagttcggggaatacgacaggaacataatgtccggacaagagagtgcatattaaatatgctttttggtccttctttacttttttttttttttttggtgtgctgaaagttggcgggttcgaaacctttgggttaactaaaataaacattttttttttttagccgctgcgccgtgggaatcgaagatttgtggctgtcgacgtcgttgttgccatttgaagtgcgcctaaaaggctgctaagccggtgtattgtgctgacaacgtttagatggcgctttattgccacaaaaggctgcaagaagcttagcggccatttggaaactatggcaaacatatacacaacaacaaccctgcccagtggcaacgtggcgtataatgaatttttaacaatatgccacagagcaccaacagcaacggccgcaagcaaagttgtttagcccgaaagcttttcacgatttttttcacccccccactgtcatctagatttgtggcccgactctcgacaacctgccacatcccacatcctcctccatccccattggcgacctttcgcgacgaaaggacttagcctaaaagcgtgctctaggattatcatatttaaggcatttagcacaaacagagccgaagtcatggcagccatacttacattacaattggatgaggagatattctgcaggttcacacggaatacgcgatccctggaatagagaaatatacaattcattgtagttctgctgctgtaggggattattgaataacagctaagagatgggtaagagataggttggtagatagaaagataggtaatagtttgccattaatgtctttacttatgaacttaattaaattagataaagtggcaatcaaatgttatatttgttaatcaaaaataaacctaaatattactattttgttctaacttttgaagttctatagcatatgtacttacatggctcccacatagagcgtatctcgatcttcgttcatatggaatgtacgatagtacagcttgccgcagttgaactcccgcacatgatctgtaagagaaaatattttcgttaagtaaactcaatatttgcacaagaaattttccctaagtgaaccgagttgcagacgccggacacagtgtctagatagtgtcaacaaagtttccattcccgcacagaatggcggacagttttgaccacagacaaacaggagcacgaagcccagtcggccacccaaaagatacggatacagatatcccatttcaatcaaacggcgtttgtgtgcaaaaaataaaaacgaagtaagagagatcttgaaaatggtcctgtttatttacattgaagttttccgcgtggcaaagcagaaaataagtagggtttaggacacaaaatgcctttccaaagccccccagacaaacaagagccattaattataagtattgtattatgttaatttcagtgacgtcgctttgtctgcaaaattgtttgcccagcgggatgatgtgtacatgtgtggttactatgtggttatattgctaaatgctgcgcacacaattctttaattaaactaatttgtatttgccgcctgtcactcatcactgcttcaatatcatcagcaattaatattgccgccaaggagcgctgctgatgggaattatggaattgcagtggtacgggaagctgtgtgccacccaaaagtgtcaaatgtcgttcaagtaatatggattaccgaggcattatccccctcaacagaagccggacaatgggcgaaagtatgacagaggtcagcaatggagcaaacaaagggcagggcatacaaaaactcagactccaatccaagctcaaccaacccaaacaaaacccaaactggcatccgatttatgcttatgctcaacaatgggatatgtaaatacggaaaggaaaccaaagaccccaccggcagaaatgtagctatttttgatttccgatttcgagagaatatttttttttttggggaagagggctggaaagggggggaaaacaacgagcaacctattggccaactacaatagaagtgcgcacacacacacactcgcgcgtatccttgtttgcatgcacatttcgtatagaatgtccttgccaaacaggaagtcgacttgtgtacgcttgaaatgcttttgtacatatttttattgtgaatgcctgtcgaactttcctgcttttacttcgagttttccctttgccctttttttttggcacaaccttttcaaagtttttttttcgctcgttcgcatcttcaagcgagaaaaacttactctttaaggttcaataagaacgaacccaatgaactaataaataatttgcatttacccaacttaattgaccacattcgagtccatattcgctgtggcatttgagccagaaaactataaatgtttcatggagtctgcggaaatggttaaatctctacggcgcacaacgatttgcgaaattgtttatggcggccaattgtcatcggcagccagtaaaaacatattgccacgatttcacgactggattaagccaataaaaatatggcaaatattaacataaaattgatggcaccaaaggacgtgaaccctagcaaaaacgaggtcatccaatcggtttttgcactttgtgagactgggaaaagaaagaaagcctttcaagtttttgctaaaattaaaatctagttctttcgtcttgaaaaggaaacttaatttttaaaaatttaaaaaatttctttgtgcgactttataaagatatatcgacatatctgtaaatcttcttcactcggaattccccatcttattgactaaagtttacccagaggcaactgtaaaaatccttttcaaatttgacatttaagatgtgaactttatttgcttttaatccaagtccaatcaaaatcaaattgcatttacgagctgcctttgagtaacgtaaaagaaaaaaaaacaacaaacgccaaattttatattcccttttttttttggctttggcttggcaattttcttttgcgattttcactgggcggagtagaagagtgcttatgggtatgcgcatttatgactccgccatatatgtcaataatttttatgctcttcataaatatgcgtttgccttttacgagcaaccccacgtggcaaaatggagcaaaaagagccaagattaggcagtcaaatcaatttgtggtagggagaaaacgacattttcgaaaacgttattatcaaatcaaatgcgagtgctggccacgaggggaggttgaagggattgcaatgagcatattgtacatttaatgtcgtgccacccactcaagccgcccatttgaccgtgccccgggccccagatgaaggtaccacacatatgtacatacatatatgtacgtatatatacgcaaatatacacgaccatgtcagttgcaggtgcacggtctccggctgacatttacctttgaaatgttaaggtatattccaaatttgtcgcaaaagatgacacacagagtggaacgtgtactcaaggctttcatgtcgaatcaataccctgcagctgcttttaccttcatccagttggctatgcaaatggcctttaaactgggaagaacccaaaatttcctttgataattctctggtcttttgcagctaaacattccgtagaaagtctagacaataaagggattgcaaggatgtgaaaaagtggaaggagggagggcagactaatcggaagaaatggaagtaaaaaatagagaaaatgactgctggtccaagaaaatttaagttcttagaataaaaggaacatatagaaaacttagttaaaagaataccatcttgaaacttaaaaaataaatatatattttttatctactgaatgaaataaaagcaatcactttgtttatttccctgctttgcattgcccgcccagaatttccctggcgaaaattcccagttatttcagtgctctgctaattatgagaaattcacgtcggctctaaacactcgaaagccgtctagacgtctgcacctgtgctgcaaactgaatgtgaaaagggcgggcgggcggtagtgggtgtggctgagaaagccaaagtagaagaatagagggggattggcagtgtggggagtaagccaaaatgcttagccaaagcggttaccatttcatttgcacaagacaacacacaatggccccaaacccagaggtggctgtctccttttgattgtctgtgtgtataattaaaacgcatatgcatggtaaatacacttattgtcagcactgtaagccgtctgaaatgcccccggggcatcgggatgcagctttaattccacattgcagccatgaatgaaatgcagggatgctttagactgtagaggaagttttttgggggggtgaagagttgtgcaaaacattttcaactcaatttagttcattttatggcagcagcaatgcgctgcgcaagttcattttgttgcaaaatagcgaaatgcaaaaaaaaaaaaaaaaaacgaagagcgcactcataaaaaagcatcaaaagagcagtcaaaacagcactagacatcccagtatcccagcatcccagcatccgagtatcctagttatatggcctggacatcgcccaaaagctgccaacaaaaacgcaacaaaatgcggatgcggtaactgtttccatttttggttaaaaacgaggtggtagcagaggtaggtatttccacagtgcaacttcatttgatggctcatgtgtgagtgcgccacataaacgcttcaaatagttttaaaacccacactttttatacccttgtacaggatatatacatatacaactgaagtttaatgagcgaaaaaatgtgggcaggtaaaagaaaacaaatgaatattagagtggatagttgaaaaaattatcgtaatcaaacaccaagccgtatttattgaaaatatcagccatttcaattttttaaccaaatataaaaaagtttgaatttcataaaagaaatttgaatgatgtgattatatatcctgtattatttaagtgtacaattacgtatgagtatttacagctctattaccctcagccctttttacccagatggtattcatttatttttatttttttttgctagttttggccacctttatgggaaaattgcccagcaactaaaacattctgcggctcgcttaattttccatgaattcacagagtccagctgcacgtcttgttgccacttaagtgcgcacaaagccgcaagttccttgccatatgcaacatattttggccagacaaaagggaaggcaaattttggtctttagcatgcttagcctgagtcaattaggctagcacaaatacgaactagctcacacatgtacatacatacatagatatgcaacggcgagcagtcaggcaatgaatgaaaatttaattaaatttcaccttaaaatgatgggcaaattgaaattaacgttaagcgagttgtttgcatcaatttaaggtgattgaattatggcaaacgacaaaatctgtggcctaactgcatttgcagttgattgattgcatttggcccgttgcctgtgctaattgcttttgcaacattttgcgacacttagctatcggttttccgtttttccttttcccgcttttcccctgtttttacttctctatctctctgttctcggcgtttttccatcaccctgcgagcgataagcggacttcctcagctgtaatcagcaacgcctacattaagtgggttctatcaatcggatgttacataactatgcacatatttgccaaagcactgcgacaaaaaatggcaatttctagttggatttttcattgatttggggtgcgtggaaaagttacttattcagcttaacttaaaaacccctgaaaacaccccctagttactcaaaaaatagcactacttgcacttctcgcacctaacattaaatattaataattagagtcgaaagtttttatttcagtcactatttcgagaatgcccctttctccaagtggacttggcaaacttgtccaaggcgaaacgtgattttccttccgttcgttcgctggccaactaaaacttggccaaaagggtccgctttaaacacacttttaatgatgttgccgccgccgcttgtagcttcgcagggaagcaatattaagccccacttgcaactggaggtgtcgggaacggcactgcactgcacagcactgcactgtattgcattgaaattcaatttcgcggcaaagtttccattgtgagcagctccacgttgctccgtgctgacatgctttgggtggttccccagtgcttgactagaatcccggctcaaagccaggtaaatccccacccaacaacccaacaacccaacagccagccatccgcccggctcaacaggaaaggggtggtctccattcgacccgctatgtgaacagcttttgacattgccgtcatgatgaagtggaacgcacagctgaagccccaccccagctactggctctaaaaatacaaaaaaaaaaataaacccagaagaaggaaatataaaagccgggggcaagaactcggctatccctttatcgcttttgtcgttttaatgggtcagcagtgtgtgcctatacagtttgacaaagaccacgagcgagtgcgaagctcttaaagctgttgcatttggccagaaatcagacaacgcggaagccattaatcccaagcttcatccaccatttgtggcaataaaaactatataccaagagagttgaaaataaataagaaatgactgctataattctaaactgtctcacttggccatgttgcgttgctcagttttatttgctgcactttttgctagatgaagtttagagcaaatgagttcattactcctctggctttgcaaatttgatatgtatgtgttttaagcttatagaaaaccatttaacgtattggtatgcttaagagtttccagtatctacaagcttgtaagcactatattagttagttagttggatgtaaatgcattaaataccattaagtgctatggattgtgtgaatctattagttagtttctatttttccttcctttttttatgactacagaaacaattcaacctttggctacctgccggtcaaaaaatgagtcaataatcaggggtttggccttaataatgaagtcgcagcaccttgtgcgtgtatctttgtatcttttgtgagagaaaacaaaggggaagagctatccggcagataaaaatagaattttagggtacagagtggtggaaacatctgtcaaaccgctgagtcaaccaattgaagtggccgaggtggcgacagaggacgttgcggccgcattggtactcacaaatgccatagagaggcataaattttgtactaccctaaaataaagtgcaattaatttcatttaaatcaatgaaaatagtgctttttcatttacagacgggtaaaagaagaagaagataaaaaaaaacatgcaataaatattccgcatcaacgggggaatttatagttgacattttagagttttgttgttattcagttcggtggcttttgtggtttagttggttttaccttaatttatggcccgccgatcggtttatatagtgcatctggtgcaaatgtccaaccttcgaactttgtagctccttctgcatgcatttcggacttatcccatatagattttgctatataactcccggaaaagtatgcgcaagcagcttgaacgattccctaatcgtctcacgttttcctttagggcaagtgcttagctattgagtttacagcgcaacatgcggcaaggaccaaaaagttgttgtcggcacgtgaagttttatgctgcacttatggcttatagttaaagatatagtggagacaagggggacggcatgccaggcattccggaacgtggactattagaaaatgtttactggtcttgacccggattgctgttgttgttgttgttgtttggccagcctggctaaatgagatttaaattttttatacaacattttctgcgttcttgatacttgatggctttttgctgttctctagccacattcaatgtatgctggggaacttttcaatcaaccgcacgatgataaatgaatgctggccaaaattattggcaaaatccaacatggcttagacatagagaagtgaataacctgtttgtggccgctcgtagatgaattttaaatacttttaggctttaatgactcaataaagctggccaagtctacgaaacagagggcttgtaaaaaaatacagcggaaaatctaggtagattgaacatttaaatggtaaagcattcacatttttctagagtggtaggggagggggggattaagggaacccagtcaattatatatcattcaggatttatctctgtggattataggactgcatatggttaaaatatgattacattattggtatttgtttaaacatgaaatatgcatatgaatagcaacaattcacaattgcgcggaccagcaatattcactatgaatgcaccgcattaatatgcaaattataaaaaacaacaacaatcacaatgctccgagccagaaatggaaaatggcccaaaccgaaacgaaaaaatatagttgcaattgaaatcgaaccaaacgagataaataataaaggcacaaagaacatgtgcgaatattatggcaaataaattacaaatttgttgttgcctgaaagattgaaaaataatattggccgcagttaaaaaaggggaaaaagctgtcttattcgtgtaagccgacgatttaagtaccctgtacaaaatataagtaatgcgaaacaattttaattcatttttttcatacatacttaagttatgatcaagttgtaaaatagcgttttaaataatgttttcattcttaagttttaagtgtaacgaacattaacatacatttcacatagtttttacgaagaaatgtgaactagtaaaagattttgttaacattttttttaatttttaaagcccctcgaaaaaagggcacaaaaagtgaaaatttattttacaagtgtgttttaatccgtgttcccgcccctttttataccgttagttggctagttacctgcgccgtgtttcccgtaattgttgttcccctgatcgtttccagtgcaacagggacgctcgtagtagaagttccaggtgttctcgtagtccgcagctgtctcgctcacactactgcagaggagtagcaggagtgcgaggagcggcgatagctgtagaagcgacattgcgagggcggtgcgagcgagaggggtggtcgaccgggggccgaatgcgaccccaccaacctcaattggattaaagtgcaagagcgagcgagaggcggttgcttgttgattttaccgtttgatgaataaaaaccggcacgttttttcccacgaataactgttaacacatttaacttgtattatttttacacacttttgcggcaattgcaatggaattgatttcactggcaaatggattttaaaataaacttctttccttgggcgatttatagcacccctctgctatttttttctccttatatatatatgttttttttttggacccgcagtcgtagtgccaatttcgtttcggattaattatgtatgcgttgcaggcgcataaaggcgtaatgcattttacacagttctgtgttcaattcggttttcaattcgatttcaacgcatttagccatcggaaagcatgtgcgatatgaagataaaggcaaaaggaaacgttaaactggtttattatatgcccacgcatcggaaaaacaaaaaaaaaagcaacaatattgggaaacaatgaaaattcctcaacgctggagagtgggaaagagacaaggaaggtgaacgagcgcgtttcttaaagtttatactatttacaaggcactgcatcaataaataaatgatgaatctgcaaatatttccttgctttcagtttaaaatttgcctttaacccacacgcacacaaacttgctcacgcactcacacacacacacatacgcaacaacaaagccagagatacacacttgagttgttgttgggagtttcggtttattggaatttcgaaaatcgaactccgaattgaatgaactgcaaaacgccaattagatagttgcaagcctaatgcatttcagatattttaccgatgcgaaacaagttccgccacgaaagggaacactggtaaaatgcccaagaatctcgagcggaaacaccaaacacaaaagaacaaccgacaacaagtagaagtgagaaaacaacaacaacgcacgatcgctccgatcgcgcagatgtgagaaaaacgctagcgcgtttaagtcgaatgactatcgcagtcacgcgtttgggtttttggtatataccaacaatggtgatcgtgtttgaaaataatatttaaaatatatataatttgcataactttttctctttatatcagaagttttagattttattttggctaactttgaaatatgctttcttatttttgtctgtttacaatgcgcttgctttttaagttagttaatatataatataatattttctttgacgtattcaagccgattttaactatttcttaaattattcttaagaaaaggtaaaaactgttgacacaaaactttgtttaatattcgtggagcgtcgtggattttcatttgtcgatataatccttgctccttgccacaaaatgccgttgcagaatggcggtattcaattttcgtacttcaccgtgcggaagcggcaaagtgatttttagcaaggacaacaaggacaacgacaattttggcaataggcaaacatttgccaacccagacacacacaaaacgggcggcaggatggatggatggatggcaggtatgcagacgaatccttgcatttagcagcctcgagcggcaattaaacgcagtttgctagtgtctctggcatttgagtgtctgcttggcaaaatatttaattaaaaagcaagtcggttatgttttcgcatctccttgatattttctattgtacgggtgccacctgtgcgtgctttcgtttccatcagtggcgtaggggctgtagtttattcaattattcagctgagatgttaatgatgattgtttgaggcactgatcagctcaggtggtacgtgaccatcaaagaaaaaaaaggtaagaaacttataatatagtgcaaacgtttccaactaaaatttaataattttgatcgcaatcatt

SEQ ID NO: 27818 - DNA, 2661 bp, DROSOPHILA
ttccgctcgagattcttgggcattttaccagtgttccctttcgtggcggaacttgtttcgcatcgttattcgtgggaaaaaacgtgccggtttttattcatcaaacggtaaaatcaacaagcaaccgcctctcgctcgctcttgcactttaatccaattgaggttggtggggtcgcattcggcccccggtcgaccacccctctcgctcgcaccgccctcgcaatgtcgcttctacagctatcgccgctcctcgcactcctgctactcctctgcagtagtgtgagcgagacagctgcggactacgagaacacctggaacttctactacgagcgtccctgttgcactggaaacgatcaggggaacaacaattacgggaaacacggcgcagatcatgtgcgggagttcaactgcggcaagctgtactatcgtacattccatatgaacgaagatcgagatacgctctatgtgggagccatggatcgcgtattccgtgtgaacctgcagaatatctcctcatccaattgtaatcgggatgtgatcaacttggagccaacacgggatgatgtggttagctgcgtctccaaaggcaaaagtcagatcttcgactgcaagaaccatgtgcgtgtcatccagtcaatggaccagggggataggctctatgtatgcggcaccaacgcccacaatcccaaggattatgttatctatgcgaatctaacccacctgccgcgctcggaatatgtgattggcgtgggtctgggcattgccaagtgcccctacgatcccctcgacaactcaactgcgatttatgtggagaatggcaatccgggtggtctgcccggtttgtactccggcaccaatgcggagttcaccaaggcggatacggttattttccgcactgatctgtataatacttcggctaaacgtttggaatataaattcaagaggactctgaaatacgactccaagtggttggacaaaccaaactttgtcggctcctttgatattggggagtacgtgtatttctttttccgtgaaaccgccgtggaatacatcaactgcggcaaggctgtctattcgcgcatcgcacgggtgtgcaagaaggatgtgggtggaaagaatctgctggcccacaactgggccacctacctgaaggccagactcaactgcagcatctccggcgaatttccgttctatttcaacgagatccaatcggtctaccagctgccctccgataagagtcgattcttcgccacattcacgacgagcactaatggcctgattggatctgccgtatgcagtttccacattaacgagattcaggctgccttcaatggcaaattcaaggagcaatcttcatcgaattccgcatggctgccggtgcttaactcccgggtgccggaaccacggccgggtacatgtgtcaacgatacatcaaacctgcccgataccgtactgaatttcatcagatcccatccacttatggacaaagccgtaaatcacgagcacaacaatccagtctattataaaagggatttggtcttcaccaagctcgtcgttgacaaaattcgcattgacatcctcaatcaggaatacattgtgtactatgtgggcaccaatctgggtcgcatttacaaaatcgtgcagtactaccgtaacggagagtcgctgtccaagctgctggatatcttcgaggtggctccaaacgaggccatccaagtgatggaaatcagccagacacgtaagagcctctacattggcaccgatcatcgcatcaagcaaatcgacctggccatgtgcaatcgccgttacgacaactgcttccgctgcgtccgtgatccctactgcggctgggataaggaggccaatacgtgccgaccgtacgagctggatttactgcaggatgtggccaatgaaacgagtgacatttgcgattcgagtgtgctgaaaaagaagattgtggtgacctatggccagagtgtacatctgggctgtttcgtcaaaatacccgaagtgctgaagaatgagcaagtgacctggtatcatcactccaaggacaagggacgctacgagattcgttactcgccgaccaaatacattgagaccaccgaacgtggcctggttgtggtttccgtgaacgaagccgatggtggtcggtacgattgccatttgggcggctcgcttttgtgcagctacaacattacggtggatgcccacagatgcactccgccgaacaagagtaatgactatcagaaaatctactcggactggtgccacgagttcgagaaatacaaaacagcaatgaagtcctgggaaaagaagcaagcgcaatgctcgacacggcagaacttcagcagcaatcagcatccgaatgagattttccgtaagcccaatgtctgatatcacgaagagagtatcgccctcaaaatgccgtcatcgtcgtccaatcaattttagttaatcgaaagcgaagaggataataacaatgcggaataaaaagcccaggacgagaagaactcattataatcattattatcagcgacatcatcatagacatactttcttcagcaatgaacagaaaactcttcctaaaggattatgcatttaccgaagcatttacaatgcatccattgacttagacttagacattagggtattatcgca

SEQ ID NO: 27819 - protein, 724 aa, DROSOPHILA; identical to SEQ ID NO: 9240

SEQ ID NO: 27820 - DNA, 20210 bp, DROSOPHILA
tttaagttaataaatatttattcattttacgtctcgaattcactagtttaaactactgttaagctttaccgattctggttatatgttaattctcatttaagttactctgttgtgccctacgcatttagcttggctacaaattccccatcgacagacacatataattttataatttccctatagttacgtaatacgcatagcctcgtttggcatgaattcattttaggtttcttctatgagagaaagatagctacgagaggcacaaaagcttagctcggctggcgctaatttggaaatcggtctaggctatatacgatgactatatatatatagttttacatgcttatagtagattgtcttttcccatagttaaacagtagttgctagttgctagattcctgcgaaggtactaaagtttccgactcaagagcaatctaacatagttttcccttgactaggagcaaacagttttagtttttagtttaggttttacagctttagtgttaagtatcatctaagcttaacttattgctatgcaatttgttagttatggtacattgagactctatgccagccatatatatagacaagctatatatacgtgtgtttgcaattttttcttttttaaataaaatgtaaaattaatttacacgcacattgatatattaatggaattaaaatgaactgaattttctattttaatatcttgggaatatcttgggaatgttgaatgttctcctcctcgatttttccctctttggcgaactcacctaaacgcgttttcgatttgatcataatgccggggctagcactacaatcgaatgacgtttgaatctggcccaaaactgctaagtctctcatttcctggctacatcgagaaatggatgggacctttccatggtatttactattaaaatcgattaattggctacaaaaaacacttagatgttggctaaatggaaaattcacatgctaaaagctcgttgaaatacttattatgaaaatcttacagaactgatcaaagttctatgcagagtgatagataggctaccaagtatttgacatgttgcttttattgctttttttgttggcttgaggtaaggacgtgcctttgaacagtattcgaatattccataactaaagctctgtttcacagtttctagatcttaaaattaactaaaaacttaacaattcaataaatatagatacatataatggttgaaaatcaaacagaaaacttaacaaagattaacaagatgtctttttagtaatcaatatcaaaatagacttaggggacacaacgcgaagaatggaaattagatcggatcagatcggatctatgggctgaaaacatattcgggattcatgtaggagaagccaacgaattccgactgatccagattcatcataaacaccttgtccgtgggcgtcaagtctgttttctctgatgtgaactgcttgtcaaagttggacacatccttgcggtgtttctgtacaataatcggattacattaggccaagtcaaaggtaattatgcatttggcttacaattttcggcttaaatggcggttgcacttcgcgattttcgattttctcccaatcgatgcgtctgaaaaagggatgcagacgcacatcctcctcgccagaggaaccacaacccaaacgcttatttggctgcttagttaggaactagataaacatttataattataaaagataaactattcgttatgtttgagcttgaaaacttacgcccttgcaggcctctttggcctctttgctcaggctctttggataggacacattatgatcagttatggcggcaaacagctcctcctcatcttcgccatcgaaaggtggctggcccactaacatctcataaagcagtactccataggcccaccagtccaccgatttgccatagggctgatacagtattatcttaatagaaagtaaggaaattatatatacactgattaaaaaatctatatttttctaaaaaaacatacctctggagcaatgtaatcaggtgtaccgcagaaagtctttgtggtcttatcacccactatgttctccttgcacatgccaaagtccgcaatcttcacatgtccatcggcgtctaggagcacattatccagctttagatctcgatacagtatgcccttggtatgaaggaagaaaagacctgctgctatttcagcggcataaaatctaaaagcaccacgataaataactgaaggtatgaagtattgctattgcacacttacacggccactggttccttaaacttgccaaactgttggatttggaacatcaaatcgccgccattcacatactccattacaaagaacaaacggtcctgtaataatatgtataaattttatattcaattcttattctttcaagatatactcaccatcgtctgaaagcaggagtgtaattggaccaggaaaggtggcttttcgcccagcgccaggacacgcttttcgatcatggtgcactcgacgtcgtcgtcctgaatgatcacatcctttttgagtatcttaatggcatacaactcctcgctgcctttgcgctcagccagcaaaacctaaggatatcaatcacatcaatcagtttaaataattaagctaaatcttagcttatatatagcttagttcatgtatcctacctttccaaatgagcccttgccgagaactttgatgaaattaaagtccgtggcccggatcatatcctttttggaagaagtatgcgtgttcgtatcgctgcgcattaccatcggcttcttttgcgatggtttctgcttgagcttcagtaggtcctgctcatcatccgcacatggcacattgtagtactcgccttcgtcctgggtgagcagtttgaaccagccattggttgggttcttgatgatctctgagattccgaaggacaaagcacccataaagtcattgcgtgaagtgcgatcccagtcccacacttcgatcaggatgcgtcgatccttgtcttcgggctttagatcactaaaaggacacagaacaacaaacaatcaacaaaaatcaataactaattagcaaatatttagatttaattggttttaagaacttactaagtgagtgtctcattccagacaggatttaggcaagccttaatggtgcgagtcttcttcttggattgatccttgtcatctggaattagcttcaccttcacatagggatcgctcagtccgtttgggtccatgggtatgagattgcgaccctccttgactgaaaagcaggacaatggaatgtgggcggtgcaaacagctgtggcataagcagtcaattaagacccatcccggttgagtgaaaactcctcgcacaaagcagctacggaaattacgtgaaacatgctcctgggcacggacaaagcattgtgtcctagaggacacctgcagagcagctcgttccactcttttgttctgcaactgcagtctagcttagtattcattatgtggcatttgcggctaacgaaggagaacgaatacggagaatttccttaagcgcgcataatgaattaatgcaaatcgtaagcaattttccccaggagcccagaggacttgcaactttcggccgtgaagcagctttctcccagcaggaaaggaaacgaaacgaaacggaacgcagagcaatggatgaattcaaaaggcgcaaagactgtggagaagatgtaacattttaagcgcgttgcttggaaaactttgcggcttctccgagcatacaattttttcacttgcccccgcatacatatacatatatatatattccgtaaacttttcgcccgcccactcgcctcaaatgcgggcacagggagaaacgaaataaaaaacttagactgtgcggccataattggtaacaatgcttaagcggcttaaatgtgtattcccctggcttgaggcccacttactctggacagttagcagattctccttgacattgatctccagataaatgcgaccccgccgctccgtgtgatcgcatccgcaaaggctgggcacgttctccttgcagcgggcatgcacgttcatgtcacatgctggggggcgtgggagaaaatgtttttaaatctcaactattggtcgttgtaaagtatagtggcgaaggagtgggggtgtgctcaaagagtttggttagtgggattgataggcatatgacttggatgttgaagtggaacatagcactcgcacacacacacacacacacacacacgtacagaggtacagtctcgcaaacgcagcaaattgaggtacagtcgcgcacacataactaatgtgtagtacttaccttgtctgtcgttggcaaccaaagtttacctgtcgcgtaatctgtcatgtagaggcactctggccgacccaatcagtaaaaaaaaaaccaaaaccaattttccacccatcggtcccattagagcttgtttttccccatttcactgccagcggaaattgacaaactgcaatggaagctactcttctgactctgacaagtggcggcaagcgttgaattggaaattattcgctttaatcgaattgctattcattttcatgaaatacgttttgttttcaattaaagcacttgccacatcatcggtcatcacagggcatcattctgtttttggccgattgcttcagtttcctctcacatatccgcttttctcgacttttccctttgctcttctttttctcttggcaacattccgctttggtgaagtgtaaaattacttttgctcaccgcccgatacccttgaaagggtcttaatttcattcgagcccccgctgcgtatgcgtgatatttaagaaacgtttcactggtcgtcccggcggcatgttggtcagcacagaatgtgcaaaaatgtgtacacaatcgcaaaaaaaagggttcctttggagtggtggagcgaaattcaccgaacagaacaaacacacagatatgaatgagtgtgtattcatatttgtggcctccattttgcatggtatacattaatattcgttttctccttgctttttgcacagtttgcactgtttgttttttgtgaatcagtaagctgtatttattaaacatttaaatgctgctccctcttttatgtttcttaaaatatattttacttgtattttatttatatatcagttgttgttacatcttcaattttcatttttgcattttatttacgtacttcatttcggtatgggacgtttatatttgcaaggaacgcatcttgtctgcctaaaacttccaaagtgtttatttacagtgtagcagcgacctgctggaccacaatcagctaaaatatttgtaaggcttgtgtgttaacgcaacttttgttgaaattggtaaaacacttacggtgagtgggagcagtggagtaatatatcatggacagcaaagaaagtataagaaaaaccatcgaaaccttatccatttttgtctaatgcaagaaataatttgaatgtatctgattgctttatgatagatgaattatagcatgataattgcaattgcccatatacagtatacaattacaccataaaattgatttttcttggctaacaaactcgcttctatccccttttttcggccaaaggggaaataaattagtttagcattttccaatcgataattgttatttatcgttatttatccatatcttgttcttgttttcttatgcatctattggatgcctgttggcaactatttgcaacagatacacacagtcctctcccacaagcttaaaaaataattcaactgaatatataaatcaattaaaaaatcaaaaaaataataattggcgtatcagaacgtcttatgtctcaagatttcaagtgataattaagttaactaattcagttaaaattcaaatatattttaattaacatattctggtaataaaacatagtgaaacctccgtcgaacctgttggctccttgcaacagtcgcaagctgaagcacaacaccccttgccacaatctggaaaaaattaagaccatgtacgtagagcccacattcagtaaccaaatttagtttaatagaggtggactctgagctcactgcttaataaaagcggatgaaactttgagaaactgtatttgctaatctgggaaggctaactaaacaccattctatattaaggtttccaattgacaatactaatttaatatatactgttcaggaataagtaatacccaagaaaaggattcaaatgagaaagtttgtgctttatatttcactaaaactcatctcagtttgaactaagatctttaactacctcttgcagcatttttcatttggaccgcattcagttggcggtgctatggccctacagcgattgcgaactgatgtacaatacccgaggtcattgccgcactctgaaatattcataagtccctattagccgatccaattaaacagataatatttaatcatactgactcctaaagcgcatctgagaccagccagatcggatgctaaggaaaaggatggctgccagcagaaagaccttcgaaaagcaattcattgtgcaaagtaaataactgagttgactttgagtttgcaagggcgttttataccaagtggtgtgaaaaattcggaatttggattagcttcactcattcgacagggtaattatataaattccttcagattcctgtggtagtagccaaccatttatttcaaataatgcattataatagttaaacatatgctagcgatgaagctcatataacatattaaatgtctattaattcaattgttgattaaaagacgattttaaagccagaattgaccacatttttaaaatcttaaataattcccaacatgttcttaccatttatttttaatgacacacaataggagaagcctagcaattcaattataaaccagcttgccactccactcacacatttacatttgcatcggttcaggtctttgtatgtatttgcttgggtcaatgggtcacaaatcaattatttgattacccagaagtcgaagtaaaacaatgtaagacataattagatacattacttttataaaattctacgctaaatggaacaagtattgcctaggcatggaatcttaaagttaaaagtccgcaaatattttgtggggcctttaaaattagtaaacatatattaagtggctttgcaaacttgacatgcacttgcaataacgtgaaaattaacaagtttttaagaatgtcaacgcaaaatgaaaagaaagccaagtgcaggcagctggcaaggcaaataaaatgggggaaatgcgggaaaagctggtggaaacttgtcagcgacactcactacagcaacagcaaacaattcgcccaagtgtgcaaaacactcacccacacaaacacactcacacacatacgcacacgcacactgcagtgcactgtggcaaagacaaacacaaatacaagtgcacacttgagcggaaacaaagcactgctaattgtaaattgcaacaatctaaaaactctgcggcaacgccaccgaaaaatgcaaatgagttgagacactttcggcgtcaaagctggttatactatatagtatagtatatatatgtatagtatatatgtggctatatatagggtaccatttggcggactttacctcgacacttgagacccttgtgcgtgatgccgtgcaaaagggacccacaatgatcgcagaacgtcggcgacaggaaggtgacattctgccatttgtggggcatttgatgcgcctgcccgatttcgagttcggtttggaattcgaattggaagagaaaactaatggaaaattaacgcagggcataggaacaggtgttcgatatagctatgtacataacacaggtgtaattgcaaatcaacacaaaaggagcacaaaacaaaatgggctatgggctacacaaaatgagcaacaagaagctgatacaactagatacgttaatagaggtgtttacataattacacttaaaattgaagatgaaaatacctatttaactgtcacatgtaaaaagtggataagatgagttcatgtacgttatgctagtttcgaagttttaaatcaatatttacgttgcacttttagtagtttataaaatggcttttaaaagacgattgattaaatttgaaaactcggcaatagatatttgagacccataattaacggctttcatatgcattctcaacagagtgtttgccccataaaactccgcccactttggatgtttattctgatgctttccactgctgcagttttgctttcgtgctaatgaaataaacgcgacgttaattgagttgcaagttggccgtcacatgtcgcaaacagcgaaatcaaatgaaaatggaagagggtttatggtggcagtgtgatgagtggatatatacacaaacatatacatatatgtacattgcacagtagaacataagtaacccggcgaaggttgcagagacaaatgctgcctaatcctttgcaaggacctcttacgctcacacaaaaaaaagtattctctcacacgtgacattggcggaaaactttaaggctatttccttttgtgggtggctagtatttcacccacacaaccgagtcgattgttgtgtcagttttgcggtgggtgcttcccccaggcaaggacatttgatagcattatgtgcctgcatgagcatccactgagtggttccccttatatactcggctttccatgcccgaactttttatttcggggcgccttagcaatttgttgtttgtctctgccaaggttcaacagctgctcagccattaatatcctttcgctaccaaaagacaaacacacacgctacacaaagacacacaaacgaacggccttggcagaggcgcagcgaaaaaagttgttgcatactttggcgggcatgctcaaggccgcgagggtgggccttgtgggcggtggtggtgggccagttgtttggacaaaatgcaatcgcactgaaggtaaacacgtgtgtgtgtatgcggcctccaattggaatcgcctttgagtggccctggatagccacaggtgttgacatccgcatcaagaaccggacactgcggaatttgggttaactaaagtggaaccccaatggaataggaaatacgtgccctgtggacagagactcctagctttactttggaaagacaaaacaaacaaggattttgttattttgtctgattacttaaaaatatacaagcagaaagtgaattttcagtgtacaaaaagtgtcttaaaagcaaatctcttcaactttgtaagccaattgatataaaatatgcgtatgcatgctgtgaacgaaacgaatttatttcggcgagcataaaagttcaagccaatgaagctcgactgtttgagatggtgttctttattcttatcattacgtcacagtatctgccacatgaaagcatcgtaaacaaacgccccgtcagacatttcccaataaatctcatggcccacgcacaaacacacacacacacacacacgcagctagaatttcatttggctaacacgcctccatttgatgcctacttatgtatttgccacgtgccagagcaaaaatttgtaaaaaatatttgcagcgcaaatttatcacaacattccttgcgtcgctctctgtcacctaacaaatttgtgcccatgccatcgggaaatcctgaagccccacttttccatatcgctatcatcatcatcatcctcctccagcggaatggcagcttccatcactctattgaacgtaattttttggtatataaaaggtcaacgtacatggccatgtatatactataactgccagcatattaacaactgatgcccgccgataacgaatggggtgatttggtcggggggtgttggcaaatataaattgccatgtcatttattccgacaggccagataagagaagttgggcggtaatatggactagtaagtgcggttatatcggcgagcatccagactgccatctgatagcatttaatgggcctaactgcatttgttttcaatttccgcttcaagtacgaaacacaatcacattgggcgaactctcaatctgaggaacaaatcttggcttggcgaaaattgatttgcctacacctgtcgcaataaatttaatccgatttgttgcagaaaggcgacaataaggagtcaaaaggcacaatcggaaatggcaatgtctaggttcattggaccgaattgtatttcacatacacatgacagtgggaaggaaaagccacattttgagttgtgagtgatgtgagttaagcattttccatgggaaaattcaattggaggttcccatggcaacagcatcacacttggcagcccagctgaatgtgacatttgagttgccaattcttattgtctctgcaattggtgtttacacttgactcgttctaattaagccagttgccatggctctcaattaagtgccagagccagtaacaagccacatggaagacaggtttacaggatactgaataaaagtggcaactctttgctaaagcaaggagtgagatattttggagttattgaaaaatatgattgatgatcaatttacttaaatgagttcactctagccactcattgtctttctgaaatcatatgcatgaacttttatctatcagctacaaattgaaagctttactttttctatagtgcgttaaatctctaagtttatctcgtttttagaatttattattcattttttcatatagaaatacattaagtttactaagttagcaaacatatttgcgcaagctgcgctagcaaatgcacaaagaatttcaaacatttatgctttccccaggccaggacctgaaaatcgttttatctgtggcatttccacaatttgttagtgggccaaaaaaaaaaaaaaaaaaacacattaaaattatatttatatcactgggcagctctgcacacaaaattctaagcaaatgacaagcattgtttggcaacaaagtttgcccctctcactttgtccattagaatcctccgagtatccctggcatgtgcataattatgcaaatgaattggttgcagggggcggggcaaaagtgggcgttaaggtggccggaaaagtgggttacacgtggaacacggaggaaactttcagtgcggttcggaaacggaaaagtgaagagcaagcaaacaaaatacggtaaaaaaaaaggaagtctttgctgggcgtaacgacatatttacaaaggtgcggcctgcttacatgtatgtatatctgtgtgtttgtaggtaaaacaatttaaataattaacttttagggcctgcaaaagtttctttctccgtgctgttgaccaggtcaaattgcgtttaaaatttaattcccacgcagacactcacacacacacacactcacgcacacattatcatcattatttacactgtcagtcgggtgtttttttttttttttttttttttttttggaaaaggattaaaagttaagtgaaagagagaagcgaaaacttttgtggttagagagatagaagttagaagccggaggggaaaaacacttatttgggttacaaaaaaggtttctagctttaaggggtcagaggttacctgagcatttgagaccctggtggtaaatgccatacagcagggacccacaatgatcgcagaacgtgggtcctgcgtatgtgaatggctcgaaattgtgttgagtttttggtgagtcctttgattgtcaattcgattacattttataatatatatatatatacacatatatatatatttcgtttgttggttgcaacaatttcaatttcgattgcggattcagtttgttttgttgtggtttttaaatatatatatttggtgcgtggtttcgtgacagcgtgagttggacagcgaattgagtttttggtttgattttggtggatgcacacatggaaaagaatacaaaacacaaattttgttcttggtaaatcaacagagcacaatgacaaattaacaagttcgctgcaaactttcgcattgaaatcataacaaatgacagactctacataagttcagtgtaagtttgcaacagattttttattaactaaatatatccctattctgcatttccatgtgggtggttcaaggaaggcgaatcgaaatttaagcttgggaaaaaaactactttatttcatagcaacccttcccaccctgaaagccaatccatctgagactcttttctctatatttttctgccatattttgccgtcgagctatcacaacatttttacttggacacacagctttacactttaagaaaattttaaagaaagataccagcattatctatctataagttctatctgtctgtaagtttatttatttgttttcttctgcggtaacccaagttttacttttataagcacaggaatctacgtttaaagatatattcgcatgctccttttgatttacattttcgtttaaaatcaaaagtctcccatttctttgcgtgttgcggtttgcctgaataaatacacagcgtagagagattgctgtatgcggaaaaatccaaatgacattttccataacccaggggcgaaggaaaaccccggtcggacaggggaaaacatttcgcatttttagcccgagtctgcttagccggcaaagcaaagttgacaggcgagtcggggaaaaaggacatgacagctgggactttttgggacagacggacggagcccggcataaccgaaaattcaaatgacagtttaatttgacagagcccacaaagactaaaagcaatgcaaataaggcaccctttccactccaccttacatggaaatgcagttgggtgtcgttatcctgtgtacatatatatacacgtatatggtcatcctatttagcatatgtattggtgcgcacttaccgaatcgatgcccttatccttgcccgggcagatgaaggtgacatattcgtggcaccgcttgtgcaccacataggagcaaactgcaaccggagaacgggttattcgaagctcaaagttcacgagatgaacccttaccttggcactgaaatccttgctttccgaagcccctgaaaaaaaaacatcgaaaccacagggtaaattcatattcgtcggcaaatcgttacgttacagccatcgcatcaattagcataaatatttaatttcccattaatcaatatgctactcgaaatcggcagccccatgggccgtttaaaataatcaatatgaaaatggttcggaaaatgagtggatacaactcaaaataaacctttcacccttagctctttaattatttacgtgaatggtatgtcatcaaattaagtttcagcggcgataatcaatataattaatctattttaaatagtttggtatgaaattttggttttacaatatggtcaactgtttaatttcggaatgaactatttttcatatatgtaactatttaaataaatattaatataaatttgctgatgggattacagttagttatagttatagttagttataatggataattatatagaataggctttgagtaaaagtaaaaaaggtatgccttaaaaactacatttcgaataatgatgattcttaatgtttaaggttaatggttaaagtttgtttcttgtcattagctgttttggtgcttaggccaaacattaaagactaaacatttaaatagttaggtttttattaggaacgtgacatgcctatttcgaatacttgccagcttaaactaaaaacttaaagccattcagaaagccatttcatttctgggctactggttaatgggcctaacccgttgcggggccaaaaggccaaaatggtcacgtgcgaggcttccaggctttcaggccaggcccagccctagaccataaatgacttgaccacaaaccgctttgccagtgtgcactgagtccagtgtgcaatttgggacaaggcaaattattcacatgcacggtgggaaaacgcacatttatatacgtacaagtataagtatatataaataatagaaggagcaagtttggccaacttttgcaactgcagttgaataagtttcggcacgaatggacctaaaacccggttaaagttcggtccgttaagctatggcaaagttgatccgattaggtcgtaaccacttggacaattcacacaaatcggtcaaatcggccgatttgttatcgctgctaacgagtgcgaaattgtggctcgtttcataattctatttgcagtgcgcattttttcatatttcaatttttaattttcacttatattttttatttaaatttaattcttctgtctgaccaggttgtctgtttctggcttttcgccgctctctgttttcccccctttgggtatttcccgttttttgtttgcccatcaaatgaagtgaaaaagcaattttcccgcgcctgcagttatactatgattctgtttttccccctttgtccactcacaattattttttttcacggcatctgttttttgtgcatttccatttttaattaagcgcatattttccgacaacgctgaaaaagcggcacaaaggcacgggtttaagaatgtttgctatttaagttaattaatcaagcgaagtgctcagtgtggcctgtatttgtctacttacttgcttattttattttattattcggaactacttaatttggtcaaacaaatgggtaatgaaataataattctttcaaccagttttctttgtaagcaaattgccatttgatggctcatttaaatttggcattcacatgaatatcttatcttatgccttagttcagttaaagttttcgatttgtgatgcagcacttttaaaagcgctaccaatttgaatttgaaaactgaatttccatttaaagttgttcccgatgtgattccaagtaagtgcacttatcacgaaatccctttgggtatcacctttatcatttgaaaaatgcaaattgatatgttcagggtatttggaggtgctatctggaatttccatcgtgacctttttggtttccgccttattatgcaaatgacgtgccgtaaacatggcaaatgtttcacctgctacccgcaaaagaaggcggctgacactttgccaccgcaggcgcaccaccacccatcgagctacacccacccgcccgctggtagcaccacccactttacgccccccagtggctcagctacgtgcttgcaacgcctttttgcaacaccgagcgctctgtgtgtgtatttgtgtgtttgcgtgcccccaaagtccccgcactattaattaaaagtcgaaaccaagtctaacagccactggagttgttaattagctgcagcaccccaaaaaagtgggcgtttgcggcgggggggcgtggcgttctacctgttcgctggtatggctgtcaaagcgcgttaattacgtgtaataatgatgcagtgcgcggagtttttttgttttttttttttttttgtttgttttccgctcgtatcgtttttttctctgtttttttttttttgggcggcttgtagctggttgccaaaatttcggtcttggccccaccccgattatgggcacagatcgatgatgctggcggctggtggagcattttaaacagcaattaatttaattattgccaaaatgtcttggccgacaattagctaaagagcccaaagcgattcgacgagagtcacaagacaagcgtaataaattggcttggttttatgccagcgacttgacttctatatccattcattagtctctggctttaaattgtcaacgaaaacgctctggcattatgacactttgcggcaagatagaatgtgtttgtttattaaatatgcattaatatcactggaattgctcgtcaaagtgtctgtggttggcgggcaattctggctgtgagagctgagtggcgaattaattaatttgtgtgggcgaaagacactagaactttcattaatggaatgattctacgcttctaacgagattctctagcattacaaaaatggttggcgaatatagaatataaatatcctttggaatacctacatccatgcatatcccgactgatagccgctgtaaaaaccaaatttcagttcaaaactcatgtcaacaaataggaattcagcgcagaagcacgaatctgatgtttcggaggtgaatttaatgctcatgaaattgatttataagccgtggcgaggctggcaggccaggaagtgactactgggacccagctgccaggacttccaggagtaaacaggctggctccacgcaatttcagttcatttctaccttgcccttctgtttgtgtttgccttgggaccaacaatggattaaaaccgatttcggcagcctcacctgcattaaatattacacaggttggcttttgtttttcttggccttctgtagattttggctgaaattttgggccaaaaagtatctcagcgtaataacttgacttgtgtgtttaaagctttttgcatatattaaggttagactctagttatttttatttaatttcctatttaaaacatttttatagacttttcatagaaatcgaaatgagtctgttcctctttgattttctagcaattagcttctatttgtttacatactttttgcaaatgattttctcggaggtatttttacattttgctaaaatgctcaaataagactttctgtatttcatttaattaaaaaacgtaaacattttaaatattttatgatgaatgttaaaccatacacacagtactatttttcttgcatttaagccagattgctttcatatttgtacgcctatgtgtgctaaacaactaaaatctcagattaaataagtctcagtacgttattcatttttgaaaattgagctttgtgagctgcctccttgtgtgtttttggtatttgctgctgtgtgttcctattatttgccttattcccccattgtttctacggctcgttcgccttgtcaatatacatttatcgattcccgccactgatgttatgtggacgcattgctggccatgcttggtagacccacaagtgccgtggagggaagtggggcgtattcgcatatggggatagctctctctctatatgtgcttgtacacccggagaaaatcattggttcattcgaatagtgaccttactatgacctacccaaacgaaatatatgtatatcttaagccagcttggtactttttctcaagtagattaggtcaggtcatgataggatcaatattccctttggtcatttaaaacttgcacgatcccgatatattggtaataaatccatttagttagtcaagaggtaagctagtttttccccgggtgtatgcagttggttctataagaacgatgcataaagatgccactttaaggatgcgaatcactcaccagataaagtccttgcagtgggagcagaacgtgggctgcttgaagaaccgggcgatgaagcagtgatccttgacattgaagacgttcttcttcttgagggctcctttgcggaggcgggacttcattttgttctcgcccaccgcctccccctccgccccctgctgctggggatccccgttgttatcgctgccctccgacattgttgctaaatgttcttttttttgctttttttttcttcttgttgcttttttgtttatttgttggtgttttttttttctgcacaacgggtatttcgcagcgtttacaaatcgcaaaggttctttaacttgctcacttgttgttgccgcatttgggtgttgttgttggtgttgttgttgctggttacgtactttttgctggctttgtgtttattgattttcagtttttgttgtcggcgtgtttttattagacattaaatgccatctaacgttaataatgggcgagaaagagagagagagcaataataataaaaccaaactggacttgagaatttcgctttaatttgcccaaaaggcgatttgcataattttattaatcactggccgcacgttcgccgtttgcttaattatttttcactcgcgtccggcgcatcgatttcaattgatttttctcataacaagtgcagcaattaaacaaaaactcaagcacatgtcatccgcgacaaacaagctcataattagcattaattttaatgcctcaacggttgaatatacaaaagaatttccgaaggggttttgggtggttaggtgaatggggcaccttttcggcggaacatgggccaaataataactggcaaataatataatttttcccagcttgttgaatgagaggcgcagaaaaaatgaaaaatcgaaaaaaatgtgacgaagattgagcgcgcgtgcaaataaaaaagcgatgtgcaaacgaaataatttttatttcaatgttttgcttttgtttttcagctttattgaaatatttgcaacgccaatttttgtgtgcttcgctaacagacacgttcttgctggccactgctctcacctgtgcaggtgggcccacttgggatacgatggtgccataccctgtaaacataagcagtcggctcggtggcttactaatgcaaacactcaaataatttgatttaattcagctataacatgataacactctgagaattttaaaataaataaatccttagtcaatttagtcccaatttaagctttaattatatcaagaaatgttggctaattgcaaaataattggttcaactcaatcaatgaactaattgaaacattttaaagcaagaacattttcatctatccaagatgtacatttaattatctaatcagcagtaagtacaactctattgctaccctgcatacaacatattcagcattgattgcaaccgcaaactaaaccacaaaaaggacaattcaggactcgactgaaactctgtgttagcaaaactatcatagtctttgtgagcgaaatgcaacagttactatcatttccgaacgacttgcgttagcgcgtttttttcttcttctccatttgtggaacacatttcccttcacgttttcatgtcacttttttgtgcttaatggccataatggctatgactgctttttcgttattatcccgaggggtattattagaattccttgtggttaatagtgctttgaatttggtagtaacttgtctagtttcaagcacttgttcataacgacatgtggcgtttattttgtttactttttgaccgatgacttagtgtgattggtcttatttagactacggctacactacacgcacgggctgcgaaaatgcgaggagcaactgcctttgctggcgaaccgaaacgtagtgagcgtgcgagcattttcacacgagcggaaaatccatgtccatggactgtggtgaatttcccatctgttgccgtctccctctttctcgctctccgggttacacaagatttcttctcgcacgcactaacactcacacacatctgttgttgttgttattgctggaaaatgtaggggcagtttatccccagcttttcacttcggcctcctggcactgcgaatttgtatcgctttcccggcacgtgcgcttcgctcgagacacaaacacgttctgaccaactggcactggccgtcttttctggagcgccatattcgtagcgagcttttgggcgcactgttagccaaaagcaacagcgctgttaacgctcatttgcattgcggccaactgattaacataagtaaacccatagcgatccgaaacgtcagaccctggagcaccgatgacgctcttggccgctaattgatccgactgaacgaaacttgttaaatggccacgatccagccggttttgggccgagtttgcaaaggctgctctagccattcgattgcgttgaacaagaagtgatttgatctataaatggaatccccctcgtggctgatcggattgtgagatagggaaattagtatatacttatcaatttgaatggctctcaactttctaacaactttagcgaataaaattgaatctcaagacttcaatgattaatataaaactcaagatgttaatgaaatgaaacaaaggcctttatgaaaatagcaatgtatattttgcataagcttatatgtctaaagcaaactctgataagataacaaatattccatttaccataataatttcattttaagctttaattgccttgacgcatttatcacattattgcgaaacactgattgacgcgccttataaatactgttgcgcctcataaaaagtagataactatccaagccctaaaaaaaggcaactcaatgcaaaa

SEQ ID NO: 27821 - DNA, 2723 bp, DROSOPHILA
ttgctcctcgcattttcgcagcccgtgcgtgtagtgtagccgtagtctaaataagaccaatcacactaagtcatcggtcaaaaaatggcatttaatgtctaataaaaacacgccgacaacaaaaactgaaaatcaataaacacaaagccagcaaaaagtacgtaaccagcaacaacaacaccaacaacaacacccaaatgcggcaacaacaagtgagcaagttaaagaacctttgcgatttgtaaacgctgcgaaatacccgttgtgcagaaaaaaaaaacaccaacaaataaacaaaaaagcaacaagaagaaaaaaaaagcaaaaaaaagaacatttagcaacaatgtcggagggcagcgataacaacggggatccccagcagcagggggcggagggggaggcggtgggcgagaacaaaatgaagtcccgcctccgcaaaggagccctcaagaagaagaacgtcttcaatgtcaaggatcactgcttcatcgcccggttcttcaagcagcccacgttctgctcccactgcaaggactttatctgcggctatcagtcgggatatgcatggatgggcttcggaaagcaaggatttcagtgccaagtttgctcctatgtggtgcacaagcggtgccacgaatatgtcaccttcatctgcccgggcaaggataagggcatcgattcggactcaccaaaaactcaacacaatttcgagccattcacatacgcaggacccacgttctgcgatcattgtgggtccctgctgtatggcatttaccaccagggtctcaaatgctcagcatgtgacatgaacgtgcatgcccgctgcaaggagaacgtgcccagcctttgcggatgcgatcacacggagcggcggggtcgcatttatctggagatcaatgtcaaggagaatctgctaactgtccagatcaaggagggtcgcaatctcatacccatggacccaaacggactgagcgatccctatgtgaaggtgaagctaattccagatgacaaggatcaatccaagaagaagactcgcaccattaaggcttgcctaaatcctgtctggaatgagacactcacttatgatctaaagcccgaagacaaggatcgacgcatcctgatcgaagtgtgggactgggatcgcacttcacgcaatgactttatgggtgctttgtccttcggaatctcagagatcatcaagaacccaaccaatggctggttcaaactgctcacccaggacgaaggcgagtactacaatgtgccatgtgcggatgatgagcaggacctactgaagctcaagcagaaaccatcgcaaaagaagccgatggtaatgcgcagcgatacgaacacgcatacttcttccaaaaaggatatgatccgggccacggactttaatttcatcaaagttctcggcaagggctcatttggaaaggttttgctggctgagcgcaaaggcagcgaggagttgtatgccattaagatactcaaaaaggatgtgatcattcaggacgacgacgtcgagtgcaccatgatcgaaaagcgtgtcctggcgctgggcgaaaagccacctttcctggtccaattacactcctgctttcagacgatggaccgtttgttctttgtaatggagtatgtgaatggcggcgatttgatgttccaaatccaacagtttggcaagtttaaggaaccagtggccgtattttatgccgctgaaatagcagcaggtcttttcttccttcataccaagggcatactgtatcgagatctaaagctggataatgtgctcctagacgccgatggacatgtgaagattgcggactttggcatgtgcaaggagaacatagtgggtgataagaccacaaagactttctgcggtacacctgattacattgctccagagataatactgtatcagccctatggcaaatcggtggactggtgggcctatggagtactgctttatgagatgttagtgggccagccacctttcgatggcgaagatgaggaggagctgtttgccgccataactgatcataatgtgtcctatccaaagagcctgagcaaagaggccaaagaggcctgcaagggcttcctaactaagcagccaaataagcgtttgggttgtggttcctctggcgaggaggatgtgcgtctgcatccctttttcagacgcatcgattgggagaaaatcgaaaatcgcgaagtgcaaccgccatttaagccgaaaattaaacaccgcaaggatgtgtccaactttgacaagcagttcacatcagagaaaacagacttgacgcccacggacaaggtgtttatgatgaatctggatcagtcggaattcgttggcttctcctacatgaatcccgaatatgttttcagcccatagatccgatctgatccgatctaatttccattcttcgcgttgtgtcccctaagtctattttgatattgattactaaaaagacatcttgttaatctttgttaagttttctgtttgattttcaaccattatatgtatctatatttattgaattgttaagtttttagttaattttaagatctagaaactgtgaaacagagctttagttatggaatattcgaatactgttcaaaggcacgtccttacctcaagccaacaaaaaaagcaataaaagcaacatgtcaaatacttggtagcctatctatcactctgcatagaactttgatcagttctgtaagatttt

SEQ ID NO: 27822 - protein, 679 aa, DROSOPHILA
MSEGSDNNGDPQQQGAEGEAVGENKMKSRLRKGALKKKNVFNVKDHCFIARFFKQPTFCSHCKDFICGYQSGYAWMGFGKQGFQCQVCSYVVHKRCHEYVTFICPGKDKGIDSDSPKTQHNFEPFTYAGPTFCDHCGSLLYGIYHQGLKCSACDMNVHARCKENVPSLCGCDHTERRGRIYLEINVKENLLTVQIKEGRNLIPMDPNGLSDPYVKVKLIPDDKDQSKKKTRTIKACLNPVWNETLTYDLKPEDKDRRILIEVWDWDRTSRNDFMGALSFGISEIIKNPTNGWFKLLTQDEGEYYNVPCADDEQDLLKLKQKPSQKKPMVMRSDTNTHTSSKKDMIRATDFNFIKVLGKGSFGKVLLAERKGSEELYAIKILKKDVIIQDDDVECTMIEKRVLALGEKPPFLVQLHSCFQTMDRLFFVMEYVNGGDLMFQIQQFGKFKEPVAVFYAAEIAAGLFFLHTKGILYRDLKLDNVLLDADGHVKIADFGMCKENIVGDKTTKTFCGTPDYIAPEIILYQPYGKSVDWWAYGVLLYEMLVGQPPFDGEDEEELFAAITDHNVSYPKSLSKEAKEACKGFLTKQPNKRLGCGSSGEEDVRLHPFFRRIDWEKIENREVQPPFKPKIKHRKDVSNFDKQFTSEKTDLTPTDKVFMMNLDQSEFVGFSYMNPEYVFSP

SEQ ID NO: 27823 - DNA, 13178 bp, DROSOPHILA
ttacttgagtcgtacttaagttaattaatacagtttagttaaagtaagtaaaattaacaaataagagaatactttgtcctattgtgcaaaagagtatgaatcattatccaaagtcatgaaactctaatttcaagcaatttaagtgatttaagtcattaattcctcgagtgcctgcgtggaatacagctcacccggtgttcctaagcagcccgtggatttaagaatggaaattgatgcgctgtttatgcggaaaaggagtcatcgaagggaagggaacggggcactgttgtggttttgtgggcttatttttagcacttcggaattgggaaatatttgaataaacatttcctggaactgctgcgcacttggctaattgattgctcttgagtcattcttttctttttcggctgcaggagggtgcggaggtggaggaggaggaggaggaggaggtcaaaggtcgggatgttcccgatagaaatacacgtgtatttgagagccgggagataagcatagtttaggggtcaggattatgaaactgatctatgaggtgacacatatcactggatgttgataatttttaaatctacactattacacacggctggaaaaacactgtgaaacagcttttcccaatttacaataaccaattctaattgcacacatattatgttcctccgacttctggttacatcagcgcccaaactgaccacctgccacgcccacagccctcatccagcgcagcacgaacagtactcgcactcgcaatcaacttacttgctaatattaatggtccagggcgggcgatatgttttaaactaaactaatctggaataaaattaagcaatgaaactgcggcaccttagccgcaggcagtgttggagagcgcgcggcgctggaacagctgctggcggagtcagctgtttggctcgctggctaagcaacactggcgccatcacgtgaatctcgtgggcattgtgaactgtcacttttttcgccagcgcttttctcaccacacaatttcgttcgcatttgtgggtggcggcggtcgatttgcgctgattttttggcaaagaaaaacgcacttgctgttttcaaatagcacaaaaagcacacctgcttcgtttacaatcaaccatattcgctgaaaagtaagtgccaaccgtaagaaatagttaattcggcgggttttccacgtcgccgtgaaaagtgcaaaagttaccccccgccgaaaaaaaagaccgattactacatcgcagtaggtctgctgaccaggaaaagtgcgcaaatctcttgtagattattgaagatagtgagaaaattagtttttgcaatgtggctatgattttttgtcgaagcagtgtgaccctgaaaaaaagagttcgccagtttgttgcgtttcgttcgacggcagattgccgcgaggtctgcggatgtatctggaaatatccagctgatgatcgtgtgggctgggggcggggagtcgggaaaatgtgcgaaaagtgttttggtttttgtgcttaaatgaaaaacccgtgagcagcggaaaattatcgatcgaaaaactgtcatgtgactgtcaacgaacagctgacattgcgagagcaactcaccacagcgagtggtgaaaagagcgcaataggcgctttgaaaattgaaagagaacacaaaattctctttcgctctttgggtaaacaaaaaaagttggaaaatgttgtttaaaaattgaaatacttttcggttattttgccataaggcacgtatttcgctgattaatagatcgtgttgtgcgaaaacaagcaaatacactttgatgcgctgcacgaggattaataaataatcgtattgcgtgcaacaaggaccttgatgaaaaccaagcacatattatacatgatatatatactctacgaaactgtaggcaaaactcaaacacggccaataaggcggaaattcaaatggccaaacagctgctggaattccagcgcgtgcttatctgtatgtctgtgtgcaaggtctcccgagccacccactttcaccaagccggtgccagccacccacccacattccaccccccggcaagcacattattattaattaatttgggcgcacacccactgcggcgaggatatcgtcaaaactttgttttcctcctttgttccattttttattgtcttttgttttcgtcgctgcaatttcctgtattggatttggactaccccaactggatgtgtatctagatttggatatgggtatgggcttggaatcgggatatggattaggacctggaccccaggccctctccattagcgccagccgttggccagtcagactgtctccattcgcctggcgacgcgttggctggagccctccgctcatcgtccctctgtcctttatcctcgcatttcccttggactcggtccaatccacgtcatcagttcaacatgaacatggcagcataacagtcggtaactcctgctcgtcgtcctccctatctatccatatatctaactatatctctatatgtgcttcccttttggcccgcagcaacttgactttcgttgctaaaaataaacatacgtacgtagttgtgcactggaaacaaaacgtgctaagttctctgtcattgctattctgcaagtcacattatggagtatatcaagcatatgttacagcctaaacatgagtggttaattatcatgagctacattccgccattagatcattacacacagccattactaaaatctgaacttttatatctagataaattagataataacattcacatatcaatttcgtatcattttacatgtcatgaatcataatatggagattcagtttgaaaagcatgtggacgtttgattccgctgaaaaggatatattgaaaaatatatatacttatacaataatgtttatctgcgatttgagcatatatgtaaatatatttttaatacatgtaccaagtgatcttgcaaaaatgaacttctaatttgactgatcacctggttatgtcattcttaaccttcatttagatgccaaattatattttatagcctcgggtgatattttttctttgcgtgtttccgtatcccacttaccaccattcctcgttgtctgttgccaggattgttgctgttgtcactcccgccccctccagttgttgtccttgttgctactcccgacacttcctgggcgaggacaatgcactgccttgacttttgatggggcaggaggaggaaggcggatctggagacggagccggggagctgggctgttgtcactccttgggctcatgttttgttttcgtgtctctttgtgaaggccatcatggtggttatgtaataacagtgccgaccataggccgaaattgggtaaagttagatttatatctcgtggcgtttgctgtgtgattactcatacgccctgtggcaggagcaaacagagtagtagcgacgctaggagtcagcgacacttgcccaaattgagcactcgttttggttttgggccatggcgcctttttcctttcctgccttccgtgcccttcgtgcggcttcgtcatcacaaccggacggattcgtgttcggctgacgaaccggatcgcagatacttcggccgttggctttttcgacttccatggcatctggtcgttaggccagccgttcattcggcaacgaacccccgacatagaagcacgtcagcatgtggcacaaccggagaaagtaggaaaaacaaacggagtagaggaaaagcccaacaaaaaaaaaaaacgaacgacggccagggaaaaatgccaaaaaacctggtgggaaagttcctaaccattctgttgagacgcaaggagtgctaggatcaagtgtttgtgtaagcaacgaggcctgtacagtgtacacatgtacatatataccatcgcaacatagacaaactggcgctggactgtctggcgccagagtttggggttgtgatggttccattcggggaaatggttcctttgtctgaggaaagtgcacttttcagggctcgatcacatatacgtaaatggacgattcacttgcccgatggacagtgttaattaaattttcatcagcagaaactttcgagtcattcaatcgataggagaagttacataaattaggagggggtaatcgatttagcaaggtcacagacaaattgactccggcttttactcactccccgacttttcatttttacccctcgaatagccatcaagatgatgtcggaatactggattatctcggcccctggcgacaagacctgccagcagacgtacgacacgatgaacaatctgaccagcaagcaacacaacctgtgcaataactacaagttccatattccagatcttaaggtaagtttattgtatagttacgtaactgaagtgcaatatatttgtgtgtattcataccaacatctaaccactattattaaatctttaaaggtgggcaccctcgaccaactggtgggcctctccgacgatctgggcaaactggacacctatgtggagcagatcacccgcaaggtggccaactatctgggcgaggtgctcgaggatcagcgggacaagctgcacgagaacctgatggccaacaacagtaagtcgtctgcctgccaccacttaagttgtattagcctagcttagtctagcttagcttagttccgtttagtttagtttagtttagttttagttgacgtggttaggtgatgcctgtcccgagtcacgaatctatatcgttttggttctttagttatttctaagcagttcttctgaccgtagtcacttttgaatcggaatgctcagatataatcgtaccatgtgtattgcccatatctattgtttacccacaactattctgtactaactaacaaacaaaagtgagaccttaatcgaaatccacctttcccagccatcgaggggctgcaaagaactcggttactatggaatgttttgatctatctatgtctctatgtgagaaaagcccaacctgactaacacgaataccgtctatttcaatcatgactttaatatacccttccagtagttcaagattatgcgagaaacagatttaaaaactaatcgattttcagccgaagcccttcggcgctacatatatttggttcgagtttctagtttctaggcctttttaattttttcgttctctaacatttattttcctttacactcctgggtttcttttgatttttgatttgatccgtttcgtttacgttatcttttgatttctattgaactcatgcgcacaatcatcaccactgaaaaaaataaggatatttcgtaggcatctaactcaagttgatctaaaaagatacagtgccatcaaacaacaatggaatttaactttgcggaccaaaaaaaaaaaactacaaaatagttgaaattgtaacgaagagaaaaaagaaatgttgaaattagccgaatgggaatttgcgttgtttattttgtgttgcgtttgttgtacaatttaatgcgcaccgaactcacacactatataaatctaaaactattctatactatgccagctaaacaacacacacagatacacacacacaccagcgtatttttggccccattcaagggcgcccaagtccccggtcaactactccattgcgttggtcgaaggtcgcccctgaaaataaaatatatacatatataatatatcaaaaaccatgacaaacaatagaaatacactcattcacacacgctgaaggagtacagtgaacactttgtatattttacatgaattgttgtacgtttcttttcggttttcaatacaattgagttggacaagttatttgtggttttccgtcatttgaaagcccattagtttttaaatcattcaccgcaaaaaaaaatagaacgataaaaaagatacaatgaagacgaaggaaagctaatttgtaaagatatagaaccataaactgcatatataaaaatctatatatatataaatacttgactatgaacttttgcgcgagtgtcgttccctcatacatatttcttaatttttatttcgagtttacatgtactatgatttgtataaataactttgtaagtgcgagcgtcttaaagttgcccgacttttgtactgtacatatatgttttaactatatagactgttgtaattgttgtctgtgtgtgtgcgcgtgtgtgcctgattgcagtgtgtgtgcgtgtgtgtatctgtgttgtctcatttcctcacctgcatcgaatcgcttggaaaaacgcttctttctgtaccatttttcacccgaaaaacccactcacacacacagccaaagtgcggagatgcacctcaaaggacctttttccgccgaacgagtgtgtgtgtgtgcgtgcgtgtgggtgggcgggagtcagtgtgtctgtgtgtgtgtacctctgcacctgttcatacgcctttcacatccaccgcaattcgctaattgggaaagatgggagatactcgcaattagagctaattggtaaagtgtggagcacacaaaaaaaatcgacaaagaaacgcttttacactgcaaacaaaataatcgagtaccagaaaacgcccaaaatgaaagcacaaaatgagacgcaaacatctatcagccctgggatcactgaattcccccaattacatattttttgttccactgttgttcatgggatgccattcacttccgtttccttttcgcacacatatatacatatttcaaaaaaaaaaaccaaaacccaataagcacacatgagtttcaagttaattacatttttcccatatgatttcccttatttatttatacgatatttacaaacgataagtataattttggttttgcttttggttgatggatcgtaacgatcgtaacgatgattacccagatttcttcggttttagagttatgatagcagttgatcgtgatagtagataggcagagcgtgaggtttagcccctaaatgtatgctacatagttttacttataatttatttcgaccgtcccgcccggaaattgagccgaaccaatcggaagggaaaccctagctaagactaagtctgcaaccgaatctaaatgccttgtgttgtattgtctgtatcggtaatcgaatcgccaacaacaaatcaaaaacgacaccaaaacatcatctcaaaaccgaaacccgatcgccatccgaatgaatcctgtgaaccgccccaaattccggcacgcgaaccccgaacgaatcttgcgcggatgcaggtcctgggccacctgacgacagcatgccgtgtcgccaccaccagcgcatcaagcatctcagtctgcgacaccagcgaaaacaccagcacacgcaccaccaaaacaaaccccaacactaccatcaccaccaccatcaccaccagctgccgcaggatctcaagggtaaatccgcagccacctgttctcccgccactcctcctgcgcctgcgtctgcaccaccccatcttccgcctgcctgtgcctgcgatgtccttgcgcctggatccttaaccggcggtagcctaactaacctgtccacgagtcacgagccggagccggagtttgacgtctgtccgtgcgatgagtgcttcgcctgtgccccgcccagcacaagtgccacggccagcacgctactggcggatgagtgctactcccagactgcctcctccatgctcagtgccacacggtgtgcactgtccacggtggcggcgatagccactggtagcggtttgggcaatggcccgagcaccagtgccgcagccgctgcagctgcatccaactcctccggcggtggaggtggaggggggcccgcctcctgctcgacgctctgctcctcggcatacttctccacgtcggcgcccacgaccagcagctcggtacacagcagcatgtcccgctctaacagcaagcggctgaataacaacacttgcagcatcaacaataacaagctcagcttccgcagcggcagccatgtgagccagctgcatttggccacgcagcagccgcagcatcatcattcgcatccgcatcagcaaccgcataccaatccgctgcagtcgcccgtacaaaagtccatgtcggaggacgagggcgatgcgtcaaatgcccacgaagatggggaaacggacgaggaccccaagagtccgcacagtgtgcagtccgatctgtcggacgccttcgactggtggttcaataagcccaagcgtaactctaagaagagcaggtatcttatcatcgcattacctactttgtagaacgttgccaaatcgccagcaccccagacaaaaaaaaataaaaagaaaaaaaaaaacccaacaaaaaccagaatataaaagccagtcacccgctgtcatcccgctaaagctaagccaaatgaacaccacctccacaaccaccacccaacttatacaaaagccttacaccaaacacgctgtaaaaacacaagatacaacaccacacacactgaaaacaatggcgcacccgctttgcctgccctcatccaaaaactaaaaaaccaaaccaaacaccacaccacaccagcaatatgaaacccagaaaatccatatatgtttgagttgattaagaaccaagaaccgagtcaagtgcaataataatgtatttcttttttaaatcactccccatcgaccatcgcacacattcgcatttgaccaccccatgatcaccatcaccatcgtcatttcgccactcgcaattcacattgacagtgcacaacagcaacacgagacagcacagctgcaacaccaacagacgacacagcaacatgcaacaccactgaccccacagaaccacaatcaataccaaaaccaacacctatccaaagcaatgacattttggcatcaagcatcgaccacaccgcgctctagttatcgctctttcttcaattctcttgccgatcaaatttatagcaaacgttctacaccgagtcaattaaatataaacaatggatttaatttaacaccaacacatagatcgtctccagtgagtagttgttgtggcagtagtagccaggggcgatccagtccggacacggatcccgccgagccgcccgagtttccgctgagtccaggttagcatgccccgggttggtctcgttcccattcgaaccgaaccgacccaatccctcttctagttacatatatcgtctatgcagatctcttgatctcgacgttgacatatatacctactatgtgtgtacatgttgatgttaccgttgctcttccgtttccgtttcctttcgtttccttttagttcatcattattttctctgattatgatctgatctgattctgatttctccttattgtttcttgagcaacttgatgtttcccgacaccaccacctatctgaaccactccaccttctttgatcgtcgtccactgtcgggagttaactgcaaacgcagacgagttcccgtttccgtttccgtgttcagtttcgatctttttgttaacgcaaatatttctcccagtgatcgtatcgaagttcttccttctttcgccacttttgatttgcctttctctactttctctgtggtatttgcaaacgccttttgtttgcgctttcgttttgctttcccgcgatttgactatgaatatttcagtgtatatgaacacacggatctggtgattatttgtaccagtgtaaaagtgaaaaagcgattatgttgttctttcagtgtacgctcaccaaatcaccaaatgttgttctgcgctccacatcattacagccacgactaacgccgattcccattaagctatatactactcagtcagctatgtcacctcaaaaacaaaaataaaaatcacgataataatttctaaaactgcggctttgcccagcgccaaatgttgatcaatctctgagttcctgttcgctttgttttcgcattatactttcgtatcttgagtgtctatatacatatatatatacttatcacacagcattatgttttcaaaatccagctaacgtgttgtgccgtatgacacgcaaggtatttccaattgcgactaatatgcgtagtccaaaattcctcgttatccccgtagcctatgtaaatgcatcctaaaatttatagttattcaatgttccttgttaatataatccttatgtgtatcctgtacgtgtgtgtgtgtatgtgtgtgcctgtgtgtctgagtaaattaatgtcatttatatgtgcgtaataactaactaatcagcatttttcagttaccttatttactttacttatacttgtataactctaatttaaaatagctttcgagcctagtttccttcaaactaattcaatacgatttttagatcaattacaattactatgtatttttttcaatttcgttttgtacttaaacattaattgaacaaccagtttgttcagctagtcaactaagaaaattagcgtatttcgtgccagtcagatttaactaataccgatattccattgcatcgatcatcaatagccgaactaccccagtacttgacccgcttccaatgggacatggccaagtatccgatcaagcagtcgctgcgcaacatcgccgacattatctccaagcagatcggtcagatcgatggcgatttgaagaccaagtcgcaggcctataacaacctcaagggaaatctgcagaatctggaaaagaagaagacgtaagtgacgataaataagtattttaacattatagatattcatataatactccgcgctttgtagtggcagtctgctgaccaggaatctggctgatttggtcaagaaggagcacttcatcctggactcggagtacctgaccaccctgctggtcattgtacccaagtgagtgacatacatactattccattataaactgatgatatttatcataacttcacgcacagggtcatggctaatgactggctgaccaactacgagaagatcaccgacatgatcgtgccccgctcgtcgcagctcatccaggaggacgccgactactgcctgttcaacgtgacgctcttcaagaaggttgccgaggagtttaagctgcatgcccgcgagcgcaagttcattgtgcgcgactttgtgtacaacgaggaggagctggctgccggcaagaacgagatgaccaagctgatgacggacaagaagaagcagtttgtgtgtagcccactgagagcgtgtgccattggaaatctgttctaatctcgaatccattgcagggtcctttggttcgttggctgaaggtgaacttcagcgaggccttctgcgccctcatccacgtcaaggcgctgcgcgtgtttgtggaatccgtgctgaggtatatcaccaagttattgccataatgcaatgttttatatgtaatttgtgaacccacagatacggactgcctgttaacttccaggccatcttgatcgagcccaacaagaagagcgtgaagcgtctgcgcgatgtgctcaaccagctgtatggtcacttggatggcgcctccgccggcggtgctgtcagcagtgctgatgtgggttacactcgatacctaataaaattatcacccaaactgacatgatttcattccattctctccacagaacgtagacatccccggcctgggctttggccagtccgaatacttcccctatgtgttctacaaggtcaacatcgatatggtggagcaggccaaggtctaagatcgcccgtcgcccccaacattgcatacatccagccacacaaaatacactttaatacaaaagaaaaaaaaaacaaccaacttaaaaatcagctgaaccattcgcagacatctaatgaaacaaaattaatagattactttaaataattttagtcattgttatctaattattgttgttatttatgttgcgcgttgccgatatctgtttcaaatctacttccggttcgagaaatcgaggcgcgcccaaatcaaccgaaataagtccttaaaaaagaagtaagaaaacttttgcaataatcccagatcttgtggaactttccgattgttcttttgtccccccttcagtttgcaaagcagtattttatgtttttcttatgccttatatatgtttatcacatgatggaagaccagagtgtttaacccgcagccaaatttacacgcattctccttttttgttcgttttttggtagctatacaataaacatttgagttacattttgttttacaacattttcgtctcgtttcgtgcttatgctccaccacttggtatctgtatccgtgactaacagccaacatacaaacaacatgcccaaaataaatttaagcccgaaaatggtgtcgcaaatcgcaaactgaaacgttcacggagctaattgtgctaacaaatttccgatgctatggtacgtttcgactaaagacaaactaataaccaacggaagtattgtatttatataaatgttgcctagagatatcgatcgaaaatctataagcaaaaaaatctgcgcgctgtttgcatacattaatcgctgagaagatccgctcgagcctgtttgtttaaccccgcgtgtgcgttaacccaataaaaacccaaaaaaagaaaaaccatcatcagcgattgagagtctaccacatgagaacaataatattctatgcgtatgtaaagtttttcaataattcctattgctaaatcgaaaattgtgtaccgagttgtaggcgaaacgtgagagagatacagtatctatatataaatattttaaagttatgcatactatgtgtaaaaatgaaacgaatgaaaccatgtaaatgtcattgcgttatataaggtgcaattaagccatccttgtaaataattataaagaaagaaagacattcccaactttgttttgttatcaattatttggatcggagcagagtccagttcgcatttattattaaatactttcagcttaggactaaggtacaaaacgccctttgaatatcaactttcacagatttcattcgaaagagattgtttatacaatacgtttaactttacgttttatagacaaataattaaaaactgttgtgcgaatgtgtcataatttataatattgggcaatttgaatttgactcgaactaattctgtgaaagtgaagaaaggcgttcgaatattttaagcaattctctttcggtgctagatttcctgtttcggcttgttttgcgtcgaggcgttgcgcgaaatcttca

SEQ ID NO: 27824 - DNA, 1828 bp, DROSOPHILA
cttttctcaccacacaatttcgttcgcatttgtgggtggcggcggtcgatttgcgctgattttttggcaaagaaaaacgcacttgctgttttcaaatagcacaaaaagcacacctgcttcgtttacaatcaaccatattcgctgaaaaccatcaagatgatgtcggaatactggattatctcggcccctggcgacaagacctgccagcagacgtacgacacgatgaacaatctgaccagcaagcaacacaacctgtgcaataactacaagttccatattccagatcttaaggtgggcaccctcgaccaactggtgggcctctccgacgatctgggcaaactggacacctatgtggagcagatcacccgcaaggtggccaactatctgggcgaggtgctcgaggatcagcgggacaagctgcacgagaacctgatggccaacaacaccgaactaccccagtacttgacccgcttccaatgggacatggccaagtatccgatcaagcagtcgctgcgcaacatcgccgacattatctccaagcagatcggtcagatcgatggcgatttgaagaccaagtcgcaggcctataacaacctcaagggaaatctgcagaatctggaaaagaagaagactggcagtctgctgaccaggaatctggctgatttggtcaagaaggagcacttcatcctggactcggagtacctgaccaccctgctggtcattgtacccaaggtcatggctaatgactggctgaccaactacgagaagatcaccgacatgatcgtgccccgctcgtcgcagctcatccaggaggacgccgactactgcctgttcaacgtgacgctcttcaagaaggttgccgaggagtttaagctgcatgcccgcgagcgcaagttcattgtgcgcgactttgtgtacaacgaggaggagctggctgccggcaagaacgagatgaccaagctgatgacggacaagaagaagcagtttggtcctttggttcgttggctgaaggtgaacttcagcgaggccttctgcgccctcatccacgtcaaggcgctgcgcgtgtttgtggaatccgtgctgagatacggactgcctgttaacttccaggccatcttgatcgagcccaacaagaagagcgtgaagcgtctgcgcgatgtgctcaaccagctgtatggtcacttggatggcgcctccgccggcggtgctgtcagcagtgctgataacgtagacatccccggcctgggctttggccagtccgaatacttcccctatgtgttctacaaggtcaacatcgatatggtggagcaggccaaggtctaagatcgcccgtcgcccccaacattgcatacatccagccacacaaaatacactttaatacaaaagaaaaaaaaaacaaccaacttaaaaatcagctgaaccattcgcagacatctaatgaaacaaaattaatagattactttaaataattttagtcattgttatctaattattgttgttatttatgttgcgcgttgccgatatctgtttcaaatctacttccggttcgagaaatcgaggcgcgcccaaatcaaccgaaataagtccttaaaaaagaagtaagaaaacttttgcaataatcccagatcttgtggaactttccgattgttcttttgtccccccttcagtttgcaaagcagtattttatgtttttcttatgccttatatatgtttatcacatgatggaagaccagagtgtttaacccgcagccaaatttacacgcattctccttttttgttcgttttttggtagctatacaataaacatttgagttacattttgttttac

SEQ ID NO: 27825 - protein, 388 aa, DROSOPHILA
MMSEYWIISAPGDKTCQQTYDTMNNLTSKQHNLCNNYKFHIPDLKVGTLDQLVGLSDDLGKLDTYVEQITRKVANYLGEVLEDQRDKLHENLMANNTELPQYLTRFQWDMAKYPIKQSLRNIADIISKQIGQIDGDLKTKSQAYNNLKGNLQNLEKKKTGSLLTRNLADLVKKEHFILDSEYLTTLLVIVPKVMANDWLTNYEKITDMIVPRSSQLIQEDADYCLFNVTLFKKVAEEFKLHARERKFIVRDFVYNEEELAAGKNEMTKLMTDKKKQFGPLVRWLKVNFSEAFCALIHVKALRVFVESVLRYGLPVNFQAILIEPNKKSVKRLRDVLNQLYGHLDGASAGGAVSSADNVDIPGLGFGQSEYFPYVFYKVNIDMVEQAKV

SEQ ID NO: 27826 - DNA, 9208 bp, DROSOPHILA
taagtaaaattaacaaataagagaatactttgtcctattgtgcaaaagagtatgaatcattatccaaagtcatgaaactctaatttcaagcaatttaagtgatttaagtcattaattcctcgagtgcctgcgtggaatacagctcacccggtgttcctaagcagcccgtggatttaagaatggaaattgatgcgctgtttatgcggaaaaggagtcatcgaagggaagggaacggggcactgttgtggttttgtgggcttatttttagcacttcggaattgggaaatatttgaataaacatttcctggaactgctgcgcacttggctaattgattgctcttgagtcattcttttctttttcggctgcaggagggtgcggaggtggaggaggaggaggaggaggaggtcaaaggtcgggatgttcccgatagaaatacacgtgtatttgagagccgggagataagcatagtttaggggtcaggattatgaaactgatctatgaggtgacacatatcactggatgttgataatttttaaatctacactattacacacggctggaaaaacactgtgaaacagcttttcccaatttacaataaccaattctaattgcacacatattatgttcctccgacttctggttacatcagcgcccaaactgaccacctgccacgcccacagccctcatccagcgcagcacgaacagtactcgcactcgcaatcaacttacttgctaatattaatggtccagggcgggcgatatgttttaaactaaactaatctggaataaaattaagcaatgaaactgcggcaccttagccgcaggcagtgttggagagcgcgcggcgctggaacagctgctggcggagtcagctgtttggctcgctggctaagcaacactggcgccatcacgtgaatctcgtgggcattgtgaactgtcacttttttcgccagcgcttttctcaccacacaatttcgttcgcatttgtgggtggcggcggtcgatttgcgctgattttttggcaaagaaaaacgcacttgctgttttcaaatagcacaaaaagcacacctgcttcgtttacaatcaaccatattcgctgaaaagtaagtgccaaccgtaagaaatagttaattcggcgggttttccacgtcgccgtgaaaagtgcaaaagttaccccccgccgaaaaaaaagaccgattactacatcgcagtaggtctgctgaccaggaaaagtgcgcaaatctcttgtagattattgaagatagtgagaaaattagtttttgcaatgtggctatgattttttgtcgaagcagtgtgaccctgaaaaaaagagttcgccagtttgttgcgtttcgttcgacggcagattgccgcgaggtctgcggatgtatctggaaatatccagctgatgatcgtgtgggctgggggcggggagtcgggaaaatgtgcgaaaagtgttttggtttttgtgcttaaatgaaaaacccgtgagcagcggaaaattatcgatcgaaaaactgtcatgtgactgtcaacgaacagctgacattgcgagagcaactcaccacagcgagtggtgaaaagagcgcaataggcgctttgaaaattgaaagagaacacaaaattctctttcgctctttgggtaaacaaaaaaagttggaaaatgttgtttaaaaattgaaatacttttcggttattttgccataaggcacgtatttcgctgattaatagatcgtgttgtgcgaaaacaagcaaatacactttgatgcgctgcacgaggattaataaataatcgtattgcgtgcaacaaggaccttgatgaaaaccaagcacatattatacatgatatatatactctacgaaactgtaggcaaaactcaaacacggccaataaggcggaaattcaaatggccaaacagctgctggaattccagcgcgtgcttatctgtatgtctgtgtgcaaggtctcccgagccacccactttcaccaagccggtgccagccacccacccacattccaccccccggcaagcacattattattaattaatttgggcgcacacccactgcggcgaggatatcgtcaaaactttgttttcctcctttgttccattttttattgtcttttgttttcgtcgctgcaatttcctgtattggatttggactaccccaactggatgtgtatctagatttggatatgggtatgggcttggaatcgggatatggattaggacctggaccccaggccctctccattagcgccagccgttggccagtcagactgtctccattcgcctggcgacgcgttggctggagccctccgctcatcgtccctctgtcctttatcctcgcatttcccttggactcggtccaatccacgtcatcagttcaacatgaacatggcagcataacagtcggtaactcctgctcgtcgtcctccctatctatccatatatctaactatatctctatatgtgcttcccttttggcccgcagcaacttgactttcgttgctaaaaataaacatacgtacgtagttgtgcactggaaacaaaacgtgctaagttctctgtcattgctattctgcaagtcacattatggagtatatcaagcatatgttacagcctaaacatgagtggttaattatcatgagctacattccgccattagatcattacacacagccattactaaaatctgaacttttatatctagataaattagataataacattcacatatcaatttcgtatcattttacatgtcatgaatcataatatggagattcagtttgaaaagcatgtggacgtttgattccgctgaaaaggatatattgaaaaatatatatacttatacaataatgtttatctgcgatttgagcatatatgtaaatatatttttaatacatgtaccaagtgatcttgcaaaaatgaacttctaatttgactgatcacctggttatgtcattcttaaccttcatttagatgccaaattatattttatagcctcgggtgatattttttctttgcgtgtttccgtatcccacttaccaccattcctcgttgtctgttgccaggattgttgctgttgtcactcccgccccctccagttgttgtccttgttgctactcccgacacttcctgggcgaggacaatgcactgccttgacttttgatggggcaggaggaggaaggcggatctggagacggagccggggagctgggctgttgtcactccttgggctcatgttttgttttcgtgtctctttgtgaaggccatcatggtggttatgtaataacagtgccgaccataggccgaaattgggtaaagttagatttatatctcgtggcgtttgctgtgtgattactcatacgccctgtggcaggagcaaacagagtagtagcgacgctaggagtcagcgacacttgcccaaattgagcactcgttttggttttgggccatggcgcctttttcctttcctgccttccgtgcccttcgtgcggcttcgtcatcacaaccggacggattcgtgttcggctgacgaaccggatcgcagatacttcggccgttggctttttcgacttccatggcatctggtcgttaggccagccgttcattcggcaacgaacccccgacatagaagcacgtcagcatgtggcacaaccggagaaagtaggaaaaacaaacggagtagaggaaaagcccaacaaaaaaaaaaaacgaacgacggccagggaaaaatgccaaaaaacctggtgggaaagttcctaaccattctgttgagacgcaaggagtgctaggatcaagtgtttgtgtaagcaacgaggcctgtacagtgtacacatgtacatatataccatcgcaacatagacaaactggcgctggactgtctggcgccagagtttggggttgtgatggttccattcggggaaatggttcctttgtctgaggaaagtgcacttttcagggctcgatcacatatacgtaaatggacgattcacttgcccgatggacagtgttaattaaattttcatcagcagaaactttcgagtcattcaatcgataggagaagttacataaattaggagggggtaatcgatttagcaaggtcacagacaaattgactccggcttttactcactccccgacttttcatttttacccctcgaatagccatcaagatgatgtcggaatactggattatctcggcccctggcgacaagacctgccagcagacgtacgacacgatgaacaatctgaccagcaagcaacacaacctgtgcaataactacaagttccatattccagatcttaaggtaagtttattgtatagttacgtaactgaagtgcaatatatttgtgtgtattcataccaacatctaaccactattattaaatctttaaaggtgggcaccctcgaccaactggtgggcctctccgacgatctgggcaaactggacacctatgtggagcagatcacccgcaaggtggccaactatctgggcgaggtgctcgaggatcagcgggacaagctgcacgagaacctgatggccaacaacagtaagtcgtctgcctgccaccacttaagttgtattagcctagcttagtctagcttagcttagttccgtttagtttagtttagtttagttttagttgacgtggttaggtgatgcctgtcccgagtcacgaatctatatcgttttggttctttagttatttctaagcagttcttctgaccgtagtcacttttgaatcggaatgctcagatataatcgtaccatgtgtattgcccatatctattgtttacccacaactattctgtactaactaacaaacaaaagtgagaccttaatcgaaatccacctttcccagccatcgaggggctgcaaagaactcggttactatggaatgttttgatctatctatgtctctatgtgagaaaagcccaacctgactaacacgaataccgtctatttcaatcatgactttaatatacccttccagtagttcaagattatgcgagaaacagatttaaaaactaatcgattttcagccgaagcccttcggcgctacatatatttggttcgagtttctagtttctaggcctttttaattttttcgttctctaacatttattttcctttacactcctgggtttcttttgatttttgatttgatccgtttcgtttacgttatcttttgatttctattgaactcatgcgcacaatcatcaccactgaaaaaaataaggatatttcgtaggcatctaactcaagttgatctaaaaagatacagtgccatcaaacaacaatggaatttaactttgcggaccaaaaaaaaaaaactacaaaatagttgaaattgtaacgaagagaaaaaagaaatgttgaaattagccgaatgggaatttgcgttgtttattttgtgttgcgtttgttgtacaatttaatgcgcaccgaactcacacactatataaatctaaaactattctatactatgccagctaaacaacacacacagatacacacacacaccagcgtatttttggccccattcaagggcgcccaagtccccggtcaactactccattgcgttggtcgaaggtcgcccctgaaaataaaatatatacatatataatatatcaaaaaccatgacaaacaatagaaatacactcattcacacacgctgaaggagtacagtgaacactttgtatattttacatgaattgttgtacgtttcttttcggttttcaatacaattgagttggacaagttatttgtggttttccgtcatttgaaagcccattagtttttaaatcattcaccgcaaaaaaaaatagaacgataaaaaagatacaatgaagacgaaggaaagctaatttgtaaagatatagaaccataaactgcatatataaaaatctatatatatataaatacttgactatgaacttttgcgcgagtgtcgttccctcatacatatttcttaatttttatttcgagtttacatgtactatgatttgtataaataactttgtaagtgcgagcgtcttaaagttgcccgacttttgtactgtacatatatgttttaactatatagactgttgtaattgttgtctgtgtgtgtgcgcgtgtgtgcctgattgcagtgtgtgtgcgtgtgtgtatctgtgttgtctcatttcctcacctgcatcgaatcgcttggaaaaacgcttctttctgtaccatttttcacccgaaaaacccactcacacacacagccaaagtgcggagatgcacctcaaaggacctttttccgccgaacgagtgtgtgtgtgtgcgtgcgtgtgggtgggcgggagtcagtgtgtctgtgtgtgtgtacctctgcacctgttcatacgcctttcacatccaccgcaattcgctaattgggaaagatgggagatactcgcaattagagctaattggtaaagtgtggagcacacaaaaaaaatcgacaaagaaacgcttttacactgcaaacaaaataatcgagtaccagaaaacgcccaaaatgaaagcacaaaatgagacgcaaacatctatcagccctgggatcactgaattcccccaattacatattttttgttccactgttgttcatgggatgccattcacttccgtttccttttcgcacacatatatacatatttcaaaaaaaaaaaccaaaacccaataagcacacatgagtttcaagttaattacatttttcccatatgatttcccttatttatttatacgatatttacaaacgataagtataattttggttttgcttttggttgatggatcgtaacgatcgtaacgatgattacccagatttcttcggttttagagttatgatagcagttgatcgtgatagtagataggcagagcgtgaggtttagcccctaaatgtatgctacatagttttacttataatttatttcgaccgtcccgcccggaaattgagccgaaccaatcggaagggaaaccctagctaagactaagtctgcaaccgaatctaaatgccttgtgttgtattgtctgtatcggtaatcgaatcgccaacaacaaatcaaaaacgacaccaaaacatcatctcaaaaccgaaacccgatcgccatccgaatgaatcctgtgaaccgccccaaattccggcacgcgaaccccgaacgaatcttgcgcggatgcaggtcctgggccacctgacgacagcatgccgtgtcgccaccaccagcgcatcaagcatctcagtctgcgacaccagcgaaaacaccagcacacgcaccaccaaaacaaaccccaacactaccatcaccaccaccatcaccaccagctgccgcaggatctcaagggtaaatccgcagccacctgttctcccgccactcctcctgcgcctgcgtctgcaccaccccatcttccgcctgcctgtgcctgcgatgtccttgcgcctggatccttaaccggcggtagcctaactaacctgtccacgagtcacgagccggagccggagtttgacgtctgtccgtgcgatgagtgcttcgcctgtgccccgcccagcacaagtgccacggccagcacgctactggcggatgagtgctactcccagactgcctcctccatgctcagtgccacacggtgtgcactgtccacggtggcggcgatagccactggtagcggtttgggcaatggcccgagcaccagtgccgcagccgctgcagctgcatccaactcctccggcggtggaggtggaggggggcccgcctcctgctcgacgctctgctcctcggcatacttctccacgtcggcgcccacgaccagcagctcggtacacagcagcatgtcccgctctaacagcaagcggctgaataacaacacttgcagcatcaacaataacaagctcagcttccgcagcggcagccatgtgagccagctgcatttggccacgcagcagccgcagcatcatcattcgcatccgcatcagcaaccgcataccaatccgctgcagtcgcccgtacaaaagtccatgtcggaggacgagggcgatgcgtcaaatgcccacgaagatggggaaacggacgaggaccccaagagtccgcacagtgtgcagtccgatctgtcggacgccttcgactggtggttcaataagcccaagcgtaactctaagaagagcaggtatcttatcatcgcattacctactttgtagaacgttgccaaatcgccagcaccccagacaaaaaaaaataaaaagaaaaaaaaaaacccaacaaaaaccagaatataaaagccagtcacccgctgtcatcccgctaaagctaagccaaatgaacaccacctccacaaccaccacccaacttatacaaaagccttacaccaaacacgctgtaaaaacacaagatacaacaccacacacactgaaaacaatggcgcacccgctttgcctgccctcatccaaaaactaaaaaaccaaaccaaacaccacaccacaccagcaatatgaaacccagaaaatccatatatgtttgagttgattaagaaccaagaaccgagtcaagtgcaataataatgtatttcttttttaaatcactccccatcgaccatcgcacacattcgcatttgaccaccccatgatcaccatcaccatcgtcatttcgccactcgcaattcacattgacagtgcacaacagcaacacgagacagcacagctgcaacaccaacagacgacacagcaacatgcaacaccactgaccccacagaaccacaatcaataccaaaaccaacacctatccaaagcaatgacattttggcatcaagcatcgaccacaccgcgctctagttatcgctctttcttcaattctcttgccgatcaaatttatagcaaacgttctacaccgagtcaattaaatataaacaatggatttaatttaacaccaacacatagatcgtctccagtgagtagttgttgtggcagtagtagccaggggcgatccagtccggacacggatcccgccgagccgcccgagtttccgctgagtccaggttagcatgccccgggttggtctcgttcccattcgaaccgaaccgacccaatccctcttctagttacatatatcgtctatgcagatctcttgatctcgacgttgacatatatacctactatgtgtgtacatgttgatgttaccgttgctcttccgtttccgtttcct

SEQ ID NO: 27827 - DNA, 1414 bp, DROSOPHILA
gtcgatttgcgctgattttttggcaaagaaaaacgcacttgctgttttcaaatagcacaaaaagcacacctgcttcgtttacaatcaaccatattcgctgaaaaccatcaagatgatgtcggaatactggattatctcggcccctggcgacaagacctgccagcagacgtacgacacgatgaacaatctgaccagcaagcaacacaacctgtgcaataactacaagttccatattccagatcttaaggtgggcaccctcgaccaactggtgggcctctccgacgatctgggcaaactggacacctatgtggagcagatcacccgcaaggtggccaactatctgggcgaggtgctcgaggatcagcgggacaagctgcacgagaacctgatggccaacaacagtcctgggccacctgacgacagcatgccgtgtcgccaccaccagcgcatcaagcatctcagtctgcgacaccagcgaaaacaccagcacacgcaccaccaaaacaaaccccaacactaccatcaccaccaccatcaccaccagctgccgcaggatctcaagggtaaatccgcagccacctgttctcccgccactcctcctgcgcctgcgtctgcaccaccccatcttccgcctgcctgtgcctgcgatgtccttgcgcctggatccttaaccggcggtagcctaactaacctgtccacgagtcacgagccggagccggagtttgacgtctgtccgtgcgatgagtgcttcgcctgtgccccgcccagcacaagtgccacggccagcacgctactggcggatgagtgctactcccagactgcctcctccatgctcagtgccacacggtgtgcactgtccacggtggcggcgatagccactggtagcggtttgggcaatggcccgagcaccagtgccgcagccgctgcagctgcatccaactcctccggcggtggaggtggaggggggcccgcctcctgctcgacgctctgctcctcggcatacttctccacgtcggcgcccacgaccagcagctcggtacacagcagcatgtcccgctctaacagcaagcggctgaataacaacacttgcagcatcaacaataacaagctcagcttccgcagcggcagccatgtgagccagctgcatttggccacgcagcagccgcagcatcatcattcgcatccgcatcagcaaccgcataccaatccgctgcagtcgcccgtacaaaagtccatgtcggaggacgagggcgatgcgtcaaatgcccacgaagatggggaaacggacgaggaccccaagagtccgcacagtgtgcagtccgatctgtcggacgccttcgactggtggttcaataagcccaagcgtaactctaagaagagcaggtatcttatcatcgcattacctactttgtag

SEQ ID NO: 27828 - protein, 433 aa, DROSOPHILA
MMSEYWIISAPGDKTCQQTYDTMNNLTSKQHNLCNNYKFHIPDLKVGTLDQLVGLSDDLGKLDTYVEQITRKVANYLGEVLEDQRDKLHENLMANNSPGPPDDSMPCRHHQRIKHLSLRHQRKHQHTHHQNKPQHYHHHHHHHQLPQDLKGKSAATCSPATPPAPASAPPHLPPACACDVLAPGSLTGGSLTNLSTSHEPEPEFDVCPCDECFACAPPSTSATASTLLADECYSQTASSMLSATRCALSTVAAIATGSGLGNGPSTSAAAAAAASNSSGGGGGGGPASCSTLCSSAYFSTSAPTTSSSVHSSMSRSNSKRLNNNTCSINNNKLSFRSGSHVSQLHLATQQPQHHHSHPHQQPHTNPLQSPVQKSMSEDEGDASNAHEDGETDEDPKSPHSVQSDLSDAFDWWFNKPKRNSKKSRYLIIALPTL

SEQ ID NO: 27829 - DNA, 13909 bp, DROSOPHILA
gcaccggtgataagagatctctgaaaggttatacagagtcggttgttcggctaatccaaacccaaccacaatccaagtcatgtgaccaggattttcccggtttaggtggatggcccattcattggccgggtctatatatagtatataacggaccgacctgactaccgctggtcaagattgtgttttacaactctttatagacccgaaatcagttgatattggctacctgaaaagaacagaaccgaaatggccttagtcttatcgctggccattgtcggtttatggagcattggtactccgcgaactggatgcgattagtacagctatcctgtgtgaatattttcgatatgaaacactatattggtagtctggtagaaatagcgtttaagtgcgaaattgttaaggttgtctacacgttagattggattataactcctgagccaacatatagccgccacctgacgtcaattctggaactttagtatccccccatcgtaaatctccttatggggctttgtcaatttgtcaatatcgtaaagtctctttcgcccatcgccatgtgtctctcatgcgggcgagagattaatttaataatttgccagaaagtgtgcgagtgtgctcacgtgagcggcacacgatttgctgcgggagtacacaggtttgcgaatactctcttctatagagcgggctgttactcttttttcccaaactcaaaaccgaatcgaattgtgtgtgaacgagaaggagtgagatccttcagtataccagttgccagtgggtttatagcgctgttttattatcacaatgagccattatcacctggcgtacaggtatttatcagccaaacgaagctcggccggtgaatcaaattcgagcgcttcgtgttttctggcgccgacgtcgctgcctcgtcgactgcgagaaaaaaaaaactgaaactgaaacagaaacagaattataaaaacgttcaattagccgaggtagtaagtcattacagtgccaacgctcgtggcgaaaagagcgagtgaaaaactccagagaaaagctttccttcatcggttggcagtgcgtggaaaactcagctaacgacaaattccggcggcagtccatgaatgtgagtggttaatctagactttaagttgatagaattccgttgtgcagtcagtttcacgcatttcgccccctttgtttttgtccgcaaaatcgctgatttgcagttaattggaaccactgtaagaaatgaatgagtgcgaatagccttttcaagtgaaccgagcacaaaacagctgatttgtatttttgaaaagttgtttcttctgttcggttgcgcgtgtgtttcgattcggcatgaggtgagtgagtttctgattaaaaccgcacttgcaattaaattcataaaaataaacaaaatatgttttaaaacccctgtgtcgcgaaaaaaaaattgaacaaaggcaaatgagttggagttaagtaaacagcattaaagatcagctctttagtgtcgaggaactcgatttaatcgaatgatttacgatcacatattaagcattgctttttgtgtaaccgtaacattcacttccacgcagacaagtggttaggtgattaatgagattacaacacctatttactttcatttcgaatcccaattccaattcaatggccacaattcaagtgcagaaatgcgcgccgataagcagataagcctggtcaagagacataccccttgagacccatactagtccacggatcccaacagtttcccatcgctcgagaatagcgaaaacaatgtgaagaatctgataatagccactacactgttacaaaacggcacttcatcgattaacgcactttctagtcagcagttttgaatacctcaattggtgactactcaagcataacactcatttgatgacttaagtaattattgggcctagcacagacaagctttacaccgaaaatagcttgtaagtgcacaatttcgctgagtgtacagccactcggccgcatcgaatgtgagttgaggttgaatctcgggcctgaacttgaacttgaaaagctgaatgcaaacactgcggctgctagtgaaaaatgaaaattgattttgaactggaaatggtgtggacatgttgccaacaattggcacaactagcgaatgacattaacataaattaagagaagcccatttccattaaaatgccaatctacggtcgtagaaactaaagcacgggtggaaaatttgccactgccttgtcacggatccgtcgtataaatgacgaaagctggtttatgaacctgcgatactgcccaattatgacataattaaggcaatctgatatcagacgtcttggcctcctttatggcggcatctcccagtcagccgaaaaaagggtgaatgaagtgtaattagcacgtgttttcttggccgagaggaagtatctggtttcgagtccggagttcgtattaccgtgcaatctatgagaggtaccccactcaacggaaactcttagataagcgaatttgatttacgacaactgccgcacctcatggcaacctattcgatggattcggagaagagatcgaagggatatttggcaataaatctatcggattgggaatttatgatcattgggttttgcggcagaaatattcagaattctattctattggccgaaacgaactttggcagcttctcgctctgttaagccaacttatcttcccgcaatttccgacaatctgcgaattggtagtgcctcttcaatccgattaagaggcgttagcgatagcgattagattcataaatttttgtttgcccctcctccagtgcattaaatatggttttgtggccctctataaatttttgggtttttactattatttactaatgcacttttaatgccaagcaagtgcagttgtaaacttcagacaacggacagttgcggcgcaatcaacaattatccataataacatgctatgttcatttattacattatttatagatccctaaaccctttggtgttttttttttgtaattatcataaattcaacttaactactatttgtcggattgaatttatttaagttatatgacatcgaaatatacaaaatagttagcagtaggacaaccatcgctttcaactgattccggctaactgcggttgtttagcagactgaaaatgcaaaatcactccgtctaagcctggtaaaccaaatgtttacccaaatgacagattgctaattgtttaaattgatcaatatttgagacagaaatacggcaaaggaaactcgagatttgcgctactttattgggtgatcttattgagtaatcatagagatcacgttttcatttccgatcagcggattataaatatataaattaaggcatataaatagcaaagggtaatttggcaaacaatgtattgaatattaaatgtctataaagtagtaatgcaaataggatgtgcatatttaaagccaatctatttaaataaagtcagcttagtgataacatttatattcatttattaaataatacgatcttgatgcttatatatactaagaaataaagaatttctattgtgattagtggggtgacattcaaaatagcccaattaaggctttatgtgggcttaatttctaagaaatctgcgcaaacaaatcaacaggttgcccagacagcttatgaaactttccaaaaatgttttttcttttttttttggactgctctgacgtgcaaacaattcgaaccacaattgaaattcggctcacacaaaaggcattcgagtgcgcaactgttttatttgttatatggagttcggcttttaaaatttaactacatgtagaatcaaagccctgttatgatcaaaacacttggaatttcgcctcgcaaaacaacgtaaccagttttgtgaaaaagggaaacattgtcttgatttttggtagttttcctgcaaaccgaaacaacaagcgtcaaatcaacaaacacattacatcatcagggagccgaaattgtcaatatgtgagtggataggcttcgaacgagataagtagagtcgtaaggttaattacattgcgaatgtgcgatataaatgcaaatattaaactagccttgcacatgcgacacatgaaaaaagcagccaaggtctgttcgcagaactcgctaagaaatcggttggcaaactgtaccccacttggatctctgatatgggtatgggtatagataaatacaatatgggtattagtcaaatcactgtgtcaaatatttgatcgccggtcgttgttaactgggaaaacgtgcgtagggagacggactcgtgagatctcgaaatcaaatgcccatcgcaacggaatgacggtggactttttcgcattcggcgacacttagcgtttgcctaaccaattgaagccaagatagcctgctaaatttatcaaactaatttgtttaccgctctctgctttcagattaacaacttgatctgccgatctgtggagccgtaatcagtgatctgctagctgccagaaaagtgtggaagctgtgaggagaagtgcaaagggtccgccccgttcccatagccccgaagagaagagccgagtgtcaacaagacgggcaaaaacggcgaataaatcgtgcaaatagcagaactcagacagcagacggtccgaacctgaatcggggcttatttaaaggtccgctatccgctgtctgtcaatcagaacaattcaagctgccgacggcagcagatcgcgagtgaagaaatccgaaagaaaccagaagaaagtcgctgaagatatacatacatatgtagcataagagatagtcgtgcaaatagcaaatacgatatataccggtggggaaaattcccggacatcttgcacacaacatttcaattgcaaacacttacatgcacttacaccaccgacaaagtttattttcctgcattgtacatgcagtattgtgatatttaaacgcgccacattcagcgtcgtaatcaatttgttttaacactctgtgtttaaccttaacaaaaggcccctaaagccacaaagtcacaaagccacaaagcccgccaaataaaacaattctcaagatgtcagcgtcgaaggaggcgatttgcgggagcacggagaaggatctggagaagccggcattgggtaagtctccccaaaaagggcatcatatgaaacagagcaaatgtgtgggagtgtgccagatagcacagtgaaaaggtgtcatatttactaattatagccgtgatatatcacaattgtcattacacttatggccgagataaattgcctttggaattgcgttctttgcacgccaattattaaggttttgatagggtaaatgacaaaaacatcataaatagaaaggctaataaataaataaaaattaaagacgatattatgcagtaaagatatagttctaacgatatatatttaaatttttaaaaggataatataattagaattaacagtacaagctcttaaacaaatcatttcttagatttatactgaaagtaggaaacagctcgtcttgggaaataatgcaccttcagaaaccacataattaattctgatcccacaataatgatcggtgatcccagttatatgcatttacgcctcacctttcctttcttcgagtaattgacttgctgtggctgttatccatatgatgcatacacccagtctatgatttcagttgccgggtaattgccccatttattgcaaatgacaattcattcagccgagtgctgagccatataatttatatttatcagttgctcgaaatactaagcaaattagcagaacagaacctgaacaaaaaacgcgaacacacgttctcgcccgcctattttgcaatcgttaaactcagaaaagtacgcttcaagtcgattgaatggacttctcattgcttcactggggatccacttgatttaaataagcgaaatccgcccgaaaatggatgagaaggttgccgctaaacggaagttatttgttatgcaacgaaaatgaggagaaaaataaaatccattagtgacaaaagtcgccagtgcgtgagccaaattcacaattaatttgaacttagcaagggaaaatttattgtgacaaacaatcatattttatattaaatgtgaattaacaggaattatataaattcagcagttgtagttaatgttggcttatcacctgcctttgtattttcctaactagctttccttcttcaacagatattgtatttagttaagctaagtagtatttgtttaatcagttaggtcaagaactctattttcgggtagaacaagtgttttgtttacgctttaagtgcttccttattatatcttgaacagaagtcatcatcttctcggcacttgacacaatttgtttgagttcccgctttacctttttcgtggctaagtagcgctgtttcaatcaaccaaaactggttaccggcaaaaacaaactggccgaaaaaaaacaaagccataaatttgctacaaattccaaatacagtacgtgtttataactgtgcaaatgaactctgcaaggcaagaagtcaaaactcgaatctctagcccaaaattcgcggctgagtttagtcggggaaaagcattcgccttgggattccgacgagatattttcacctttttactttcattagcgattacagagcaacgttagcttttcgtgtcgagaattgcgaaaatggggcgattttcggtctggcagattgccgagttttttcgacgagttgttggcttttggccctgatattgacacttgaattggtggccctctggttttgtcatcttgctacatgccatcgtttaattggttggaacagtgaatacattatctattcaatttcccaggaaacgcccccgcagtttggaatcgaatgtggaggtgggtggctcaaaaaaaaaacccccagtaatttaacaatagggaggcagagtacgaaataagcgatgcgctcgactggagcaccatatccgttctatatttccatgggatagatctactatatagaacatagtatatagtatttattgttggcgttgacgtctcggcgcactggcgtaatccgatttgcgacccatctcagtgcggtttgctaaattgaaaaattgctttacaaagtaggttgaaattttaatgcgagcaagtgagatggcaaacactataaacttttcaatttggacagttgaaattccttacttttgtaagatcgtgactttagcgacttttttttcgcggaatagtagtttattttttttttcttgcgacagtgagtggcttgcaaattactcatctcatctcttggcgtgcatgttactatttttatagattacacttaccacgaaaatagccgagacattcattcagagagtgctatctactgacctacctgcaaaggggaaaccgaaatagaaattacagaacgattaaccgattaattgtcacagttgtgactagctgaattcgaactatctgataaagtatctaataaagttgggcaaataatctccggctgactacgaccttctggaaaacaatgctgcctcttttatagccgcaaatatttgcgctactcttttgcacctttcaagatacccgataccaggaacgaaccctcaaaacgacaagaactcgttgtttatgtttaaattgacttgaaagccaagcaaatgccaattgtactttattattctgtctcgcaatggcatatcgggggtttacgtacatccaaaattccccagaatgttttcatacaattgtttatttacaacttaatgggagaagaaagccgatcttccatcttgaaataccagtaaatgtcgttactgaagttgcttacgtaactgcgtaactacgtgacgttacgcagcaaagctcaccccaaaagcatgcaatgaaaacgtaacggaagcttgtagacttcatgtagagagtatgtaaaatagttaactctttcaaatgcccatgaataattaataattaataaatatgaactgctttcattccattcggaagacggaagcgaatgggaatagttggcagacaaaatgaaaaattacttaattgctttggccgcgcacaactgtaccgcagcctagccataaagtattccattaggggatttgccaaaaatacaccctacatacacttaaataattagaatatggtacacatcaaagcagacagtgtgaatggtttctctttattgtcacgagagctcgacagacacgctcaatggcggcaaagcgcaattaacacgaaagaaaaaaactttacagggcagtaaaaaatctggccaaggagtgttgaatgctaaaaaaggatcaaactaaatacaataatattttatacacatatccatgtaaataaccaaatgccttcaaaacatttcgtttttaaaacccaaagcgatatccaatttcgatgtgtagatcattcggaagtcgatgtgatcatgtcgtctgggtaattggaacttgcgagcgaaggcaggcgacaaacacgtgtttttctcagccggcggcaattttcagagcgggctccaacacacacatatatatataaacaatcacttgtgcgattcatgcgtgactgtagctatttgtacagttttaactttggtttcgctttgcgattatcagcgattattaatgcaaaacaatgggcgaaaattctaatgggttttgttcacattttaggattatgacaaagttagcaagaacttgtcaaagcgattaaaatagtgtatatattttggcgtgaccagttattactcagaatacatatgtatggtgtacagtgtacacctagtggggtcgcctccacttagtgtcgtcgcatttgtatgacttcatcccgagtctagctacagacatgtgtctggtcccattttcatttgttggggatggttagggtagagattatctttaagatagtatgaagcccagtgtagcccaacaacaccacttcaatataagataccaaaattatttggcaatctttcaaagtccgcagcgggtactcgcgatgttaccataatcacttagctgtgcatattttagacagcgcgtgtactttgccttccatgtgccgaaagtcacgagatgtgaatgtgtggcatgcttacgtccatccgatataattagacatatatactatatcggtagatggttcgaccaaatctctttgactttgcagcgactgaaaagttcactctatcaattgacatcaatcgccgggtccgaaaatgatgcataatgcaaggggagaattttccatcgtctcacttaattagtcgaaatctgaacactaaaactgatgtaatcacccaacggcggcggagagagcgacgccggcgcagaataataccgcaccgcacctcactcgttctatatccgaatccgaacccaatagccgcagatacactcatatgcgatatacccacagcgatggccgcagtttataaatgaaggcggcgcaacagttggcgctcagtagaaaaagctgaaagcagctggcggttgcaaaaagtacccactcagttgaccgttcaacgtcggtggcagaacatacactcgcactagacccagcgataaattgtcgctcaagttttcccctcaagcgaaccctttgagttttcccagtgcgcgatatgttacggtcttcagccgaccaagtcgatagatagacaatgaaatggtttaagcgtgtgcgcaaaaagtcttgaactcgagtaaaacgcgtgctagataaaatttagataatttatttaagttaaggccaaaatcgaacactatgccctttcgacgcagcagtctgaatcatcggcatcgcgatggccatgttttggtatggaatcagaggaatctccacgaatctctggagcaacagccgcagagtaagtctgaaatgcaaaaggataagctagcacaagttggtcctttttgttttcttcgccagtttctgtctttattttgtgaccacgctgcgtatgcgttatattgaggaaagtattttcctatttagaccggttttcttccccttggactcatttcgcgtgatatacacgtgcttttcctcatcgccagatagctagctgccaacgaaagcaaactcggcaattgtgcaacacgagacgttggtggaaatatgtggggaaaccaggggaaaagcgagcacacttttcgatttagtgctgcgtaagcaaaagtacacggcgagcgaataacaatgtttttaaaatcaaatttgaatcagcataattgcggattcgaacgattgtttatttccaaatttattttgctagttatgggcaactgaattccaatgaaatccaccgggttattgaacacaaattgcttatcatttcacttttcgattggctacaggtggccaaagttcattggttttgaaagtaaattggcttaatttgttctgctcgcttacagccttgaactttctatgcgtcaccccttaattaaaccagaaatatccgagcccattcgcaaatcctagaaagtaagcgcaactgtacatgaaataggaattctaggtaagctcacgtgtcccatgtggccgtgaaaattgctggaattgcggcgattcacgtttgacaaatgacacaaacggcactaaaaattacaaacactcatccagccaaatgtaaacaattgctttcgtcgtagttacaaaacgcgatcacgaaatatgactattgggcaataaaatcaaataaggagagtagagctctcaattgcaaaagtttattgtgaaatttaagaagaaatcggttgattctcagttattgtaatgcgataagtaatcagttctaaaataataagcaactagacgtatataacagcataacagaaacatttgtgggcccgatatcttaaatgattcacttagcaaacctagaatccgagaatcttatctccgagcaacgaaccttgaagctgaacaaaccgcagacgagattatatcttcatatatcgcttttagccgcgatatatttgggttatttctgcatttccgaagcatttaattggttagctagcaataatagttgtcgacaagacatccgcttgccgcagataaattatttattttggctttttctgacgcatttcattttgccatactctctgagaggaatattttggtaatcacttggctaattctctcggttttcttggcattttttaggatgctttgccacccggtactttgtgacctttatgcttttcctgggcatggccaatgcctatgtgatgcgcaccaacatgtcggtggccattgtggccatggtgaaccacacggccatcaagtctggagaggcagaggagtacgatgatgagtgcggagatcgggatattcctattgtaagttggcattatataaaaagaaaactcaatttatgctgatgaattctcttcaattcccaatttcaggatgactctcaggatggcgagttcgcctggagctcagctctgcagggctacatcttgtcgtccttcttctatggctatgtcatcacccagattccctttggcatattggccaagaagtacggttccctgcgcttcctcggctacggcatgttgatcaactccgtgtttgccttcctggttccggtggctgcccgcggtggaggtgtttggggtctgtgcgccgtgcgtttcatccaaggtctaggtgagggtcccatcgtgccctgcacccacgccatgttggccaaatggattccgcccaacgaaaggtcacgaatgggtgccgccgtgtatgcgggtgcacagtttggaaccatcatctctatgccactttccggcctgctggctgaatacggattcgatggcggctggccgtcgatcttctatgtgtttggaattgtgggtaccgtctggtccatcgccttcctgatcttcgtgcacgaggatccctcttcgcatcccactattgatgagcgcgagaagaagtacattaacgattccctctggggaactgatgttgttaaggtgggatttggagataattaacaattttagattgaaattataatattctattcttactttttagagccctcccattcccttcaaggctatcatcaagtcgctgcccttctacgccattctgttcgcccacatgggtcacaactacggctatgagactctgatgaccgagctgcccacctacatgaagcaggtgctccgcttctccctgaagtcgaacggtctgctcagctccctgccctacttggccatgtggctcttctccatgttcatctcggtggtcgccgattggatgattagctcgaagagattctcgcacacggccaccaggaagctgatcaacagtattggccagtatggaccgggagtcgccctaatcgccgcctcctacacgggctgcgacagagcactgaccttggccatcctcaccatcggagtgggtcttaatggaggtatctactccggcttcaagatcaaccacttggacctcacaccgcgtttcgccggcttcctaatgtcgatcactaactgctctgccaatttggctggtctcttagcgcccattgctgcaggtcacctcatttctgatcccagcaaggtgagttcggaagtccatttgagttggaaaacagatactataacaatttatttccatttttagcccatgatgggtcagtggcagatcgtgttcttcatcgctgcctttgtgtacatcatttgcggtaccttctacaacatcttcggatccggtgagcgtcagtactgggacaatccggaggacgatgagcagaagccggccctccagacgaccgtcaccacctccccagcgaggctgagcaacggcagcacggcaccagcggccatctcgagttcctaggactccaaatggaagtagtattagccgtagtcgtgcgtcattaaccattaatccgtacactatacgatatgcgtagcttagtccttgttttagtctaattatttgataagccaaaagttgttaatattgatagttagcctttgatttattcctacatctgcataaataccgctaaaaagacactaatcttccaattgtaaataaattgggaactgaaaccgaaaccacaccaagtcgagcacaaaacgtcaactttagttagtgaaatcgaggtctaccattgcaaatgtgtagttttcttattttattgtgatagcgaaagagtttacttctctcactgatttgttttgaaattaaatgaaccgctcaagcgaacattgttaagcaaacaaccaaatgtatgaaaaccattaaaaactactagtttaagaaacaaaaaacatttaaacatttattggaagagggcagaaaaaggaccaattacgtgtattgggaatgaatgttgcttaaagaagttgtttaaagaataaccaataatcatattctcttaaagccaacaataagctttcctaacaacgttggttactctttcacccttgatggctaattcgtaaataataagcagttgtcaggatatcaagtgcaaccatctcctctatcagctacttaaatgctagcactaaagcagaaggatttagttagcagttacaatgggccatcaggaggagctgaagccggagcaagtggatctgaaagtaaccccctttgtgggctatctgcgacgcacatggagtgacttctgtgccaccagcagtatccatggattgaaatacactcgtgacgaggatacgaataagattgtgcacctggtgtggctcttaatatcggtggtgatgttcatttgtgctgttgttatggcgcgcaccttctacatggactatcgcagcagtccgacgcgtatgaatgtggaaagtgataacacaccggttaatagactcta

SEQ ID NO: 27830 - DNA, 2291 bp, DROSOPHILA
caacgctcgtggcgaaaagagcgagtgaaaaactccagagaaaagctttccttcatcggttggcagtgcgtggaaaactcagctaacgacaaattccggcggcagtccatgaatattaacaacttgatctgccgatctgtggagccgtaatcagtgatctgctagctgccagaaaagtgtggaagctgtgaggagaagtgcaaagggtccgccccgttcccatagccccgaagagaagagccgagtgtcaacaagacgggcaaaaacggcgaataaatcgtgcaaatagcagaactcagacagcagacggtccgaacctgaatcggggcttatttaaaggtccgctatccgctgtctgtcaatcagaacaattcaagctgccgacggcagcagatcgcgagtgaagaaatccgaaagaaaccagaagaaagtcgctgaagatatacatacatatgtagcataagagatagtcgtgcaaatagcaaatacgatatataccggtggggaaaattcccggacatcttgcacacaacatttcaattgcaaacacttacatgcacttacaccaccgacaaagtttattttcctgcattgtacatgcagtattgtgatatttaaacgcgccacattcagcgtcgtaatcaatttgttttaacactctgtgtttaaccttaacaaaaggcccctaaagccacaaagtcacaaagccacaaagcccgccaaataaaacaattctcaagatgtcagcgtcgaaggaggcgatttgcgggagcacggagaaggatctggagaagccggcattgggatgctttgccacccggtactttgtgacctttatgcttttcctgggcatggccaatgcctatgtgatgcgcaccaacatgtcggtggccattgtggccatggtgaaccacacggccatcaagtctggagaggcagaggagtacgatgatgagtgcggagatcgggatattcctattgatgactctcaggatggcgagttcgcctggagctcagctctgcagggctacatcttgtcgtccttcttctatggctatgtcatcacccagattccctttggcatattggccaagaagtacggttccctgcgcttcctcggctacggcatgttgatcaactccgtgtttgccttcctggttccggtggctgcccgcggtggaggtgtttggggtctgtgcgccgtgcgtttcatccaaggtctaggtgagggtcccatcgtgccctgcacccacgccatgttggccaaatggattccgcccaacgaaaggtcacgaatgggtgccgccgtgtatgcgggtgcacagtttggaaccatcatctctatgccactttccggcctgctggctgaatacggattcgatggcggctggccgtcgatcttctatgtgtttggaattgtgggtaccgtctggtccatcgccttcctgatcttcgtgcacgaggatccctcttcgcatcccactattgatgagcgcgagaagaagtacattaacgattccctctggggaactgatgttgttaagagccctcccattcccttcaaggctatcatcaagtcgctgcccttctacgccattctgttcgcccacatgggtcacaactacggctatgagactctgatgaccgagctgcccacctacatgaagcaggtgctccgcttctccctgaagtcgaacggtctgctcagctccctgccctacttggccatgtggctcttctccatgttcatctcggtggtcgccgattggatgattagctcgaagagattctcgcacacggccaccaggaagctgatcaacagtattggccagtatggaccgggagtcgccctaatcgccgcctcctacacgggctgcgacagagcactgaccttggccatcctcaccatcggagtgggtcttaatggaggtatctactccggcttcaagatcaaccacttggacctcacaccgcgtttcgccggcttcctaatgtcgatcactaactgctctgccaatttggctggtctcttagcgcccattgctgcaggtcacctcatttctgatcccagcaagcccatgatgggtcagtggcagatcgtgttcttcatcgctgcctttgtgtacatcatttgcggtaccttctacaacatcttcggatccggtgagcgtcagtactgggacaatccggaggacgatgagcagaagccggccctccagacgaccgtcaccacctccccagcgaggctgagcaacggcagcacggcaccagcggccatctcgagttcctag

SEQ ID NO: 27831 - protein, 516 aa, DROSOPHILA
MSASKEAICGSTEKDLEKPALGCFATRYFVTFMLFLGMANAYVMRTNMSVAIVAMVNHTAIKSGEAEEYDDECGDRDIPIDDSQDGEFAWSSALQGYILSSFFYGYVITQIPFGILAKKYGSLRFLGYGMLINSVFAFLVPVAARGGGVWGLCAVRFIQGLGEGPIVPCTHAMLAKWIPPNERSRMGAAVYAGAQFGTIISMPLSGLLAEYGFDGGWPSIFYVFGIVGTVWSIAFLIFVHEDPSSHPTIDEREKKYINDSLWGTDVVKSPPIPFKAIIKSLPFYAILFAHMGHNYGYETLMTELPTYMKQVLRFSLKSNGLLSSLPYLAMWLFSMFISVVADWMISSKRFSHTATRKLINSIGQYGPGVALIAASYTGCDRALTLAILTIGVGLNGGIYSGFKINHLDLTPRFAGFLMSITNCSANLAGLLAPIAAGHLISDPSKPMMGQWQIVFFIAAFVYIICGTFYNIFGSGERQYWDNPEDDEQKPALQTTVTTSPARLSNGSTAPAAISSS

SEQ ID NO: 27832 - DNA, 4360 bp, DROSOPHILA
ctgtttcaatagctcctgcttcttgggcggcaggcggctaatgtgagtgcaaaccccatcctcgatccggtgcgtttcgtgcacgtcgaagttctcgtagatgattagctgctccagcgatctgggcggtggtcccagtgccggaagcggcggtggaggcaatagggccggtggagctccacatccgtagcgcggatccatggtcatcgggtgttgatgttgatgttgatgctgctgttgctgcgccgtcgatgatgtcacatagcctgctggcatggtcacggcattgggattaatcaccgatcctggcactaacactgggttgctgctgccactgctgacactgctgttgctgttgctaccgatgttcatgttgcacgtgttgctgttgttgctgctgctgctgccgccgccgctgccggtggcgaactccagggagccatcgttggccgccgccatgttcttgaggtctacaagagagaatcggaataccaacacactcaggaagcgaaactccaaggatgtgtgcgagtcgactttcatttgaaatcgcccctgagctcagaacaaaattttgaaaaaatatgtggtatcaataggaatgatttgcattaagttcacaaagtaaaataacatttctactatatttataactaaagttcattacatttaaaaataaataaaaatatgaatcaataaattctgttaagtaatttatagtaggataagataaaatatcgattgtgcttggctgaaaatcaaaggcgattttttacttgaatcgcatgttttccttggcgctgtatgatttgattaattatattgcaccaaggtgaaggaggaactatgaccattaagtgaccattaacattgcattctcttttccattttcaattggtagtcccaagaaaatgaaagttctcctctgtattaattggtttagcgcaaatgcagaggcgcgacgcaggcaataaatctcaagtaaaaacaacaatcaaatcgattttctctcaatcgcttcttgctagttgtgtatatatattttctgggttcgcaaacaatttccatatatatgtatgtatatcgtatgttgtgtttagttaggattggttttacattaacatacatatcatttgttcttggcttactaaaatatatatttatatattaccatattaaatagcattagcatgattttctatactcgtgtcgttcgtgttggtgagtgtgtaaatgtgtgatgtttgtgtgtaaatgtaataatctcttttcaaggaataacattgcatagttttggggtaatgatcgatcgttgtacaacaatttcattttatcgtcgtcaaacgtaatacaaaatttgcatagttttataaaatttggcaaaaagcttgtgtaaaattagtctaaataaacgaaacataaactaaaaacgaggagcacactaaaaaactaatatgacgatgcacatcaacggaaaactataatctaggacaggttgggaggatgatgggggatgggccgaaatcctgaatcctctgccatgtccttctgcaacagcctatgcgtgtcaacaggtggcgccaccaccgctgtccttggcgccacgccgaccccaatctcacatggccgtgggcggcaatggcccgccacctcctcctgcggatccagcgcctcctgttgctccgccagcacctccgccaccaacacctcctcccccaaccgcctgctgtgcgtttggtggtggtcccggatatcccatcgccgccatatgctggacatgtgcgtggggatgcggatagtagtgcggatgatgctgttgcggatgcggatgaccatgggcataggcaaagtgatgggcatgtggaagaccatgatgccccgtctggtggtgcggatgtgagtgtggcgatggtggatagtgatgcggatgctgcagctggggatgcgaactgcgcgttggcgttccaggctgcaggtggtgcggaagtgagtggggtaacgtgtgcggatgcgagtgctgggcatgcggatgcgggtgcgtgtgcggatgctgcaacatatgctgttgctgctgctgttgttgttgctgttgttgctgctgttgatgttgctgatgcaggtgctgctgttgctggtgctgtggggtcgtaggcgttccagctactgctcctgctggcattgtgggcgtggctggccttgtgcgtggtactgcctgtgccggcgtggctgctcctagcatcgatgttgccactggtgttgctggcgtggccgtcgctgctgatgcggctgctgctgcaagtttcggtgttgctggtgagttgggtgccagcggatcctgctcggattgctgctggtgctgttgttgtggtgtctgtttgaccggtgtggatgttgttgttgtgctggtgttgttgttggtcttgttactggtgttgttggtgatgttgttgttggtattgtcgcctagtgattgaaagcgtatgcgttggaaaaagaagaagaaagaggaaacacaaacaaattgaagtcaaaaattaaaattgttttctttctgtttttcttttttgagagcgcgcagacaaaatggattagtttacgaaattttgtaaaaataggcaggccaaatagtaggtagttttcttataattttgataggaagaaaaagaaatagaaaatgacacaaaatagaaatagaaatgagaagtgcaaagtagaaaaatcataaaaatgaatgtaagcacttctagtttcgagtgtatttttaaaatttagcacattcgcctcttggctttcatgtctcgcttttattatttttttttttttattaattttcctctgcctgactacattttcggttcatgctgccttctgctgcatttgcactacacggaaatcgggtatggcggagtcgggtgttctagggggttatatctacatctatatttagatatagattccacttaccagctgttgtgttggccagaaagcgcttggttttgtcgagtatataaggcagattgtagccatccttcgtgtagctgcaaaataagaaggacattcatcaattataatagcatgcttttaggctactccaagttcggcaggatactcaattatcgggggacacgatggtgatgacgatgatgatgatgatactcacatttccgtgcgtttggtgcagaacagattcttaaaattgctataaatgcagaagagcgtaaacgtcggcagtccctggcccagatatcgagcgaatttgatctgctccggcttattcaaaccgcactgattcagtgacagccatggcctgtggtccttgatgtcgtattccttttggggatagtttgaaaatgggtacatttagtataaatcatatgtgcaattttttccccaagtaggaccagcatgaatttcaacgtttctcgttgcaaaatatgtataattaaagttccacttatagtttaatttagaaattagaattccattaaaaactaattgaaacccagctatggtggccttcgttcaaaaattttagataacgaagtagtaatgcattttaattagatgaaaattaaattagaaatccaactctagtcgtaaagtaattttccagacataccggttttactggttggtaaaaccccgcccctaaccacccttccattagttttaaaccagcttacacctttcatgttgcaacccaccccccattccaccactttttagcataattttctcgacttttaggctgtttttccacgtagaactatatgtgtgtgaatgtatgtatattcatggacgtcaaattctatggctgcacatatgtatttgccttacataatgtactttctctatatgtatgaaaaaccaaaaccgacccgactagctcacccccaaaaacccatacacatgcgagcgaaaactttacccactactaatcaaaacttataattcgtgtacaacgcaaaagtttaaaacgaaaattttacacaaaagccaaaaacttgcaaaggacgatggttgggttgggtggaaaaacgaggggggtgggtggcgacggattctgaatagcatgccgaagcaaaagctcccatacacacacatacagacattggctcacacacactcacacccatacaatgtatattttatagtgtaaaaatatagaatagggcgaagcgaaaaaggaagcagaaaaggcagcaaagcaaacccaaatagaaaagcaaacaacattttcaatgaagccattttgccccaaaaagaggtgggtttgggggttatttgctaaggccccccatttcaaagggttaccataaaagcctctctgtctgtgtgtgagtgtgtttctgtgtttggc

SEQ ID NO: 27833 - DNA, 1737 bp, DROSOPHILA
atgtacccattttcaaactatccccaaaaggaatacgacatcaaggaccacaggccatggctgtcactgaatcagtgcggtttgaataagccggagcagatcaaattcgctcgatatctgggccagggactgccgacgtttacgctcttctgcatttatagcaattttaagaatctgttctgcaccaaacgcacggaaatctacacgaaggatggctacaatctgccttatatactcgacaaaaccaagcgctttctggccaacacaacagctggcgacaataccaacaacaacatcaccaacaacaccagtaacaagaccaacaacaacaccagcacaacaacaacatccacaccggtcaaacagacaccacaacaacagcaccagcagcaatccgagcaggatccgctggcacccaactcaccagcaacaccgaaacttgcagcagcagccgcatcagcagcgacggccacgccagcaacaccagtggcaacatcgatgctaggagcagccacgccggcacaggcagtaccacgcacaaggccagccacgcccacaatgccagcaggagcagtagctggaacgcctacgaccccacagcaccagcaacagcagcacctgcatcagcaacatcaacagcagcaacaacagcaacaacaacagcagcagcaacagcatatgttgcagcatccgcacacgcacccgcatccgcatgcccagcactcgcatccgcacacgttaccccactcacttccgcaccacctgcagcctggaacgccaacgcgcagttcgcatccccagctgcagcatccgcatcactatccaccatcgccacactcacatccgcaccaccagacggggcatcatggtcttccacatgcccatcactttgcctatgcccatggtcatccgcatccgcaacagcatcatccgcactactatccgcatccccacgcacatgtccagcatatggcggcgatgggatatccgggaccaccaccaaacgcacagcaggcggttgggggaggaggtgttggtggcggaggtgctggcggagcaacaggaggcgctggatccgcaggaggaggtggcgggccattgccgcccacggccatgtgagattggggtcggcgtggcgccaaggacagcggtggtggcgccacctgttgacacgcataggctgttgcagaaggacatggcagaggattcaggatttcggcccatcccccatcatcctcccaacctgtcctagattatagttttccgttgatgtgcatcgtcatattagttttttagtgtgctcctcgtttttagtttatgtttcgtttatttagactaattttacacaagctttttgccaaattttataaaactatgcaaattttgtattacgtttgacgacgataaaatgaaattgttgtacaacgatcgatcattaccccaaaactatgcaatgttattccttgaaaagagattattacatttacacacaaacatcacacatttacacactcaccaacacgaacgacacgagtatagaaaatcatgctaatgctatttaatatggtaatatataaatatatattttagtaagccaagaacaaatgatatgtatgttaatgtaaaaccaatcctaactaaacacaacatacgatatacatacatatatatggaaattgtttgcgaacccagaaaatatatatacacaactagcaagaagcgattgagagaaaatcg

SEQ ID NO: 27834 - protein, 372 aa, DROSOPHILA
MYPFSNYPQKEYDIKDHRPWLSLNQCGLNKPEQIKFARYLGQGLPTFTLFCIYSNFKNLFCTKRTEIYTKDGYNLPYILDKTKRFLANTTAGDNTNNNITNNTSNKTNNNTSTTTTSTPVKQTPQQQHQQQSEQDPLAPNSPATPKLAAAAASAATATPATPVATSMLGAATPAQAVPRTRPATPTMPAGAVAGTPTTPQHQQQQHLHQQHQQQQQQQQQQQQQQHMLQHPHTHPHPHAQHSHPHTLPHSLPHHLQPGTPTRSSHPQLQHPHHYPPSPHSHPHHQTGHHGLPHAHHFAYAHGHPHPQQHHPHYYPHPHAHVQHMAAMGYPGPPPNAQQAVGGGGVGGGGAGGATGGAGSAGGGGGPLPPTAM

SEQ ID NO: 27835 - DNA, 4341 bp, DROSOPHILA
atcgtatagaacgcaattgaagcaaatcaatcccaaagccacttacgtactacttactactactactgactacactactagttcaaagtgcgttctcaaaaaatatttatacatcaaaatatttatgcatccgcatctgctgacgttggtaaaatatcgaatttcctgatctgccctcagatgtaaattgtattgttgccaatgcaaatgcgcaaaacaagttcaaacgaatggaaaagtcgtgaaataaattgacaaattttacgacaatatgaggctttgcacacgtgagaattcatatgcatattatgaacaaaaagaaagatgactttcaatgctcttatgcactttgaaccaagtaatgaaacctcgtacctattaaaaaaaaatatttcaacgatttttgctcttggcattaaaaaacttattttgatgacgctgcgataattaaaaattgaaaaatatgtgataacctgcgcgttgctcttgaactgataggaattgaattgatggaaaaataatcgcacaatttaaatataattccatatatattccatatacttaggattatatttccggaaatcttatttgaaaaaggggtttcaaatatcagcaattacgagtgtgccatttgaatgatttacatccggtacttgtagccattcacaattaaaactaactaaaacgattgctttaaattatagcttatctaaaaattttctttcatatgacttgcgattctgtttatttaaaacttaaaattccaaatttatgtgacgttgaagtagttagaagttagacaaaaactattttaaaaaactttaacatgtctaaatatattgacaaacgcaaaaatcgagctttataaaatatgaagttaattctcatggtcttcaaaatccatagcatagcttgaggtgcttttgaaaccgggaatgcataaacatttcgagcataaagccaggctgaagtcacatctattgtgtttcttttatggctgatgcaactggattggcaatccgagtcagtcactctggaatggatcggagtccatagattccgtcaattggccagaccaggccaatcagaaacggcctgaccaaatttagcagcagttttttctttccattttacccgatcgacattaagttacaagtgtagtattttgagccgacggtggcacgacaagtgtaattgcagatgcagcaattccgtggcaagagaatttcactgtcagcatataagaaaccgcttcgattccgtggcgagtttcagttgtgtacagacgatcgcaacaatcagcatgaaaatgagcgacttagaacccacaaatgtggaattgaggtgaccatctacagaggatggggctccaaataagagctatgccttactaatacgtttatttcttttgacctctcttacataggtacaaaatccaaccccgaaagtcggataccgagcaggccttggctggaaatgactttgatcctttcgcattgcgggacaatccgcatccaacaacgtaagtggcattgtgttcaatgatttttgaattcaacattaatgagtacatggttattcccttgcagcgataatgaaactctcacgcatttgcttaaggcctccttgggaaccggtatcctgggcatgccatttgccttcatgtgctccggtctcatcatgggaatcttctccaccattttcaccgcctttatatgcacgcactgcagttacgtgttggtacgtattatacaaaaaataactctaataacaatgtattgaatattttttttaaactactaataggtaaaatgcggacacaagttgtactacagaactcgccgcaccaagatgacctttgccgaaattgccgaggctgccttccaaaaaggaccaaaatggtgccgtggcttcgcgccagtggccaagttctccatcctgtttggtctgttcctgacgtactttggcacctgctcggtgtacacggttattgtggcctcgaactttgagcagttgatttcctattggacgggaacggcagtgtcgctgcgcatgctcatttgcataatgctggtgccgttgatcctcatcgcctgggtgccaaatctcaagtacctggcacccgtgtcgatggtggccaatgttttcatgggcctgggactgggcattacgttctactatctggtccaggatctgccaccagtggaggagcgcgagtccgttgtttggagcacactgccgcagttcttctcgatcaccatctttgcaatggaggcaatcggtgtggttatgccgctggagaacaacatgaagacgccacagagtttcctcggaatctgcggtgtgctcagccagggcatgtcgggcgtgacccttatttatatgctgctgggattccttggatatctgcgttacggttccgccaccggtgagagcatcaccctgaatctgcccatcgaggagtggcccgcccagacggtgaaggtgctcatttccctggccgtatattgcacatttggactgcagttctttgtgtgcctggagatcatctgggatggcattaaggagaagtgcaagaagcgcccgacattggtcaactatgtgctgcgcacagtcctggtgaccgctgccgttgttctggccgtggctgttcctacaattggcccatttatgggtctcatcggtgccttctgcttctccattctgggattgatcttcccggtaagtcaaagacagcactagttcgtttgtgtcaacaattaactatatattttttcgatttctaggtggtcattgagttgattgtccattgggagagtggctttggtaaatacaactggatcctgtggaagaacgcaatcatcacgttgtgcggcattggcgctcttgttttcggcacccaggcagccatcaaggatattgtgaaagcctacagtaataatgaaaacgtcggagaatagatacttcaccatttaggagagaggctccgctttctagataaaatctaactattgttagatataaaactgcgcccacattttgtacattttgtctgttgcttagtgtgtctgttttgagaaccgaaagggaattaactagggatttctacaatatatgtatgtagcacactaccgagcaccattatgccgttttagcacgttttagtacactcgcgattatataatgtagagagtaagctagttgatagccgttcagaaacacttttagaacagttctgaacgattcaagcggcattcaaactggaactttactaagtgcactttaatagtttcctattgatttcctattaataccatttagtatggatctgtaagaggcttagttacgtaccatcctccaaaaatccccaccctttcctctctgttctaaaatagtattactcctaaagcaaaaaaaaaaaaccaaaactaatgttatcatgcctttcccacttttactttgttccgtggcaaattcgcgtgatttgcgtacattatttaacattttagcatgtttagtaagtaagcgtaagaattaggattgtaaagcctattttgcaatcgatcagttccaaatatgttgagctaaattactcagagaatacatttttttatacgaaatctagccgagtaataagttacattgaattgccccgatattcactatgtgtaaacatacttattttgttgcatacatatttttgtattttaattatagctattaaagagaaatacttagcgaaactatcaagtaaataaaacaagaaacacaagttgaaacattttattttgcatttaaaagtctgtgcagacaacgaagcagatttacttgtaaaatgatgaaaagttcgagccgcagaattatctgtcatctgtatgtaaatatgtatattgatatatgaacgcaacgagtactaagtatatctgcccagaaaagtatttagagttgtccatattacatattcagaagaacaaagattgatatgaatgtttacttttttgaaaaatgtttaaagtgtaaaccaagcaaagatataaaatatatacaccgaaataaaaagatataagagaatgtcaactgaataaatgcattaatattttactgatttcgaaatgggtaaaatcaattaagtaacttattgtttaattttcaatttcttactgacatgaccctgaacttcctttgccatttctggcctgcgggttcaacgcgtggcacttgctcagatcatttcggaataaccattcgctgaatggccaaaaacctgatcgagcaacttcaattaccaagtgtgcatagtcatttgttaattggtaacaagtgcacagtggacaaggcgtc

SEQ ID NO: 27836 - DNA, 1884 bp, DROSOPHILA
atgcaactggattggcaatccgaatgcagcaattccgtggcaagagaatttcactgtcagcatataagaaaccgcttcgattccgtggcgagtttcagttgtgtacagacgatcgcaacaatcagcatgaaaatgagcgacttagaacccacaaatgtggaattgaggtacaaaatccaaccccgaaagtcggataccgagcaggccttggctggaaatgactttgatcctttcgcattgcgggacaatccgcatccaacaaccgataatgaaactctcacgcatttgcttaaggcctccttgggaaccggtatcctgggcatgccatttgccttcatgtgctccggtctcatcatgggaatcttctccaccattttcaccgcctttatatgcacgcactgcagttacgtgttggtaaaatgcggacacaagttgtactacagaactcgccgcaccaagatgacctttgccgaaattgccgaggctgccttccaaaaaggaccaaaatggtgccgtggcttcgcgccagtggccaagttctccatcctgtttggtctgttcctgacgtactttggcacctgctcggtgtacacggttattgtggcctcgaactttgagcagttgatttcctattggacgggaacggcagtgtcgctgcgcatgctcatttgcataatgctggtgccgttgatcctcatcgcctgggtgccaaatctcaagtacctggcacccgtgtcgatggtggccaatgttttcatgggcctgggactgggcattacgttctactatctggtccaggatctgccaccagtggaggagcgcgagtccgttgtttggagcacactgccgcagttcttctcgatcaccatctttgcaatggaggcaatcggtgtggttatgccgctggagaacaacatgaagacgccacagagtttcctcggaatctgcggtgtgctcagccagggcatgtcgggcgtgacccttatttatatgctgctgggattccttggatatctgcgttacggttccgccaccggtgagagcatcaccctgaatctgcccatcgaggagtggcccgcccagacggtgaaggtgctcatttccctggccgtatattgcacatttggactgcagttctttgtgtgcctggagatcatctgggatggcattaaggagaagtgcaagaagcgcccgacattggtcaactatgtgctgcgcacagtcctggtgaccgctgccgttgttctggccgtggctgttcctacaattggcccatttatgggtctcatcggtgccttctgcttctccattctgggattgatcttcccggtggtcattgagttgattgtccattgggagagtggctttggtaaatacaactggatcctgtggaagaacgcaatcatcacgttgtgcggcattggcgctcttgttttcggcacccaggcagccatcaaggatattgtgaaagcctacagtaataatgaaaacgtcggagaatagatacttcaccatttaggagagaggctccgctttctagataaaatctaactattgttagatataaaactgcgcccacattttgtacattttgtctgttgcttagtgtgtctgttttgagaaccgaaagggaattaactagggatttctacaatatatgtatgtagcacactaccgagcaccattatgccgttttagcacgttttagtacactcgcgattatataatgtagagagtaagctagttgatagccgttcagaaacacttttagaacagttctgaacgattcaagcggcattcaaactggaactttactaagtgcactttaatagtttcctattgatttcctattaataccatttagtatggatctgtaagaggctt

SEQ ID NO: 27837 - protein, 500 aa, DROSOPHILA
MQLDWQSECSNSVAREFHCQHIRNRFDSVASFSCVQTIATISMKMSDLEPTNVELRYKIQPRKSDTEQALAGNDFDPFALRDNPHPTTDNETLTHLLKASLGTGILGMPFAFMCSGLIMGIFSTIFTAFICTHCSYVLVKCGHKLYYRTRRTKMTFAEIAEAAFQKGPKWCRGFAPVAKFSILFGLFLTYFGTCSVYTVIVASNFEQLISYWTGTAVSLRMLICIMLVPLILIAWVPNLKYLAPVSMVANVFMGLGLGITFYYLVQDLPPVEERESVVWSTLPQFFSITIFAMEAIGVVMPLENNMKTPQSFLGICGVLSQGMSGVTLIYMLLGFLGYLRYGSATGESITLNLPIEEWPAQTVKVLISLAVYCTFGLQFFVCLEIIWDGIKEKCKKRPTLVNYVLRTVLVTAAVVLAVAVPTIGPFMGLIGAFCFSILGLIFPVVIELIVHWESGFGKYNWILWKNAIITLCGIGALVFGTQAAIKDIVKAYSNNENVGE

SEQ ID NO: 27838 - DNA, 3022 bp, DROSOPHILA
ttggccagtggattttttggatttctgatgactccactgttgagaatctcaaacttgaatgctacatgtccgcttcaggtgagatcgaatgggttgatgattgatttttgtcattgatggtataacctttagcaaaatataactttcaacggcttttctgttgatgaaaacacaataaaggagattccaattccaaacggtgtttacatgttccacttgcgatcgtccctgatgaaaaaatggcggacagacgtgaaagtctatgctacgcgagttaataattattcggaataactgataaattggtttacatacttaatagctcaatctaataaaggtctacagtatttcttacattggaactacatcttaaatgtattcaatatttgacacaacattggtatacgtatacgtactgtataacacttacattgaaattacatttcatgcaatatacattcgacacagcactttcaggcacatcattagaaaagacgccactttgagaagttgaagttgagaagaagaagtatcgtaaaaaattaaatattttccgcaatgggattgtattttaactaattaaaagttttttcttattttttttccatacattaattacatttaaaacttttgcttagttaaccactcataaatttcataatgtataattacatgtcaaatctctagtggttagcgatagagtgaccgtttagtttccgtggtaggattatgtgtatttctatcaaacactttggtcacactaccttcacccctctttctttttctaaacgtgagcaaaaccgtaagtacaaaatatgagctccgcaaaaactttgaaaaagtacatgataatgttcaagataaagaacaaattcgcctacttaggtctgaatcgattgttggtacgctgaatatttcaaagtttttgcgaaatagactgacgatggtgcagatacgcagtgatttccgaaccgaatttaacctaacttttgccttgcagtgctcggttgaattgtcggaaccatggtgaacggccgcataccctcggtcttctcgaagacctacgtgactccccgtcgcccctatgagaaggcgcgtctggaccaggagttgaagatcatcggcgagtatggtctgcgcaacaagcgcgaagtgtggcgcgtcaagtacgccctggctaagatccgtaaggccgctcgtgagctgctgaccctcgacgagaaggacgagaagcgtctgttccagggtaagtaccaggcacacacatatattcagtcgaacttcctcaaacagcagcctactagttcccgacttttagagccacttctaaactttgttaattgctttgattaatcgtaattaattagtcgtaacaacccacgtgtaaagctgttgaccggatttattccattgtatattgcaaaattgcatgtttaaatgtctagacagtatgtatatgcgaaggaagttcgactgcataatccaattagttgccctgacctgatgaactgtattaaaaaatatattctgacacttcttgtctgataaaatacgttgacgttaacaaatacacactgaagagaattcttcgctagaactagcgattgcattttgaaacttccattgattgtgtacccattttacccacaggtaatgccctgctgcgccgtctggtccgtatcggtgtcctggacgagtcccgcatgaagctcgattacgtgctgggtctgaagattgaggacttcttggagcgtcgtctgcagacgcaggtgttcaagctgggacttgccaagtccatccatcatgctcgcgtcctgatccgtcagcgtcacattcggtaaatatcgcttggacaggcgacaacatcgtcgccaggctctctcagatataaactctgttctgttcagtaagaccacttgggagtcgaacaggcgccaatgcttgtaccgactctcaacgtctgtagattgcgcatgtgactccgttcacaccaatcgaaaatgcaaaatgcccgcctagcgtaagttgcactgaacgttttttgttgaacccaacatacatagcagccaccattccgatggttatcataaagcagagcttaactaatccaaatatggtgttcttcttccgtttgttttcacagtgtccgcaagcaggtggtcaacatcccgtcgttcgtcgtgcgcctggactcccagaagcacatcgacttctccctgaagtcgcccttcggcggcggccgtcccggtcgcgtcaagaggaagaacctgaagaagaaccagggcggtggcggtggagctgctgaagaggaggaggactaagcagtggtagccagctgtagccaagacaaatacatggcgcagacttgataaaaatccgtttgctttacacaaataaatgtaaaaatacacgaagttgaatgtgtttcaatgcgcatgtttgtttatagaatgggttaagccgaagatgatatcgaaatatatgcaaataagacattgaagttttaaacaaaaacaaaaaaagttatatggttaatgtaaagattattttcttttttaatattgctgaaataaaaaaaagcagtatttatcgatacccggtcagagctgcaattccagataaggctccagtgtgcccagagaagtaatctaacgaaatgctgccgttatcaacttagtactcgttatttcccgagctttcgtgtgcttcgccagcaaaattgccattctcacaaaacgaacgtttgaaaatcacttgagattcgggtaaacacaaactccaagtgacgaggaagaacagcagccggaataaatcgcgtataaatagtgtgataagcaagtgtcgccgaaatgccgaaacccggtgacaaggcgaaggtgaaggtgaacgtcaaggagcgggtggtggacgaaacctgcgacttgagtctctccgaactgagcgaaataccggtgcgggagatcgtaagtacaagctgaaatacaagtaattagcatcagctcccatcacccctctcgcttcc

SEQ ID NO: 27839 - DNA, 618 bp, DROSOPHILA
tgctcggttgaattgtcggaaccatggtgaacggccgcataccctcggtcttctcgaagacctacgtgactccccgtcgcccctatgagaaggcgcgtctggaccaggagttgaagatcatcggcgagtatggtctgcgcaacaagcgcgaagtgtggcgcgtcaagtacgccctggctaagatccgtaaggccgctcgtgagctgctgaccctcgacgagaaggacgagaagcgtctgttccagggtaatgccctgctgcgccgtctggtccgtatcggtgtcctggacgagtcccgcatgaagctcgattacgtgctgggtctgaagattgaggacttcttggagcgtcgtctgcagacgcaggtgttcaagctgggacttgccaagtccatccatcatgctcgcgtcctgatccgtcagcgtcacattcggtaaatatcgcttggacaggcgacaacatcgtcgccaggctctctcagatataaactctgttctgttcagtaagaccacttgggagtcgaacaggcgccaatgcttgtaccgactctcaacgtctgtagattgcgcatgtgactccgttcacaccaatcgaaaatgcaaaatgcccgcctagcgt

SEQ ID NO: 27840 - protein, 137 aa, DROSOPHILA
MVNGRIPSVFSKTYVTPRRPYEKARLDQELKIIGEYGLRNKREVWRVKYALAKIRKAARELLTLDEKDEKRLFQGNALLRRLVRIGVLDESRMKLDYVLGLKIEDFLERRLQTQVFKLGLAKSIHHARVLIRQRHIR

SEQ ID NO: 27841 - DNA, 4972 bp, DROSOPHILA
tttccaattttcacacacacacgcaccgaaatcaaatcaagaccaatttccaaagcaaaggccgaaaaacaaacaatttgttgcactttactgtcgtaaaaatcgccaaacggaattcacaaaaatcaacaactcacctcaggcgaaacatttggctgctctctttgtttttgttgttatccgtttgctgcgtggatgcatgtggttgcgtgtgtgagtgagtgtggtcaaataaaaaaatctctgttgctgctgcagcgcatatgtatgcgactgcgtgcgtgtgcatatatataggtgtgtgtgtgcgtggaatgcaataaaacaaacgatgtttgcgtttgcttttgcttattggcgcaatttgatttgcacgaactgtgtgctcgatattttagcgattactcggggctcaagccaccatcactcttatcattttccgcctggccgctaactgcagcgtgttttttgcgtcgcaccacgggcttagtgcttttgccaccacttttactttacagcatcatcccagaagcagtagcagcagcaacaacaacacccacaaacacacacacaactaacaccaacacaaacaacaatacgattatactggccgttccgttcttcttcttgctgcgaatatttctttgatttcgcgattctccgctaaatcggcgccaatcgagagcgcgtagttgtgcaatttgcagggtaaacgaacgcgatcgcgaatttcaatttttgcaatggcgaaatgcgcgaaaaagtttaatttctctgtttttctacacgagagaagagaaacactattttagagctgggctaacgattcatgaaactatcgatatgccgtagacgatagcgtaggactcactatcgaaacgtgtggcgcaaaattaagcgaacagcattcgcgctatcgacattagtcctcccctaagccagtgtgaccatgaccttactgttcggccttcactcaaagcaaagactttgccgccaatcgttcacatttttgaatatattttaattgacaagcgtaaagatataatgcgatgttgtggttcagtagactcgctcccgcaccttgaacatcaagggttccttggtacgcagaataagttcggcgatcagcacgggtggttccgaggagtcgcccacaaagtcaacctcgtagtgccggagcacattggccacgatggccttgatctccagcatggcgaacttctggccaatgcagttgcgaggtccggccgagaacggaatgtacgcgtacggattcagcttctcggcggtggtgaccacatcgaaccgttccggcttgaagatattgggctcgctaaagagctcctcccgtctgcccaagtagagaggggagatgccgatattcgtgcccgccgggatgagctttccatctgcattggggaaaggcaagttaaaattgagtactttactcctctacgcactgtactcactgatctcgcagtcctcgagaaccttacgacccagcagcggtacagacggatacattcgaagggtctccttcacgcacaggtcgacgtagtgcagctggttcagcagctcatagctcaccggcgtgctcttgtcattgcccaccacggaccggatctcctcaaagcacttcttctgcgcctccgggtgggtggctatgttgtagaagaagaacatcagggccgaagaggtggtgtcgtggccctcgaacatgaaggtgtccacttcctcgcgaatgtccaagttgctcaggggccgttcgtcgacggtcgactgcagaaggatgtccaggaaggccatctttcgcttggcgcccacgtccgcgtcatcattgctgctctcctggctgcttccttcgcggatgagctcctccctgcgctgcacgatgatcttctctgtgaactggtgaagcacgttcagggccttcttctccgccctcgccagtggggtcagcatgtaggtaaggtcgaagcggtacagaatgttgaacatccgcttgtgcagcaccattgatatggtcttcaccgcctggacgtactcggagtctgcattcgactgcgcattgatggaaacacccatggcagtttctggaatagaaaaaggaatgctatcaaagcttttacaaatagatactatggccttactcaggccataccaagagcccattcttcaaagcaccaccatttgctagatgataaaaattaaagacctagatccctaccgcagatcgtgtccatggtgcagagattgatccagtcgtagaggctaaagccggagtcgccgtgcttcaggcgatcctgctccatattccggagcaaatctcgcgaccccttctcgaagacctcaacgaactggtcgaggatcttgaagtggaaggcgggcgtgataattttgcgtcgcttgtgccacttccgaccgcgactgaccagcagaccctcctttagccacggctccagggccttgtattcacccgccttgtcgttgaagcgcaacgtgcccaggacgacctcgacgtccttggggttgcccatgagcacgttcagctcgggtcccagccacaccttgagcacctggtccttggagtaggtctccatgaactcgaaaatcttcttgaccatctcgtgcggcggcttgccgatgaagtggtggccatggccgaccagcggcagcacgggaggacccggcatgtagctgatgaggtcaatcagccgcttgaattttagatggtagagcagcaggcccacgaagagggcgctggccaggattgcgccgatgaccagaaacatgttactactggcctccgtatttctcgtatgctcctcaatcgctattcaccctttgatagtgcaataacaactaatccggccagaagcgggccgtagacatgagaacggccacggatacggccaaacgaactgattatcccacccaccgacgcactgcgaaaaagtgctcccctactatgaattcaactgtttggattccgcagggaggtctcaaactgtgagtgcatactttgactcaacttcacgcaaagatcgcacatgacagtgtgtccgtagaacattttgttcgagtgtagctgtagcttgatgtaaatcgccctgggaatatctaatcgcaatgccgaacgccaggttaccaccgaaatagttcgacaaaccaaatcttatcgaaatcggtagcggtttttatggaggtggatgggattcggaccttggcccaatgctttgaagacgtctccccccagatttctggattaaaataaccccctatttaaagctatgagttattggtcgcttagcgtttgccgcctttaagagatcgacccataagtggaaaaatgttcagcttgaagtgaaaactgggaaacttggggccaatcaatctgctgaatctatccacctctatgtactcaccgcaaatggcgtccagcgcgcagaggtgaatggcctcgcccaggttgattctctcctggcccctgcttatccgcagcgccagttcctcgacgagccgcagtgactgcctgtcgaagatctccacgtatggctccaggatgcgaaagtggaaggccggcgtgatgatcttgcgccggcggtgccacttgcgtccgttgctcaccagcagtccctcgttgagccagcggcccaggaaggagtactcctgcgacttggtcagcagctggctgctgcccagcacccgctctacgtcgcgcggattgaagagcatcacgctgtatgacgggcccaggaacagtccgaaggtgtcgccgtgccgctccgccagctcgcctatcttgaggcacgcctcagccggagtgagccccagaaagatgtgggcgttgccgagcaggggcagaggcagtggacctggtatcgtcctcatgttccgcagaaaccgtcgcatctccagggcgatgatcgccaggagcaggactagcgatagtaggagccacatttcgcttctaccacatctatggagacaatgctatcaactattgcgactctaagctagccgccgaataaacgtcttgtgataacacaagctgctcccaatcagcatctcagcccagtgatggcattctggcgttatcaactggccacatcggagagtactggtgagttcaaaaattccatatatttttagcatagttcatagagattttctacattacttcattacacaacgtggggtagggatctctgggtgttcccatcgttccaactagaagggttcgattctttggacattattcttacacgcagatgtccaatgcttggaccatgcacccgacttgctctcgggaaccttttgggggtcactgtctgactttctgattgtcgattgtccgagtcatccttagcgagcataaaacagagggaagggtcatcgtctctggctgatagattgacattttgggggcgataaggggagtcgttccttgcgatcggaaaagagggcgcattccggcggagattctggccggcgaattgattttgattgagttgatgtgtgcgagaacgagtgtaaacaaaccgtcgcaacggcattccattccgtgtgattccagcgctggttgtttacatcctgaccgctcagctccacctcatccagctccattccccctgacgtcacagtggccacatggcggggctattttgggacaggcgcgctattcttaggccatcccactcacatcccagcgatggcaaacaaacaacgatgacgaagtaaggcgatcttgaaatgtatgttctcagcgaatttcgttgcgatttggattgctggccattgaggccctaacaaaagactgggcatattcattgatgaataaaatagtaaatatataaatataatagtatctatgaggacagcacgatgtcaaaataatatatataaatagttaatggactgtttattggcactgcgctcagttgagtacacttttggaatattagaatccata

SEQ ID NO: 27842 - DNA, 1580 bp, DROSOPHILA
agaagcgaaatgtggctcctactatcgctagtcctgctcctggcgatcatcgccctggagatgcgacggtttctgcggaacatgaggacgataccaggtccactgcctctgcccctgctcggcaacgcccacatctttctggggctcactccggctgaggcgtgcctcaagataggcgagctggcggagcggcacggcgacaccttcggactgttcctgggcccgtcatacagcgtgatgctcttcaatccgcgcgacgtagagcgggtgctgggcagcagccagctgctgaccaagtcgcaggagtactccttcctgggccgctggctcaacgagggactgctggtgagcaacggacgcaagtggcaccgccggcgcaagatcatcacgccggccttccactttcgcatcctggagccatacgtggagatcttcgacaggcagtcactgcggctcgtcgaggaactggcgctgcggataagcaggggccaggagagaatcaacctgggcgaggccattcacctctgcgcgctggacgccatttgcgaaactgccatgggtgtttccatcaatgcgcagtcgaatgcagactccgagtacgtccaggcggtgaagaccatatcaatggtgctgcacaagcggatgttcaacattctgtaccgcttcgaccttacctacatgctgaccccactggcgagggcggagaagaaggccctgaacgtgcttcaccagttcacagagaagatcatcgtgcagcgcagggaggagctcatccgcgaaggaagcagccaggagagcagcaatgatgacgcggacgtgggcgccaagcgaaagatggccttcctggacatccttctgcagtcgaccgtcgacgaacggcccctgagcaacttggacattcgcgaggaagtggacaccttcatgttcgagggccacgacaccacctcttcggccctgatgttcttcttctacaacatagccacccacccggaggcgcagaagaagtgctttgaggagatccggtccgtggtgggcaatgacaagagcacgccggtgagctatgagctgctgaaccagctgcactacgtcgacctgtgcgtgaaggagacccttcgaatgtatccgtctgtaccgctgctgggtcgtaaggttctcgaggactgcgagatcaatggaaagctcatcccggcgggcacgaatatcggcatctcccctctctacttgggcagacgggaggagctctttagcgagcccaatatcttcaagccggaacggttcgatgtggtcaccaccgccgagaagctgaatccgtacgcgtacattccgttctcggccggacctcgcaactgcattggccagaagttcgccatgctggagatcaaggccatcgtggccaatgtgctccggcactacgaggttgactttgtgggcgactcctcggaaccacccgtgctgatcgccgaacttattctgcgtaccaaggaacccttgatgttcaaggtgcgggagcgagtctactgaaccacaacatcgcattatatctttacgcttgtcaattaaaatatattcaaaaatgtgaa

SEQ ID NO: 27843 - protein, 503 aa, DROSOPHILA
MWLLLSLVLLLAIIALEMRRFLRNMRTIPGPLPLPLLGNAHIFLGLTPAEACLKIGELAERHGDTFGLFLGPSYSVMLFNPRDVERVLGSSQLLTKSQEYSFLGRWLNEGLLVSNGRKWHRRRKIITPAFHFRILEPYVEIFDRQSLRLVEELALRISRGQERINLGEAIHLCALDAICETAMGVSINAQSNADSEYVQAVKTISMVLHKRMFNILYRFDLTYMLTPLARAEKKALNVLHQFTEKIIVQRREELIREGSSQESSNDDADVGAKRKMAFLDILLQSTVDERPLSNLDIREEVDTFMFEGHDTTSSALMFFFYNIATHPEAQKKCFEEIRSVVGNDKSTPVSYELLNQLHYVDLCVKETLRMYPSVPLLGRKVLEDCEINGKLIPAGTNIGISPLYLGRREELFSEPNIFKPERFDVVTTAEKLNPYAYIPFSAGPRNCIGQKFAMLEIKAIVANVLRHYEVDFVGDSSEPPVLIAELILRTKEPLMFKVRERVY

SEQ ID NO: 27844 - DNA, 7822 bp, DROSOPHILA
atgcgctgtgatctcgaagacggaatgccttacgttatctggatactttcaagcattgctgataagggagaggggtgaaatccgacgaaccactcacctggcgacgtatcagctccagattctgttggccctcggccatttggcgatcgatctccgcgaagtccctggtgctcctgttggcgcggaatgtgtcgcgtatttttcgggcagcgtacattctgaaatccggaatagattgctcatcactcgcggcggcctttcaatttcacaacacctacctgaagttgtacgagggcagcttctccgattcgcgcaggagattcctgtataacgtgatcgcctggcgacgggtcgacatcctggtcttgatcctggccgaatggaactgaatggcgggcgggctggtggattaaagtgctgtttaattgatgagtgctttgttttgaccctggtttcttgtttcggtgcggcaactgccaattgaccgcctgatgacataaaaattacatgcggaaagccggaaaatactgacttttccgctgcaaaataccagaaacagctgactgcattcactgtggtgtcacgtgcgtgagtcttagagatgacactgcgtcgtgcggaaatcatcgcaactgaataaaaaaactatttttgtgatactaaatattattgcaaaaagtaagaaataaattgagttcatagtgcagaaaaataatttattaagaatccgaaatatttagaggtaaatattaaaataaaaaccaaattaacctgctcccattatacaaaataagacaactgccgcattttttcaattttagttttaattctgtttgttttttccgcaagaacaatatattatgtactcgttgaaaacacaaaataaatatatatattttgttcccgaaattgtttctttcttgcacgcgcgcttgctttttaaatctgacttttgtagcctaaaaatgacatttttagtggttgtaaacgtacacatatatccatatacatatatatatttatttatcagtgttagttttataagtagagtttctttagcttacgtttaggcaataaaataactttatttcccacatctaatctagaattttcctctctaactctctctttacacatgtctatcgctctcgctctttctgctgcagcgtttttgctaagagcgcttgttttacaatcaataaaaaaaaggtttaatatataaagtatgaataggtaaaaaaaaaacacattcgaaataaacctaagacgcgtccgataaaatcgctgattaaagaatatttacatgggtgtgtgctttcgagggtaagccgacatttagctgctaatattgcttatgactatataacgtactcatattagtggggatttggatctttgtgttgttcggggtgtcgctttcgtttcgtcaatcttaatcattttctttagttaaaacgcagaccatgctcaggaattcgctatcactttgggttaatacaaacgcaaaaacagatcgcattgtatcctatcgctcttagctatatacttctatatatatatatatctatatatatatagctgactgaaactaggtgcattacaggctatacacatacatgtagtgattgttatatcaacacataaacaaattacataatcacaaacaacagaattttattttggtggcaggctttcggtgtggttaacgacaattgcgatggctcttcgattccgattcagatcccaggtccgattacctgtggctgctgtacgttttatagacccgcggcgccctcgtcgttcctgtggccgatgtggatgagggtgcggagccagagccgaccgtggtcgagcttgtagcagcatgcgacgcgtccgctcccacggccaagacttgcgccgtcgtttccagattcagaggcagggggttgtcgtgctcatccgagtgctcgtagatgtagtcgcgcttcttaaagttgtcgatgatgcgcttcgtggacttcatatgcgccacaaaggctgcctccaactatacaaatggtggagaacgttaacgagttagaaggttgtgcagtttgatggattaagggtaagatggattaagctatcgatctgaactgaaaatgtatgacatattatgagactcacgctggatgtaaggttcatgaatgtgtggtacttctccagcactccaataatctccttaaagctatttcctcgcagctggcggcgcaccaccgactcgtacaactcgttgtccgctatcagatttcccaccaggatggccgcataacttccctttagcgtgtgctccatgtggtggccggctcgttgcacaactgtcaaaaccgcccggcaattagcataggtcacagatcatcaaaccgctaaatactcacgattgttgactgtctcctccacttcttcttgtttcttctttcccttctcgttgctctcgaggaaggcgtccgtgttcttttccaccaatctgcgggcgtgaaacataatataaagcaatgcgacaatgtgactagaattgttaatgtgtcctacctagccagctcctcgcacttgtagaagtactcaagcagagcttgcagtgcactcacagatccctgcgctggtggattatccgctacgtactctgccggagcggcagcttgcattagagcagcccggttgggcacagtatgcatgcacaaattgattagcagtgtaagaacctggagaggtgggaatcagtgtttgaaattggttacttgtgaagcgaaaagatataaatctcacactcaccagtatgcttagctcaaagacacattggtcgggaatgtagttggccgagagcagcagcaatcggaagctcgtctccaccacatcgcccctttgacctagcagctcggctcccaacgatggctgcgcctcgttgaacgtgtgcgtcaggttgatcagtaccttgagcaccggcaccagcagctcgcgcatagccacacccggatgctccttgttgctgccaccaccatccgaaggatgcagcattatttgtcggctgcaaagacggtacagttggcaaagcgtctccactgcttttccctggccagaggtgagcatgtagcgctggttcgtctcattgtgctgcgtcacgttttcgaggactcgcagacaacgcgccaccgtttgcatgttatccagcagcgtcggctgccagtcaatctccgtgtcgcaggcaatcaccggtctgcagaagtccgagatggtcttgataatgtgctccaggccacccagcttgcgcagatcctctttaaaccactcgcccgcgcgcttggatgttagcgatagcagcgtttccattgccagcgtgcccacagtcagagaatcaacgttgagatgcgttcccttgccctgcgccttgatctcctcgcacaactcgcgcaccttctgcttgttgcggtcgtagcccgctctatccgggtgcccagtctccgtgctgccacccacgccgtccgcctccagaaggttgatcatcagctccaaggagtcgcgatccaggtccatgttgaggccctcctgggaaagaatgtacatgatggccgaggtgcacaggcctaggctgaggtccttgttggcgtcggataatgcctacagttaaatagtcagttaattaacaaagaggttgatacttttcctaaaacttttttttttgttattcactttgcaaataatcaataaactgtactgatttaaagtggaaaacattaccaagttgattaaagtacaactgcaatggtttaatagtttatacaggcttttaatacagaataacaaaataacaacacagctttcaaaacaaactggctattctggggacagctttgccgaaagctgatattttgaatttgataagattcaattgcataatcaaactatgcaaataccaagcgcccaaaggcggtttggagctcaatatatgtaagaattggggatctaacttaccttgaaaaatttggtgaccaccccatgggcacgcacgtgcatccggaaggcgggcatcatacacttggcggctagctgaagggcggagagacaccgtgttgccgggggattgtgcggctgaagtgcgtccaggatgtactcgacgtcgtcgtccatttcctggtactcgccgatctcctgaatttgatgggccgtcttaacgttacgcaccactggatagtagtccttagttttgcggtcgacccgaacggggccgccaccgcccgtcgctccacctccgcctgtcgttgcccctgttccaccagcggaagcaccagctgcactacgctctaggtcaagctctccggcaattggttccaaatccaggtcaaaggcatcggaactagtggaggtggcaggtactccctgttttcccgccagtcgcgagatctttccgagggccgggctatcgccgcgcaacgtggatgcgctgctgcacgcactggaggagccattgttgttcgacgacggactgtcaccgaaatcaccatcggacttgcccgccgctaaatgatgcagatgatccttcgccccagcgacgcccacgccagatgccgaggcattgctggcatcgctgttggttccaccgccattcgcttctagcgcagcatcccaactgtgcttgtacagatgtcgcttggccactgtagcctgttccgcttgatcggatggcaccagagcgcggcttttgaagatgctgcctttcttctttgagatgaccagcttgacagcgccccgctgttcgccagaggactcaggtggcgccgccgctgctgctcctcccgctccggcgttcgccgcgccctgtgtgtccagtgtcaatgttcgcttaaacttatccttaaacttgaaatcgcggggtgggggcgaggaggaggacccatcgtgctgcaacgaggagttgtttgagttgttcgacagttcatccggatcaggatccggatcatggtctggcgaatgttccctgtgatctgtgtgcggaatcttggcgggtgtgggctgctcctcctcagcatcaggagtttcctgctcttcgggcactggctcctgctgtagcacctgcgttacctgctggttctttcgtttccgaccatagcttcgtgccgctccacccgcgactccgccttctgctagtcggctggcctcggccttggctgacaaattggcggctattttattaatgttattgttaacgcttgccaaattattgttattggctcgggcagcagcattgcgacctctcctcggtggaagtgtggcctgttccagctgttcctcgttcgctggcaccgtcgtcatcgccgtttcgtccacttccatgtcgacttcctgctcggcctttctggagccccgggtgccccgcgtgtttcttttgcccgttggtggcgatatggcagccgtggtcgcatctgctcctttggccctacctcgggttctggtctccgtggcgggtggggttacatccacattgttattggcctttctgcccctgccacgcgtggccctcttcggctgttgctgttgatcctcctcctcggttggctccgggtccgtattgccatttagccgtggcacttcccctcgcagcacagccagtatgtcctcctgcagtggtgtctccggcactgcagatgctgctcccgttcccgctccgtcgatggtcatcatcatggactccagtcgtgactcaatgtccgaggggggagccaccagcgaggagtgctgactcgtctctagatcactggtgatcacactagatcccctgctgcgaatcacacaactatcctcctgcacagcctgcgctaacagttgcggcgtgctgttgcccttcgaggagatgctgcccagcaccgaggactgcgagtcgaagtcgtgatcggatcgagtggttggtgatatgaccgcggagcctcgctgcggatgcagctggtgcagttgatgtagatgagatggtgtatgctgtgcttgttgactattggcctcgctgagagccaaatgaggtgagggtgtcttgaattcggagttgatctcggcgggggtggctccagaagctggagcggcaccagatcccgcggcaagcagctgcttgtgcttgtgctttttgctcctcgacttcttttcactgcgggactcggctgctgctgcggctttggcgatggcgttgcggatcacgtccgtcttgatgatcagtttgagccgctccttcggcggtttgtccggggatatctttaccgtgcagtagttgatctccggcggttcctcctcctcgtcctcctcctcttcttcctcctcctcgtcctcgttgggttctagtgactgggacttgcgttcctcgaaagaatcgcctgctgatgctcctccaactgccgcagatgatccatcgacggaatctgctgctgtgggcggcctcagtggcttcactgtgatttttggcgtacttgcaggaactgtttcgtctccggaccgctccgctggctcctcctccgtgaccgaaagttgattcagttggttctggtgagcgggcgagctgctcggcggctcctcgctatccgtgctgaccaaccgcgaagtgccctggaaaacgaaagagtgcccatttagctaggttcttctactgggatccactatttcctacttttggctagctgatctggcaaatgaaaataagcacaactatgtcgcgttcccggtaattagcactccaagtgaaccgaaatgggcaagaaccgacagataaatgcggaacaaaaaacaaaacaccaacaactcgggagagcgactcgactccaattccgttggtttgccatgtaaaagcgcgcgtaatttaacactgcttcgcgcgctgcgctgccttccctttcccacacacagtgagcagggaatggtaggagaaagagagggaaacggagaaaggcgaagcattgttgagcaagagagaggtggccgggcgattaagtgcgaaagagatggcggagcgcgtgtgagagagagggagggcgatcgcatttggggtactcggcaaatagttaggagttggataactttttctctgagtgaaatgtaccgagaaacggagtggtgaaaatcaaaaaagaaggggcacccactagtgtggtggatatattaatttaaattactattaggtaggttactattaggaaatagagagaagtggaagcataatatttaggtctagagtttaaaataattcaaattccaggcaattcaaaactcaccttggagatgcgtagcacgataggaggatgttctggcgtgcgggaggcgctgggaggatttgacgcgctgcctgatgcggagggcagttgggacgaggtggacgcagatgcacttggcgctgacgtaggcgggggtaacgacggctccgatccagggctgccaaacgtggaactgatgaaggcttccgacgaagcggcggcaagtgttgccgtagccgccacttcagccggttggcgccccgctttgggaatgatcagatccttggtgggcgtgggatagcgctcgtcctcgtccacttcgcggtagttgacagccttgcgggcgcgtcccagtacccgcgaaggcggcgcctctggcttcagcttcttctcctccttcggcttcttctgcttctgcttgcccgaggcactggacggttgctccggctgctctgaggcgggatcgcttagcccatcgccatctcgatcggaggcgccgtagaacgcaccaggcgtcgagggcgtggaggctgacgttgttgctgccttctttttcggcgatttgcgcttccgctctg

SEQ ID NO: 27845 - DNA, 5093 bp, DROSOPHILA
gaattggagtcgagtcgctctcccgagttgttggtgttttgttttttgttccgcatttatctgtcggttcttgcccatttcggttcacttggagtgctaattaccgggaacgcgacatagttgtgcttattttcatttgccagatcagctagccaaaaggcacttcgcggttggtcagcacggatagcgaggagccgccgagcagctcgcccgctcaccagaaccaactgaatcaactttcggtcacggaggaggagccagcggagcggtccggagacgaaacagttcctgcaagtacgccaaaaatcacagtgaagccactgaggccgcccacagcagcagattccgtcgatggatcatctgcggcagttggaggagcatcagcaggcgattctttcgaggaacgcaagtcccagtcactagaacccaacgaggacgaggaggaggaagaagaggaggaggacgaggaggaggaaccgccggagatcaactactgcacggtaaagatatccccggacaaaccgccgaaggagcggctcaaactgatcatcaagacggacgtgatccgcaacgccatcgccaaagccgcagcagcagccgagtcccgcagtgaaaagaagtcgaggagcaaaaagcacaagcacaagcagctgcttgccgcgggatctggtgccgctccagcttctggagccacccccgccgagatcaactccgaattcaagacaccctcacctcatttggctctcagcgaggccaatagtcaacaagcacagcatacaccatctcatctacatcaactgcaccagctgcatccgcagcgaggctccgcggtcatatcaccaaccactcgatccgatcacgacttcgactcgcagtcctcggtgctgggcagcatctcctcgaagggcaacagcacgccgcaactgttagcgcaggctgtgcaggaggatagttgtgtgattcgcagcaggggatctagtgtgatcaccagtgatctagagacgagtcagcactcctcgctggtggctcccccctcggacattgagtcacgactggagtccatgatgatgaccatcgacggagcgggaacgggagcagcatctgcagtgccggagacaccactgcaggaggacatactggctgtgctgcgaggggaagtgccacggctaaatggcaatacggacccggagccaaccgaggaggaggatcaacagcaacagccgaagagggccacgcgtggcaggggcagaaaggccaataacaatgtggatgtaaccccacccgccacggagaccagaacccgaggtagggccaaaggagcagatgcgaccacggctgccatatcgccaccaacgggcaaaagaaacacgcggggcacccggggctccagaaaggccgagcaggaagtcgacatggaagtggacgaaacggcgatgacgacggtgccagcgaacgaggaacagctggaacaggccacacttccaccgaggagaggtcgcaatgctgctgcccgagccaataacaataatttggcaagcgttaacaataacattaataaaatagccgccaatttgtcagccaaggccgaggccagccgactagcagaaggcggagtcgcgggtggagcggcacgaagctatggtcggaaacgaaagaaccagcaggtaacgcaggtgctacagcaggagccagtgcccgaagagcaggaaactcctgatgctgaggaggagcagcccacacccgccaagattccgcacacagatcacagggaacattcgccagaccatgatccggatcctgatccggatgaactgtcgaacaactcaaacaactcctcgttgcagcacgatgggtcctcctcctcgcccccaccccgcgatttcaagtttaaggataagtttaagcgaacattgacactggacacacagggcgcggcgaacgccggagcgggaggagcagcagcggcggcgccacctgagtcctctggcgaacagcggggcgctgtcaagctggtcatctcaaagaagaaaggcagcatcttcaaaagccgcgctctggtgccatccgatcaagcggaacaggctacagtggccaagcgacatctgtacaagcacagttgggatgctgcgctagaagcgaatggcggtggaaccaacagcgatgccagcaatgcctcggcatctggcgtgggcgtcgctggggcgaaggatcatctgcatcatttagcggcgggcaagtccgatggtgatttcggtgacagtccgtcgtcgaacaacaatggctcctccagtgcgtgcagcagcgcatccacgttgcgcggcgatagcccggccctcggaaagatctcgcgactggcgggaaaacagggagtacctgccacctccactagttccgatgcctttgacctggatttggaaccaattgccggagagcttgacctagagcgtagtgcagctggtgcttccgctggtggaacaggggcaacgacaggcggaggtggagcgacgggcggtggcggccccgttcgggtcgaccgcaaaactaaggactactatccagtggtgcgtaacgttaagacggcccatcaaattcaggagatcggcgagtaccaggaaatggacgacgacgtcgagtacatcctggacgcacttcagccgcacaatcccccggcaacacggtgtctctccgcccttcagctagccgccaagtgtatgatgcccgccttccggatgcacgtgcgtgcccatggggtggtcaccaaatttttcaaggcattatccgacgccaacaaggacctcagcctaggcctgtgcacctcggccatcatgtacattctttcccaggagggcctcaacatggacctggatcgcgactccttggagctgatgatcaaccttctggaggcggacggcgtgggtggcagcacggagactgggcacccggatagagcgggctacgaccgcaacaagcagaaggtgcgcgagttgtgcgaggagatcaaggcgcagggcaagggaacgcatctcaacgttgattctctgactgtgggcacgctggcaatggaaacgctgctatcgctaacatccaagcgcgcgggcgagtggtttaaagaggatctgcgcaagctgggtggcctggagcacattatcaagaccatctcggacttctgcagaccggtgattgcctgcgacacggagattgactggcagccgacgctgctggataacatgcaaacggtggcgcgttgtctgcgagtcctcgaaaacgtgacgcagcacaatgagacgaaccagcgctacatgctcacctctggccagggaaaagcagtggagacgctttgccaactgtaccgtctttgcagccgacaaataatgctgcatccttcggatggtggtggcagcaacaaggagcatccgggtgtggctatgcgcgagctgctggtgccggtgctcaaggtactgatcaacctgacgcacacgttcaacgaggcgcagccatcgttgggagccgagctgctaggtcaaaggggcgatgtggtggagacgagcttccgattgctgctgctctcggccaactacattcccgaccaatgtgtctttgagctaagcatactggttcttacactgctaatcaatttgtgcatgcatactgtgcccaaccgggctgctctaatgcaagctgccgctccggcagagtacgtagcggataatccaccagcgcagggatctgtgagtgcactgcaagctctgcttgagtacttctacaagtgcgaggagctggctagattggtggaaaagaacacggacgccttcctcgagagcaacgagaagggaaagaagaaacaagaagaagtggaggagacagtcaacaatcttgtgcaacgagccggccaccacatggagcacacgctaaagggaagttatgcggccatcctggtgggaaatctgatagcggacaacgagttgtacgagtcggtggtgcgccgccagctgcgaggaaatagctttaaggagattattggagtgctggagaagtaccacacattcatgaaccttacatccagcttggaggcagcctttgtggcgcatatgaagtccacgaagcgcatcatcgacaactttaagaagcgcgactacatctacgagcactcggatgagcacgacaaccccctgcctctgaatctggaaacgacggcgcaagtcttggccgtgggagcggacgcgtcgcatgctgctacaagctcgaccacggtcggctctggctccgcaccctcatccacatcggccacaggaacgacgagggcgccgcgggtctataaaacgtacagcagccacaggtaatcggacctgggatctgaatcggaatcgaagagccatcgcaattgtcgttaaccacaccgaaagcctgccaccaaaataaaattctgttgtttgtgattatgtaatttgtttatgtgttgatataacaatcactacatgtatgtgtatagcctgtaatgcacctagtttcagtcagctatatatatatagatatatatatatatagaagtatatagctaagagcgataggatacaatgcgatctgtttttgcgtttgtattaacccaaagtgatagcgaattcctgagcatggtctgcgttttaactaaagaaaatgattaagattgacgaaacgaaagcgacaccccgaacaacacaaagatccaaatccccactaatatgagtacgttatatagtcataagcaatattagcagctaaatgtcggcttaccctcgaaagcacacacccatgtaaatattctttaatcagcgattttatcggacgcgtcttaggtttatttcgaatgtgttttttttttacctattcatactttatatattaaaccttttttttattgattgtaaaacaagcgctcttagcaaaaacgctgcagcagaaagagcgagagcgatagacatgtgtaaagagagagttagagaggaaaattctagattagatgtgggaaataaagttattttattgcctaaacgtaagctaaagaaactctacttataaaactaacactgataaataaatatatatatgtatatgga

SEQ ID NO: 27846 - protein, 1090 aa, DROSOPHILA
MTIDGAGTGAASAVPETPLQEDILAVLRGEVPRLNGNTDPEPTEEEDQQQQPKRATRGRGRKANNNVDVTPPATETRTRGRAKGADATTAAISPPTGKRNTRGTRGSRKAEQEVDMEVDETAMTTVPANEEQLEQATLPPRRGRNAAARANNNNLASVNNNINKIAANLSAKAEASRLAEGGVAGGAARSYGRKRKNQQVTQVLQQEPVPEEQETPDAEEEQPTPAKIPHTDHREHSPDHDPDPDPDELSNNSNNSSLQHDGSSSSPPPRDFKFKDKFKRTLTLDTQGAANAGAGGAAAAAPPESSGEQRGAVKLVISKKKGSIFKSRALVPSDQAEQATVAKRHLYKHSWDAALEANGGGTNSDASNASASGVGVAGAKDHLHHLAAGKSDGDFGDSPSSNNNGSSSACSSASTLRGDSPALGKISRLAGKQGVPATSTSSDAFDLDLEPIAGELDLERSAAGASAGGTGATTGGGGATGGGGPVRVDRKTKDYYPVVRNVKTAHQIQEIGEYQEMDDDVEYILDALQPHNPPATRCLSALQLAAKCMMPAFRMHVRAHGVVTKFFKALSDANKDLSLGLCTSAIMYILSQEGLNMDLDRDSLELMINLLEADGVGGSTETGHPDRAGYDRNKQKVRELCEEIKAQGKGTHLNVDSLTVGTLAMETLLSLTSKRAGEWFKEDLRKLGGLEHIIKTISDFCRPVIACDTEIDWQPTLLDNMQTVARCLRVLENVTQHNETNQRYMLTSGQGKAVETLCQLYRLCSRQIMLHPSDGGGSNKEHPGVAMRELLVPVLKVLINLTHTFNEAQPSLGAELLGQRGDVVETSFRLLLLSANYIPDQCVFELSILVLTLLINLCMHTVPNRAALMQAAAPAEYVADNPPAQGSVSALQALLEYFYKCEELARLVEKNTDAFLESNEKGKKKQEEVEETVNNLVQRAGHHMEHTLKGSYAAILVGNLIADNELYESVVRRQLRGNSFKEIIGVLEKYHTFMNLTSSLEAAFVAHMKSTKRIIDNFKKRDYIYEHSDEHDNPLPLNLETTAQVLAVGADASHAATSSTTVGSGSAPSSTSATGTTRAPRVYKTYSSHR

SEQ ID NO: 27847 - DNA, 4219 bp, DROSOPHILA
gtgaatgaggatcctaattaatccctttagtaactgcagtgacacatctgatattcgtttcacaaccggtttatatatgtatgcagatgctgatattgttttcgcgcttatcagctacctgttaacccagtgtttctgtttgtctcgcttgtttacagacaacacgcgttcgcacccgcccccacacacacacatacacaaaagctcgaattttttgacgtaatgaaacaaaacgacaaaaatacagagcaagagagagcgagtgagaataaacatagatctcaataatgattacgagggatgggcactgctattaacccgctaaaagactatattcatatatgcattatacttaaagtatttatattaagtacttaacttaaatatgtaagagatagacagaaggaggtgttataaatactcctgtgaaaattaacaaattgcgtatgtgcagctccagattatataacaattgcaatagtgaatttaatgcctactggtcttaaatatgtacataacatgaaatattgttcgttgcaaaatacaaatacatttttgcacgaaggctaatccaccgtaaccgggtggtgcaaatcctccaggcatatctatccatgcatatacccgtacccgtatccgtatccgaatccgaatctgtatctcttccaatctggccccgagccaaattgctttatgaccgtttctgtgtagggatctatctacctgccggcaataatctgtgtggactcataaagatcttgactccacggaccgtggattgcacttttcaaaccagaccaaatctagaccgtgctgcggtgtgcgtgtgtgcgagtgtgtgtgtgcgtggtccataataaatatgctaatttcgcatgcacgcgcagagtcggaggggctgataacgtcgccatatatagtgatatacctagagcccgagaggtctagtggaaaagttcggtttcctggtgtccctgctatcagtgcgatacggcccgtggtgaggagaagattgcgtccacacccccctcgagtggatgaatgttggtgtgataacgtgataagcatcctagtgctccggggaagtccggcagtctgccattgtgtctaaacaaagagagtcggcttatcgagccgttccataataataataacttcgctttttatgcatcctaacgcttaatataaagtaacgaattttgtatggcccaaaggtattccacagtgtactcatcccattgcccatttcagagacatataacagttgcggcatataacagataaactcgaagccctttccgcaaccatcctccacgatgagattccaacagctcctgcatgtgcgcagattggccagcgccggggccaccaccttgatgaggcggcctatcaccaccaccaccatcaccaccaccagtcgcaccgccctggcagccacctaccccgctttcgcaaccactgtgcgcacaatggcgggcagcggggctccgatcccggagctcacagaggtaggtgttcctgtggcgagttgtccgcagcggagatgcaactgatgcaacccacatttcagatcaccgacaacgtgcagcgcggcaactacgccactctgaccgacaaggatgtggcgcatttcgagcagctcctgggcaagaacttcgtgctcactgaggacctggagggatacaacatctgcttccttaagaggattcgaggtaggttgtgtaaccaaattcattcacattcgtgtgccctttaatgaatttctccgatgaattgcttcaaccaggcaacagcaagttggtgcttaagcccggaagcacggcggaggtggccgccatcctgaagtactgcaacgagcgtcgtttggcggtggtgccgcagggcgggaacacaggtctagtgggcggatccgtgccgatctgcgacgagattgtcctttctctagcgcgcctgaacaaggtgttatccgtggacgaggtcaccggcattgctgtcgtggaggcgggctgcatcctggagaacttcgatcagagggccagagaggtgggcttgacggtgccactggacctgggcgccaaggccagttgccacatcgggggcaatgtgtccacaaacgcgggcggagtgcgggtggtgcgttacggcaatctgcacggctctgttttgggcgtggaggcggtgctggccaccggtcaggtgctggaccttatgtccaacttcaagaaggacaacaccggctaccacatgaagcacttgttcataggatccgagggcactctgggcgtggtcacgaagctttcgatgctctgcccccattcctcgcgagcggtgaacgtggccttcatcggcctgaactccttcgacgatgtgctgaagacttttgtcagtgccaagcgtaatctgggcgagattctaagctcctgcgagctgattgacgagcgggccttgaacaccgccctcgagcagttcaagttcctgaagtgagttgcgccacctttgtcttctctgagcgttaccaatcctgttcacaaacttatttcccatagctcccccatttcgggatttcccttctacatgctcatcgagacctcgggcagcaacggtgaccacgacgaggagaagatcaaccagttcattggggacggtatggagcgtggcgagatccaggatggcaccgtaaccggtgatcccggcaaggtgcaggagatctggaagatccgcgaaatggtgccgctgggtctgatcgagaagagcttctgcttcaagtacgacatctcgctgcctctgcgggacttctacaacattgtggacgtgatgcgagagaggtgcggtcccctggccacagttgtctgcggatacggccatctgggggactctaatctgcacctgaacgtctcctgcgaggagtttaacggcgagatctacaagcgggtcgaacccttcgtctacgagtacacctccaagctgaagggcagcattagtgcggagcacggcattggcttcctgaagaaggactacctgcactactccaaggacccggtggccattggctacatgcgcgagatgaagaagctgctggaccccaacagcatcctcaatccctataaggtgcttaactgaaggcttctacctaatagattctattttttttgtttgtgtgtaattttcataaccttataatacagaaatggcattagaagtgaattttgttaacttgtgaagttaaaaaggaccatcatatttggcacgaaaccaatgggcaaaacttacttataaaatagtccgaaaaaatagtatataccagtttttacagtaccacattataggtactcggaggtaataatagaaaaaacactatctttgcatttactgttacactacgaagcactatatttagtagcagtactcattagagtccactcacaaaattagcaccaaccggcagtaattggtcaaggatcggcgatagcttcaaactccgaagttcaaagtcaaactgccgccctgcgaaagcttcgcgagtggagcttttctgcacttatcgatagctaacattgtggcgcgactatcgatcgacgagctgccgcttaacagtgccatatatagattgtaacattagaagctcaaatcattgttggagcacaaaccacaaagaacacacgaaacatgagcgggtgagtagagggaaattctcttttccccggagttttccgcgatcctaacgtcgcccatttccggatttcttccagacaagcggatattgccctcatcggcctggccgtcatgggccaaaacctgatactcaacatggacgagaagggattcgtggtgtgcgcctacaaccgcacggtggccaaggtcaaggagttcctcgccaatgaggctaaggacaccaaagtgattggagccgactcgctcgaggacatggtctccaagctgaagagcccccggaaggtcatgctgctggtcaagggtgagttgcatatccaaattcagcggctgggtagcgcagagcatcgaaaacccattgaaacctgctgcaagcgatcgctgtgttggtgactcaacttacatgtgtgcgcgcgtgcttgtgaattggtgaaaaagtcgaagcaaagtaatcatgatgacgatttttgcggctcatattccaatgtgcaaaggggaacgagataggataagcaggtggaagtaggaagaggagggagcgcgagaaaac

SEQ ID NO: 27848 - DNA, 1955 bp, DROSOPHILA
gtgaggagaagattgcgtccacacccccctcgagtggatgaatgttggtgtgataacgtgataagcatcctagtgctccggggaagtccggcagtctgccattgtgtctaaacaaagagagtcggcttatcgagccgttccataataataataacttcgctttttatgcatcctaacgcttaatataaaagacatataacagttgcggcatataacagataaactcgaagccctttccgcaaccatcctccacgatgagattccaacagctcctgcatgtgcgcagattggccagcgccggggccaccaccttgatgaggcggcctatcaccaccaccaccatcaccaccaccagtcgcaccgccctggcagccacctaccccgctttcgcaaccactgtgcgcacaatggcgggcagcggggctccgatcccggagctcacagagatcaccgacaacgtgcagcgcggcaactacgccactctgaccgacaaggatgtggcgcatttcgagcagctcctgggcaagaacttcgtgctcactgaggacctggagggatacaacatctgcttccttaagaggattcgaggcaacagcaagttggtgcttaagcccggaagcacggcggaggtggccgccatcctgaagtactgcaacgagcgtcgtttggcggtggtgccgcagggcgggaacacaggtctagtgggcggatccgtgccgatctgcgacgagattgtcctttctctagcgcgcctgaacaaggtgttatccgtggacgaggtcaccggcattgctgtcgtggaggcgggctgcatcctggagaacttcgatcagagggccagagaggtgggcttgacggtgccactggacctgggcgccaaggccagttgccacatcgggggcaatgtgtccacaaacgcgggcggagtgcgggtggtgcgttacggcaatctgcacggctctgttttgggcgtggaggcggtgctggccaccggtcaggtgctggaccttatgtccaacttcaagaaggacaacaccggctaccacatgaagcacttgttcataggatccgagggcactctgggcgtggtcacgaagctttcgatgctctgcccccattcctcgcgagcggtgaacgtggccttcatcggcctgaactccttcgacgatgtgctgaagacttttgtcagtgccaagcgtaatctgggcgagattctaagctcctgcgagctgattgacgagcgggccttgaacaccgccctcgagcagttcaagttcctgaactcccccatttcgggatttcccttctacatgctcatcgagacctcgggcagcaacggtgaccacgacgaggagaagatcaaccagttcattggggacggtatggagcgtggcgagatccaggatggcaccgtaaccggtgatcccggcaaggtgcaggagatctggaagatccgcgaaatggtgccgctgggtctgatcgagaagagcttctgcttcaagtacgacatctcgctgcctctgcgggacttctacaacattgtggacgtgatgcgagagaggtgcggtcccctggccacagttgtctgcggatacggccatctgggggactctaatctgcacctgaacgtctcctgcgaggagtttaacggcgagatctacaagcgggtcgaacccttcgtctacgagtacacctccaagctgaagggcagcattagtgcggagcacggcattggcttcctgaagaaggactacctgcactactccaaggacccggtggccattggctacatgcgcgagatgaagaagctgctggaccccaacagcatcctcaatccctataaggtgcttaactgaaggcttctacctaatagattctattttttttgtttgtgtgtaattttcataaccttataatacagaaatggcattagaagtgaattttgttaacttgtg

SEQ ID NO: 27849 - protein, 533 aa, DROSOPHILA; identical to SEQ ID NO: 7398

SEQ ID NO: 27850 - DNA, 11133 bp, DROSOPHILA
gagagaaaaaaaaagactggtttccatgtcgccatggagtagggtacatacattcgagctcgagtgtgtgagaacccccgtaaaacagcctgcttgcaatcggggggaaagcagtagcggtgggaaaggaatgatcaaaatgcggggcagcacacacacacacagacacgccgataggggtgcgggggaaaggtcgcgctcaaatcaaacatcacctccagtggattcgggcgtgcaaaatgcgcgggagcgagcgaggagggggggggccttgacagcctattgattgatacacaaacgagttctgcaatcgaagaagatgaaacaaatgtgagtgaacgagatgaggctatggccaggccgtacacacagtcacataaactcagagcgagtgcggtgtagcgtaggtgtaaacagagttgtcaactatttatttacaaaaactgttgtgctttaaacgagtctaaaataatttaatcattctggtttattttcttgccacgaacaatttaagtttgtaggtaaaaattagcattcagtgataacggactgtaagaaatataaaagtattcaataaaattgaatcttcgttaaaccggaacacagatttctcagattcgttacagctgacaaccctagactgtttatttcggcagagtaaagcaaaatgtaagcagggttgccgcagcaacaacaaaaactgatacctttcgatatagaacttttgttttctttatgttgctttgttgcgcgagtgagagagggttgcacggagagacggagaaatcaaccaccaccagccgacgcacacacacaaatgcagacacgggcatgcattgcgaaattcgttgttaaaaatgcaacaacaccgcacagcggggggcgtgtgtcggttggatgatgaatggcggagagggcgacggaggggaaactcgttttgggtttcatgaatttattttcttttcttggcccgccagtcgagcgcattttatgatgacagagagcacagaatatccactcgctgcatttttacgagcattatgattaacgtgtcattattatccgaatacgatatagaatcaatatccaatgctcaagagcagattaaaccaaaaattgtaaacaaaaagcacaagtgcaggcagtacaaaagcagtgataaaaataaaaccaaactaaacaaaaaataccttttttgcataaacttcaatgcacgacgatccattattcaaaataaaaacaatatttataataaattataggtatgcatgcgtcggcttaggcgttttgtttttgttttcggcggcggcggagacactcgtggttgtttttgttatagtcggcatggcgctttctttttagtcctcagtttcttctctttttgctatttgccgtattatattgtacattaacaaacacgcacatgtgtgaaggcaataaatataaacatacaacaggcaacaccaaacatatacatatgtatgtaacgtggaacgcaagacaacaaaagtacacaaaacgaatacgaaaatccgacaaaagtcccagtgtctcgtgtgtgtgtgtgtgtgtgtgtgtgcttgcgtgtaaatgagtgtttcgtgcacgggcagtagtaattagtacaacctccactcacagtcactccacttcaacttctccccgctggctgcaggcacttttctttttctcagtgtaacgactaagcacctgtgcacgcgatcttacataaaattaagccacagtcacagcactaagtacttgttttaactgcactgcctacgtcgccagcgacgattcgccagctaggggctccactgtggcgcggcatcactttttatgtctgcacatctgcactagctaatcaacagcaccgttagctctttttgaaaaaaatttaacaaatttgcagggtatccagtgagtatgtcgcgtcggcgggttttttcttcgttcaatacacatgcgatgcggtatgcgacacatacgacaccacaccaacacgaacgcagagagagcagagcgcaagaaccgtacaccgccaagttaagtttcaaactgaaccgcgcgccacagcgacaactctacttttcgttcggatcggaaacaaaatgagcgcatgtgcgctgaatatgtgtgtgtgttggtgtgcagctggatccgcttctctcttctcagatgccgttgcgactaataacttttctctataccgaaatgcacgggtgcgagtgcgacgccactaggagtggccctggccagttagcgcgtgcgagagggatgccgtgcgttcgcttggggttggaatgaaacggcagcagttcgtttgacaaagcaaaaccaaaacgagtaaaaaaaacaggaagactacagctggcgggcatgtgtatgcgtgctcaaccaccccgactgaaagcccccttccgttgctgaaaacataacatggtctggtgactcgactttcaaatacccctttttcatataccattcctcgctaacttcagtcgtatccttaaaatgaaaacccttcttaaatatttatttgtaagttattggtgctgactactaacacaaattccagttaaaaccaagtgcccagtatacccttttactttgtgggtaccgggtatgtacatacataaatacgcgcgaagccagttttatgtgtgtacactcgaatgtctaccgcccggcccgactcgacaacgattgttgctatacttcatcttcttttttcgtgccatcacaaccaccaccactacgactaccttcctacctctacctcctttctcattccttctttttcacatcagatcgggtcggatcggctttaccttattattagttgtgcttgtcagtaacacacgggtgtgtcggttgagaaggggaggatagcgtatgcgcagaggcagagcgaaatcttattctctccaccccattgaacagtggtaagcgatccattattattggattgctttacagttgcagtttgagaaccaagagtacagtgggtcaattttttagaacagcaatttttccaaactttttatacatataaacaatgttacgataagtaaaatgaaaacgtttagtaaaatagaattatataatagacatacgtattgagttgatttattaagttttaagtttattaatgtttcaaatatccaccactcatgacccactgtgcctgtctttgtcatttcatttttcattttgtgccagcccgtgcgtgtgtgcatgcaccatttgtagtatgtgtgcgttgctttgggctcttgttggtcttcttcttactcttcccacctcatccaacaacaacgtcgctgagccccacaaatgttttcattccgattagctttttgttggcttgtctcgtctcgtttccttttcttttttgctgccgccatattatttttaggctttttaagtgcttttgctctctctctctcgctctctgccttgctttggttgttctcattcgatgtgtgtgtatgcttgttttttcggagctttttttctattagttgtgacctcctccttcgccgttatttccctctttcgccttttcctcacaagttcaacacaacaagaagtcgagcatgcgcttttcttcttgccatttataattgccttcaacttattgctccttgtgtttggggcgaatggtactcctagggcatgagcgagagagtcgatatttgcatttcgtaaaaatgacaaatgcctaatgagcgtaaattgctgcgcgtgcttttgtcatattgcctctcactctggcacgttaacgctggccttcctccctctcggtcgcaccctgctgtaataaaaatttaaacgaacctgttgttgtacttgtgtggttgttggtgctggcaattgtcagagctacctacaccatttttgttggcctttccaacgggtgtgcatgcggatgtgataaccaaaagtgggttgttgttgttgtgcttattgcaatcgtaatgaagtcttctaaaggttttgaggcggggccagaaatgaaaatggatcgcaagggatcaccactgaaataaatgggagtataaattcctttccactttgatttttatttgtatttttgttttaggatatcaaattcattttttcatactagtaaaagtaaatgctttattttttcaggtgcaaccttaaaaattcttttcatgatttctaaacactctaaaattccaaattccttatgctcgtgtcatatttcttaccattttacatattgtaaaaagttttataaactattttgcatttcaactgcatggatcaaacacctatttcaggtaagtcgagtcccaaatgctcttctttttccaacagcccatacttcctttaatatcgcctattctccattattaataactcaccctctgcgcattgcacacatttgccattgtcctttccaatctgctaattgacctgccaactctgtgcagcgtaaacaggaagtcctcgagttttgcttgaagttttcagtggatgaaatatcgaggaggtccttcgggtccttaagtggtgactgttcattattatccaaataggaatgctcccaactctagaaatgcattggcgatgtaaatatggtacaagcgttaatttaagattgtttttttttggcaaaaatttatttaagcaacaaatagtctcgctggaaagaacttaagaacttaagttaacaactttcaaatttcatccgagttattgtgcaccttttaaaataacaataaaaagttataaaagaaacgttctaatctttagtaagccattactcaaattcaaagcaaataaaccctactttcactcaataccccaacatataaaaccctttcgaaactgtaccaaggccggatccttaaaaaacaggaaactgcgataaagggttgattcctgtgacacttgcgacctttggaaccaacccacccctttccaccattttccgtggcctgtacaaaccgatttcccaaacaaacattatacaattaccctcaaaaggggatccattctgatgtcccaaggggtgtacacgtaatcccacccctaagatcattaggggtgtgaacgagcgtaggaattgaaaatggcagggggagccaaataggactatttgccgtttcaattgtcttctaatcatgtcctctttatgtattctattaaaccgcaataactccattttcaaaatatgcctatatttttgtcaccgtctgtaaatttgcaaacgattttcaaacagagatgtgtggttgcgcttgccattgttttaattgcaatatatataatgcagcacttggcgttattttataatttccatgcgtgggtagagtccgttttacttggcagaagttctaaatttaatggatccacaccttgatactcagaagtattgaagaaaaatcctaagaaactgtcataataactgaactaaattactggttttaggaaaattttactggtaaggaaaatgaaagtgtttactaatcctaaacagaacaatagacatttaacttaatacctttcggtatggagacacacaaattaatcaaaacatacccaacatgagatacaaaattaaatattgaactccatgattgtaagctataaattttaagttattagcaatcgttattgggactttatcgatacccaagaagcaattattggagtcaactcacgagttgcgaaacaggtacaagtgtatgagaatgttatcttctccatttttctttgggtacaataacaaagttgattgaattgtagaagtcgctgctaattggcagtacaaaatgccgacggaagatcgaagcgaataaaaaatgggcgcaccaccggaaaaggttttttatggggtgcaaaagagatagcaccattgtgccgcctgcggagaagaataggacagagacaagctaaatgtttagtggttcagtgggcgtggctaacgcatgtgtggtgaattaaagtggctgtataacagttgttatgcgaggtgatatccgtactggttttgattacaagtttgcaattttaggaataaacggtataaaaatatgtattaaatatgcttaaatttaaaactaattctagcggtttatataatctctttatataaaagatgttaagactttcatttctacacagtgaatttgcaatgcagctagctatattttgaaaagcaactaaggcataaataaaacacagaagtaataataatagtaaatggtaattgttgataacaaattccaataggtaaacagagatttatcaatttgatttcccaaagcattaagattttgtttgcggttattagaagtaattgaattatagaaaaaacatcccaaaaaacaaaaaattttgtattagtatattgtgttatttcccgttcacgaatccataaagaagtggtaaacagaaacagtaaaacacaaatcgatccccaatatgaactgttgaaatttctacaacgccgctgtggtgtgctcactcactcgctttcgctctgaaagctcagttcgctctctctcctggggagctttcgctccgtgatcattttgaattctttgatggaggggggggggggggtgtttggcgcctatcgtatctcttaactaacgctaatctgcccctgttttgcgtttcgaattttagttgcggtttgttgtgattccgggttggacgctgctctgaaggacatcactgacttatggatgaaaggagtagccggacctcgacgtgacccccatccatccgtacataaacattgtaagttcagttggtgttccgatcaacatgcttttgagtgcttctgcgttagtttctctttcggtttttcaattttccattgagagattctggcgcgtgaggctctcccattcccggttacttgtcgtgtgttagtgaatgaggatcctaattaatccctttagtaactgcagtgacacatctgatattcgtttcacaaccggtttatatatgtatgcagatgctgatattgttttcgcgcttatcagctacctgttaacccagtgtttctgtttgtctcgcttgtttacagacaacacgcgttcgcacccgcccccacacacacacatacacaaaagctcgaattttttgacgtaatgaaacaaaacgacaaaaatacagagcaagagagagcgagtgagaataaacatagatctcaataatgattacgagggatgggcactgctattaacccgctaaaagactatattcatatatgcattatacttaaagtatttatattaagtacttaacttaaatatgtaagagatagacagaaggaggtgttataaatactcctgtgaaaattaacaaattgcgtatgtgcagctccagattatataacaattgcaatagtgaatttaatgcctactggtcttaaatatgtacataacatgaaatattgttcgttgcaaaatacaaatacatttttgcacgaaggctaatccaccgtaaccgggtggtgcaaatcctccaggcatatctatccatgcatatacccgtacccgtatccgtatccgaatccgaatctgtatctcttccaatctggccccgagccaaattgctttatgaccgtttctgtgtagggatctatctacctgccggcaataatctgtgtggactcataaagatcttgactccacggaccgtggattgcacttttcaaaccagaccaaatctagaccgtgctgcggtgtgcgtgtgtgcgagtgtgtgtgtgcgtggtccataataaatatgctaatttcgcatgcacgcgcagagtcggaggggctgataacgtcgccatatatagtgatatacctagagcccgagaggtctagtggaaaagttcggtttcctggtgtccctgctatcagtgcgatacggcccgtggtgaggagaagattgcgtccacacccccctcgagtggatgaatgttggtgtgataacgtgataagcatcctagtgctccggggaagtccggcagtctgccattgtgtctaaacaaagagagtcggcttatcgagccgttccataataataataacttcgctttttatgcatcctaacgcttaatataaagtaacgaattttgtatggcccaaaggtattccacagtgtactcatcccattgcccatttcagagacatataacagttgcggcatataacagataaactcgaagccctttccgcaaccatcctccacgatgagattccaacagctcctgcatgtgcgcagattggccagcgccggggccaccaccttgatgaggcggcctatcaccaccaccaccatcaccaccaccagtcgcaccgccctggcagccacctaccccgctttcgcaaccactgtgcgcacaatggcgggcagcggggctccgatcccggagctcacagaggtaggtgttcctgtggcgagttgtccgcagcggagatgcaactgatgcaacccacatttcagatcaccgacaacgtgcagcgcggcaactacgccactctgaccgacaaggatgtggcgcatttcgagcagctcctgggcaagaacttcgtgctcactgaggacctggagggatacaacatctgcttccttaagaggattcgaggtaggttgtgtaaccaaattcattcacattcgtgtgccctttaatgaatttctccgatgaattgcttcaaccaggcaacagcaagttggtgcttaagcccggaagcacggcggaggtggccgccatcctgaagtactgcaacgagcgtcgtttggcggtggtgccgcagggcgggaacacaggtctagtgggcggatccgtgccgatctgcgacgagattgtcctttctctagcgcgcctgaacaaggtgttatccgtggacgaggtcaccggcattgctgtcgtggaggcgggctgcatcctggagaacttcgatcagagggccagagaggtgggcttgacggtgccactggacctgggcgccaaggccagttgccacatcgggggcaatgtgtccacaaacgcgggcggagtgcgggtggtgcgttacggcaatctgcacggctctgttttgggcgtggaggcggtgctggccaccggtcaggtgctggaccttatgtccaacttcaagaaggacaacaccggctaccacatgaagcacttgttcataggatccgagggcactctgggcgtggtcacgaagctttcgatgctctgcccccattcctcgcgagcggtgaacgtggccttcatcggcctgaactccttcgacgatgtgctgaagacttttgtcagtgccaagcgtaatctgggcgagattctaagctcctgcgagctgattgacgagcgggccttgaacaccgccctcgagcagttcaagttcctgaagtgagttgcgccacctttgtcttctctgagcgttaccaatcctgttcacaaacttatttcccatagctcccccatttcgggatttcccttctacatgctcatcgagacctcgggcagcaacggtgaccacgacgaggagaagatcaaccagttcattggggacggtatggagcgtggcgagatccaggatggcaccgtaaccggtgatcccggcaaggtgcaggagatctggaagatccgcgaaatggtgccgctgggtctgatcgagaagagcttctgcttcaagtacgacatctcgctgcctctgcgggacttctacaacattgtggacgtgatgcgagagaggtgcggtcccctggccacagttgtctgcggatacggccatctgggggactctaatctgcacctgaacgtctcctgcgaggagtttaacggcgagatctacaagcgggtcgaacccttcgtctacgagtacacctccaagctgaagggcagcattagtgcggagcacggcattggcttcctgaagaaggactacctgcactactccaaggacccggtggccattggctacatgcgcgagatgaagaagctgctggaccccaacagcatcctcaatccctataaggtgcttaactgaaggcttctacctaatagattctattttttttgtttgtgtgtaattttcataaccttataatacagaaatggcattagaagtgaattttgttaacttgtgaagttaaaaaggaccatcatatttggcacgaaaccaatgggcaaaacttacttataaaatagtccgaaaaaatagtatataccagtttttacagtaccacattataggtactcggaggtaataatagaaaaaacactatctttgcatttactgttacactacgaagcactatatttagtagcagtactcattagagtccactcacaaaattagcaccaaccggcagtaattggtcaaggatcggcgatagcttcaaactccgaagttcaaagtcaaactgccgccctgcgaaagcttcgcgagtggagcttttctgcacttatcgatagctaacattgtggcgcgactatcgatcgacgagctgccgcttaacagtgccatatatagattgtaacattagaagctcaaatcattgttggagcacaaaccacaaagaacacacgaaacatgagcgggtgagtagagggaaattctcttttccccggagttttccgcgatcctaacgtcgcccatttccggatttcttccagacaagcggatattgccctcatcggcctggccgtcatgggccaaaacctgatactcaacatggacgagaagggattcgtggtgtgcgcctacaaccgcacggtggccaaggtcaaggagttcctcgccaatgaggctaaggacaccaaagtgattggagccgactcgctcgaggacatggtctccaagctgaagagcccccggaaggtcatgctgctggtcaagggtgagttgcatatccaaattcagcggctgggtagcgcagagcatcgaaaacccattgaaacctgctgcaagcgatcgctgtgttggtgactcaacttacatgtgtgcgcgcgtgcttgtgaattggtgaaaaagtcgaagcaaagtaatcatgatgacgatttttgcggctcatattccaatgtgcaaaggggaacgagataggataagcaggtggaagtaggaagaggagggagcgcgagaaaac

SEQ ID NO: 27851 - DNA, 2294 bp, DROSOPHILA
agagcacagaatatccactcgctgcatttttacgagcattatgattaacgtgtcattattatccgaatacgatatagaatcaatatccaatgctcaagagcagattaaaccaaaaattgtaaacaaaaagcacaagtgcaggcagtacaaaagcagtgataaaaataaaaccaaactaaacaaaaaataccttttttgcataaacttcaatgcacgacgatccattattcaaaataaaaacaatatttataataaattataggtgcaaccttaaaaattcttttcatgatttctaaacactctaaaattccaaattccttatgctcgtgtcatatttcttaccattttacatattgtaaaaagttttataaactattttgcatttcaactgcatggatcaaacacctatttcagttgcggtttgttgtgattccgggttggacgctgctctgaaggacatcactgacttatggatgaaaggagtagccggacctcgacgtgacccccatccatccgtacataaacattagacatataacagttgcggcatataacagataaactcgaagccctttccgcaaccatcctccacgatgagattccaacagctcctgcatgtgcgcagattggccagcgccggggccaccaccttgatgaggcggcctatcaccaccaccaccatcaccaccaccagtcgcaccgccctggcagccacctaccccgctttcgcaaccactgtgcgcacaatggcgggcagcggggctccgatcccggagctcacagagatcaccgacaacgtgcagcgcggcaactacgccactctgaccgacaaggatgtggcgcatttcgagcagctcctgggcaagaacttcgtgctcactgaggacctggagggatacaacatctgcttccttaagaggattcgaggcaacagcaagttggtgcttaagcccggaagcacggcggaggtggccgccatcctgaagtactgcaacgagcgtcgtttggcggtggtgccgcagggcgggaacacaggtctagtgggcggatccgtgccgatctgcgacgagattgtcctttctctagcgcgcctgaacaaggtgttatccgtggacgaggtcaccggcattgctgtcgtggaggcgggctgcatcctggagaacttcgatcagagggccagagaggtgggcttgacggtgccactggacctgggcgccaaggccagttgccacatcgggggcaatgtgtccacaaacgcgggcggagtgcgggtggtgcgttacggcaatctgcacggctctgttttgggcgtggaggcggtgctggccaccggtcaggtgctggaccttatgtccaacttcaagaaggacaacaccggctaccacatgaagcacttgttcataggatccgagggcactctgggcgtggtcacgaagctttcgatgctctgcccccattcctcgcgagcggtgaacgtggccttcatcggcctgaactccttcgacgatgtgctgaagacttttgtcagtgccaagcgtaatctgggcgagattctaagctcctgcgagctgattgacgagcgggccttgaacaccgccctcgagcagttcaagttcctgaactcccccatttcgggatttcccttctacatgctcatcgagacctcgggcagcaacggtgaccacgacgaggagaagatcaaccagttcattggggacggtatggagcgtggcgagatccaggatggcaccgtaaccggtgatcccggcaaggtgcaggagatctggaagatccgcgaaatggtgccgctgggtctgatcgagaagagcttctgcttcaagtacgacatctcgctgcctctgcgggacttctacaacattgtggacgtgatgcgagagaggtgcggtcccctggccacagttgtctgcggatacggccatctgggggactctaatctgcacctgaacgtctcctgcgaggagtttaacggcgagatctacaagcgggtcgaacccttcgtctacgagtacacctccaagctgaagggcagcattagtgcggagcacggcattggcttcctgaagaaggactacctgcactactccaaggacccggtggccattggctacatgcgcgagatgaagaagctgctggaccccaacagcatcctcaatccctataaggtgcttaactgaaggcttctacctaatagattctattttttttgtttgtgtgtaattttcataaccttataatacagaaatggcattagaagtgaattttgttaacttgtg

SEQ ID NO: 27852 - protein, 533 aa, DROSOPHILA; identical to SEQ ID NO: 7398

SEQ ID NO: 27853 - DNA, 5514 bp, DROSOPHILA
ctcaccgccgagctgatgcggatgaagggtgctgtggatatgctcattgggatttcaatggacaatagcgaggtagcccataagcccacctatgtggagacaaagacacctaagatgcatccctccgtggcggcgcaaaattatgtggtcttagttgagtgacccaggccgacgtagaacaacgatatagccacatagctttgatattaagtatataagtagtagtagtttaagtataaagcagtttcaatacccattacgcatgtatatatctttctttattaaatacatacttaaaatgaacgtttcgtcgtgcatgccaatttcagttttgaaatgtacaatgaaattttgtctgccgttttacgcataataaaaaaaaaaaaacaatgttaatggggcagcaaaacagctgcccgcgaaaacgaacttttttttaatataatgggtaatttacttgcaaatatttacgattttcgttctccaactactcgatttaggtttcatttttaattcttttttatagttagatttacgttattttacgattatttggaaagacgaatttacacttagaatttgctcatcttcgacgcatcgttctgtattattctgcttaagctaaactctcgcactaatattaatatatatctttatatttatgtataattataattatatgtatgtatagatatatatatctattccgatcgacatcgcgtcaacttttcccaacatgccgttccttgtgttgcttgcttaccagttaaagggaaagggaaaaatttaagataccacggatttgttaaacttaaataagaatacatttcgacttaactaatttacaatttaggggtgtgtgtaaagtgtatggggattgtggttgctgttttcaaggttcaaagccactacatttacaatttaaattaaaagtatactcatatacataacagatatagacatagacattttacactcttcggctgctcattttttttttgacacttttacaccaatatatgcagctccagtttccaagactctgtacagattacacggcttcaggccactacgcactacagaaaagacgagtggggcatttacatacatatgaatgcaacggagcaattaaacatacatcgacgcagcaagcaatgtaattgtgtgggccatcttcttaaaaatgggcgcttcgtccatattggtcctgaccagatcagacatcagacatatcagatcaagccggcagtgagtgcgggatgtgtgcttggcggatgtggacaggctaattttggcggtgtgaggagtggtgttgattggtgtaggctggcatgcgttactctaggaaggatgtgcatcagtggactctcttgttttagccatcttccttgggcggggtgaaccatcctgcaataagaagtttccgtgtcaatcgttgctcatcttacgttgcatttctgggcttaccattcttttcgtgaatctgcaccagagatttgaagctctgctgggctcgagccaaactgtattggccctgggtcagtgcctgtttatagaaggttgttaagagtattaaataaaaaggtcgtccattttgtcgactcgaattctatgaatttaacatactttggtagccccgaattggatgcgcgcctttcccttgacgagagtggctgcaatttgcatgataaccgcttccacggtatatgccgagctccagccctgtttggtcagcaattccatgcagatggcaccaccgatgagcacatagccgccttgtaaacacaagaatcatttaaataaacctccatgatttacttatactcagcaaatcccacctgagataatcggatggacaacgcgcacaaatggcggctcgaagggatacgtctccttgaacaggatgttgagcagtatgctgtccttgccctccttctccttgagcatttgcagatcactgtgcagcggactgtccgggtcgacagacttgaggcgaatgttccattcgtaaatcgactcattgacgagctcaatagaatacatgttctttttgaaggcgtctgagcgataaatgtcgcgtaattccttcattaagcgatcggttgcctgcacggaacccgaaacggaaccctaatgtcgagtaaaacttaagatatagcctttaacgcaaagtatcggtgtactcacttttagatagtcttgtctctgactttgacgcagtttttctagagtcgctaggtgttccacttccatgtcgtccttctgcatttcacggatatcaaaacgatttaagaataattgattgacatcttcgcccagaaattatatataaataactacaaagttacacctaactctctccaaaccaacaaataatttaattgcagacaattttacacctaaagctcaccttgcttgtactgcgtacatcatccatttccagcggcaagtcctcatcgccctcgctctcctgttcgctctcgccgatgggatcctcgatctcctcctgatccgaatcggtctcctcgttgccgtggggtccgccaccgccccccgctccaccaccacctggtctctgctcgcagcgaaggggggaagcggatggcggcggcgtttgcagcggcagagccaaattatcgatgtcgggtggcagtggaacgttgtgaaggcggcacagctcacgcagcagtatgcccacctgcaaggatttggtttgggattgtcagttcacaggcaatagatttcgaaacctgccataagtactcacctgattgatcacgtgattatcacgtccattcgtattgctaagtatttgaacagcatttgtgacgctcgtctcctcgctttcggcgaaccaaactggcggcgatgagggatacgtttcctgcaggagagaaacaggcatatagcattagcatatcgtaaatatacatatgtgcacctttttgaaacaatcttaatagagctggtgaatcttaaaaagccatagttttcctactgaaattcctatgttatacgttcctacgtttcaaccaagttcattggttttctattaacagcgggctcgattaaatgtttgacttggcgtaaatcttatcgggaatccactgtacttttagccaatggggtgggcccaacccatcgcgtgtgtggggttggtcaaggactttgactcgccaagaagacctctcctattcccattcccatttccagtctcgaacttgtttcttttgttttaggttctctggagaattgtcgtcgccgacgtattcactttgcatgcacatgtaaataaacaaatactaaacaacggagatccaaaggcgccagaatgtatgaaattataacctttaattagatcgttgaaccaagcggggatcagtgcacagtcagtgaagacagaaaacagatggaacagctcggcagccgatgatcggggtacaatgaatcacacctcgtcgagggtgtcactccgtactgcaaagtgcaggagcccgcttttatatgaatcgatgtgcgattgcttttgacaatttcagcaaaaattaaatgttaagttgcgaaatatatacatatctacacatgtatacatctcccattgtaattatcccatgacggaaatcttcaaaatcagtctatgttggtcagaaccagaagagtagaaagagagggaacctgagagagtggccaaagggcatcgactacctcgattacatacaaacgtaacatatatatacgtacgaatattccatcttaactgagcagcgtgggaataaagaatcggcacaaatcctcgcctatataatcacgcataagcgggaaagagagagagagggcgaaccgataaagaaaagtcgaaaaagtagattcaacaaggagacaaggatggcactattggaaagaagaaagcaaaaatttgggcataaaaaaatcactatagtactggaccaaaaagaagacggacttgcgtgaaatattagcagaagaatagtaagagattttcacatacgaaaagggaactagggattcgattaagtttagcggataaaaaaagctttgaacacatgctaactggctaaaaatagaattctacactatcgccgtataaataaagttatcgtcgcggtgcgcaaagtgaaaagttgcagagtacaagcggagtaaagtaacctccagagcccgtaatcccctccagcaccaggctccaaatcatttgcaaacacggcgcattcatagtcgcccttcttcagttgcaatgctcctatgtattgattactgaagacgataagacagatgcacagagaaataaaaaccattcgctttaactacgaatttgtttactctttttgctaaagttatacttccgagaatgtggattttatgggaaaaactttagcaattcactggcccgaatcactttacatccccttaacttcactgtcactgtatttttagccataaaacttccccaaattaccaaatagaagatttaagtttagacttatatggttgatcatcggtgacttaccgttatgttggcgtgaatatcgtaccgctttccattcttatcgataaaacggcagagcagttcgtcgacgctggaattgaggatctgaaagcgctcgtggttcttcgggaagatcttctctagcgttttgatttcctgcttcagggtgttaaggcacgccatcttgtggcgggcttaaaaggcaactggtctggtctgtgttttttcgtgcttatgattatttcgtggtccaagtggagttttgtggttcctggggtttcagggagctagctccccctctcttgagctctacctttgcgacttccaggcgtagaaagctggtatgggattaaatgttttttttttttttgtccgtcagctgcttttatctgcccactccagatgaccctttttagtttttaagttgttcttcagggcgtctttatgtgaatattatgtttactcatttagttattgagctttttattagaatgaggattttgctcgtgtttggaggtagattgaaagggcaatttttggagtcgactggttgttctttgttgttttcgctggctctcttctcgctcttctttttccactccacttccagtcaacttcactctcactgcttcttcttctacagctcctgcggcgcccagcatgcgctgtcttgctcgcactctgcttattttatgttcagatttgcactttgattttcccgacttactatcgttttcttatactgttgatgcgtttgtttgtttgttggtttgtgctgggcattaaagctgtaattggagttttaaacacgtgtttcacttagcttgatattaatttttgtattattattatttttgttgctgcttctaacgcttactagccaaaacaaaaacaacaatcggcagttggcttacacaaacacacccggacgcacacaagagcagcagacaagacctgacacacacttgtaccaatctctagcgccatctcactcgcacagcaggtct

SEQ ID NO: 27854 - DNA, 1444 bp, DROSOPHILA
atcaaccatataagtctaaacttaaatcttctatttggaaacgtatccctcatcgccgccagtttggttcgccgaaagcgaggagacgagcgtcacaaatgctgttcaaatacttagcaatacgaatggacgtgataatcacgtgatcaatcaggtgggcatactgctgcgtgagctgtgccgccttcacaacgttccactgccacccgacatcgataatttggctctgccgctgcaaacgccgccgccatccgcttccccccttcgctgcgagcagagaccaggtggtggtggagcggggggcggtggcggaccccacggcaacgaggagaccgattcggatcaggaggagatcgaggatcccatcggcgagagcgaacaggagagcgagggcgatgaggacttgccgctggaaatggatgatgtacgcagtacaagcaagaaggacgacatggaagtggaacacctagcgactctagaaaaactgcgtcaaagtcagagacaagactatctaaaaggttccgtttcgggttccgtgcaggcaaccgatcgcttaatgaaggaattacgcgacatttatcgctcagacgccttcaaaaagaacatgtattctattgagctcgtcaatgagtcgatttacgaatggaacattcgcctcaagtctgtcgacccggacagtccgctgcacagtgatctgcaaatgctcaaggagaaggagggcaaggacagcatactgctcaacatcctgttcaaggagacgtatcccttcgagccgccatttgtgcgcgttgtccatccgattatctcaggcggctatgtgctcatcggtggtgccatctgcatggaattgctgaccaaacagggctggagctcggcatataccgtggaagcggttatcatgcaaattgcagccactctcgtcaagggaaaggcgcgcatccaattcggggctaccaaagcactgacccagggccaatacagtttggctcgagcccagcagagcttcaaatctctggtgcagattcacgaaaagaatggatggttcaccccgcccaaggaagatggctaaaacaagagagtccactgatgcacatccttcctagagtaacgcatgccagcctacaccaatcaacaccactcctcacaccgccaaaattagcctgtccacatccgccaagcacacatcccgcactcactgccggcttgatctgatatgtctgatgtctgatctggtcaggaccaatatggacgaagcgcccatttttaagaagatggcccacacaattacattgcttgctgcgtcgatgtatgtttaattgctccgttgcattcatatgtatgtaaatgccccactcgtcttttctgtagtgcgtagtggcctgaagccgtgtaatctgtacagagtcttggaaactggagctgcatatattggtgtaaaagtgtc

SEQ ID NO: 27855 - protein, 217 aa, DROSOPHILA
MDDVRSTSKKDDMEVEHLATLEKLRQSQRQDYLKGSVSGSVQATDRLMKELRDIYRSDAFKKNMYSIELVNESIYEWNIRLKSVDPDSPLHSDLQMLKEKEGKDSILLNILFKETYPFEPPFVRVVHPIISGGYVLIGGAICMELLTKQGWSSAYTVEAVIMQIAATLVKGKARIQFGATKALTQGQYSLARAQQSFKSLVQIHEKNGWFTPPKEDG

SEQ ID NO: 27856 - DNA, 3625 bp, DROSOPHILA
tcataagtataagctccgagaaatggtgactgtttatgatgctgtcacgttcgtcgttgtttttcttgtaggttgattattaattaatgatgcttcgtatgcgtttttcttttgggccaaggggagaaatttggaaaaatctgcgtaatttgtgtgtgggtgcccgttgtccgaaggaaaattatttttggaccaaataagccaaaagaaaaatcttacaggaaactaatttaatcgatattatgacgaaatcataaaaaaaaatgttataaatgccggcccctctgattaaagcagttaattgataaggcgtggtgacttgcgctctaatgttcccagaactcgtgaacaatttcaaacactgtgaaagatgaaaatatttcattgttgggaccaaacaaaaacgtttcgttacatttaaacatttacatgcgtttttctaattaatttaatatattttaactgagatatttgcaatagaattgagtgttcattactaacgtttcccattaggggctcaggaggaaagtttccagcagacgaattggctgacatcgaagacgaatgactaaaggcagagaaagcagctggaagaagtgcggaggccctaggagagtttcttataaagaaatttggggacgtacaaggagaaacttttccgaaacaatcaatcaaaatgattcgcttgaaatacactgaacagagtcagttttttgaaaaaccatgccattgacattaaagtggtaaaaacgatggtaaatggtacaaattatatataaaatataatctgatcaagaatatacatataaacttgacaacatgagcaaaacttttgcttcacaagaagacataaatttaccagaagaatgtattccgtactcataaataataatatatatatatgtctacatttatgcgataaggctaagattcttatttcatctcaacaataagagcgctgaacattctgctttcagtttatttcttaacgtagacttgaatggattcaatgtacggaattattgcaatagtgtcgctcatcctggtcgctggtcaagtccaggcacagggccagaacgcggaacttaatcaaagttgcggtgcatcaaatgagcaccaatgcgtcccgcgtcatatgtgcaaggtcaaaattgagtttcgaatggcaatgacataccgcaacctaggatgtgtttcaactgcgatttgctgccccaagaacctaatagtaagcattacaatttattgagacaaaaagaatggagttcttataagtttttttttttaaatctacggctaattacacccgttacttgttgagttaatgagtatactagattcgttgaaaattatgtaataaggaagttagtgttcctgatcaaggacttgtattccttataatctgactctaaagtgtaattccatctaattttgaatttattatatcatttattccagatcaaggagcctagacttatcattaatgaaccgataactgatccccagtgcggatttgtcaactcgaaaggtgtgaccttctcatttagagaggaggatacgggcttggcccaggaggcggaggtaccatggatggtggccttgctggatgccagaaccagcagctatgtggccggtggcgccctcatcgctccacatgtagtgatcacggccaggcaaagaaccgaaaacatgaccgcaagccagcttgttgtgcgagctggcgaatgggacttcagcaccaaaaccgagcagcttccttctgtggacgttcctattcggtcaattgtccgtcatcctggcttcaatttagagaatggggccaataatgtggcccttgtgtttcttcgcagatcgctcaccagctcgcgccacataaatccaatatgtatgccgtcggctccaaagaattttgactttagccggtgcatatttacgggctggggaaagaattcctttgacgatccctcctatatgaatgtcctgaaaaaaatatcattgccggtggtccaaaggcgtacctgtgagcagcaacttcgcctctattacggaaacgattttgaactggacaacagcttaatgtgcgcaggcggtgagcctggaaaagattcgtgcgagggtgacggtggatccccgctagcctgcgcgataaaagacaatccgcagcgctacgaactggctggcattgtgaacttcggcgttgactgcgggttgcctggcgttccggctgtttatacaaatgtggctaacgtaattgaatggattactttgacaactgtcaacatgccgctgcctgaagagcgcgaggaggttccttacgcaagtccaacactttctgcaggcccgtatcttaaccagtggaatcaaccgaactatgaatggcttccgacaggctatccaaatgttaattccattccatggcagctccaagaagctaataatgatcttgccaatagtcagtacgttcgttattaccctgttgaaaacgttgggatcaacatacattctgctggtcatggaaatgatcaacaaattgttaggcccattcagcaggacataccgaaagactcagatgatttatttaatagtgtattttcaaccacaatggaatacaatttcgacgcttaaattcgttgtcaattgtgtaaaaattgttgatttattaaagaaaatgaacggccgagattttattctctgcatcttttcaattgattttgttatcgactgttcactgtgtattattaacccatcgtggaccgtgcaaattacccggatagcaggggacttcattgacacgcagtggacacagtggagtgccacaaagagagacagaccgcaaggaccgcagaatggggatgtcctcggtggcgtgggcgtggccggcagttagtccttttgccaggagcggagcttcccgtcccgtgacactgctgggcacgcacacgcagcagctgcgggcaccatcaaaaacttgggcttgtggcgggcgcactttaatttcaatttggcgccgacccctcgcagattcaccaccgccagtaccaccaccatcgcaatcagactggccccacggcaatttattgttttccactttacgccagtgtcccactggagacggtgtcctgtctccgcgtgttattgttttgttgtgttttttagtgccgtcctcaaatttgagagttggggggccgccgccattcccttgagcttttgagagattgagccacttgtcaattgtagtaggcacatccaatgaacaggaagtttggggatggtacagtgaaaacaaaaatcggcacacaatttcttcattaccatatcacgtataagtcgtctttacaagctgtgccattgatttcaaaatacaattgtttgaattatgtgtatatttatagacattacatttcccaattgttacgataaatgaattcaaatcttaaagaccttctgggcacgcaaaaaagcattatccagttcgtggtattcaaatacccttcaacgcttggacgttgtaggggaggaatcggagattttcacttaccatgacagcattgcgcttgaaatccataaagttcttcacctcggcagccaattcacgcaggaggataataccatccttgcgcttcac

SEQ ID NO: 27857 - DNA, 1395 bp, DROSOPHILA
atggattcaatgtacggaattattgcaatagtgtcgctcatcctggtcgctggtcaagtccaggcacagggccagaacgcggaacttaatcaaagttgcggtgcatcaaatgagcaccaatgcgtcccgcgtcatatgtgcaaggtcaaaattgagtttcgaatggcaatgacataccgcaacctaggatgtgtttcaactgcgatttgctgccccaagaacctaataatcaaggagcctagacttatcattaatgaaccgataactgatccccagtgcggatttgtcaactcgaaaggtgtgaccttctcatttagagaggaggatacgggcttggcccaggaggcggaggtaccatggatggtggccttgctggatgccagaaccagcagctatgtggccggtggcgccctcatcgctccacatgtagtgatcacggccaggcaaagaaccgaaaacatgaccgcaagccagcttgttgtgcgagctggcgaatgggacttcagcaccaaaaccgagcagcttccttctgtggacgttcctattcggtcaattgtccgtcatcctggcttcaatttagagaatggggccaataatgtggcccttgtgtttcttcgcagatcgctcaccagctcgcgccacataaatccaatatgtatgccgtcggctccaaagaattttgactttagccggtgcatatttacgggctggggaaagaattcctttgacgatccctcctatatgaatgtcctgaaaaaaatatcattgccggtggtccaaaggcgtacctgtgagcagcaacttcgcctctattacggaaacgattttgaactggacaacagcttaatgtgcgcaggcggtgagcctggaaaagattcgtgcgagggtgacggtggatccccgctagcctgcgcgataaaagacaatccgcagcgctacgaactggctggcattgtgaacttcggcgttgactgcgggttgcctggcgttccggctgtttatacaaatgtggctaacgtaattgaatggattactttgacaactgtcaacatgccgctgcctgaagagcgcgaggaggttccttacgcaagtccaacactttctgcaggcccgtatcttaaccagtggaatcaaccgaactatgaatggcttccgacaggctatccaaatgttaattccattccatggcagctccaagaagctaataatgatcttgccaatagtcagtacgttcgttattaccctgttgaaaacgttgggatcaacatacattctgctggtcatggaaatgatcaacaaattgttaggcccattcagcaggacataccgaaagactcagatgatttatttaatagtgtattttcaaccacaatggaatacaatttcgacgcttaa

SEQ ID NO: 27858 - protein, 464 aa, DROSOPHILA
MDSMYGIIAIVSLILVAGQVQAQGQNAELNQSCGASNEHQCVPRHMCKVKIEFRMAMTYRNLGCVSTAICCPKNLIIKEPRLIINEPITDPQCGFVNSKGVTFSFREEDTGLAQEAEVPWMVALLDARTSSYVAGGALIAPHVVITARQRTENMTASQLVVRAGEWDFSTKTEQLPSVDVPIRSIVRHPGFNLENGANNVALVFLRRSLTSSRHINPICMPSAPKNFDFSRCIFTGWGKNSFDDPSYMNVLKKISLPVVQRRTCEQQLRLYYGNDFELDNSLMCAGGEPGKDSCEGDGGSPLACAIKDNPQRYELAGIVNFGVDCGLPGVPAVYTNVANVIEWITLTTVNMPLPEEREEVPYASPTLSAGPYLNQWNQPNYEWLPTGYPNVNSIPWQLQEANNDLANSQYVRYYPVENVGINIHSAGHGNDQQIVRPIQQDIPKDSDDLFNSVFSTTMEYNFDA

SEQ ID NO: 27859 - DNA, 2985 bp, DROSOPHILA
taaaaattcctttaatttgcttatgagcgatgacgtaccaaattaatcatttcattttacagaaaaatgatggaataaattttaaacattgtgtattatcacacttcggattcgtttttggactacaccttaatgtgcgatatacagtaaataacgaatattttagagaagtaacatctaatgtcattcgcgtgggcatttaaatccggttgtaggttgtatctgtctgaagagcatatttcatggcttaggtagatacttttttttagctagtcagcgctaaacacttttgagccaaagaatacggaaaataaaataaatgaatatgcgccacgcacaggcattccacacaaacgcacacatacacacacacacgctccttcgccttctcactgcgctcctccttcgtcgcagccattttgtcttcggattgccgttgtccttggtgtccctcttgtcctgcgacgcctttcgcataactgaacgtgtgcgctgcatttgttttactttttattatgctactttaaaacgccaaacgggaaaaacagctacccaaaatagcaaagaaaaagcagctacagcaaaacaacaggaaaaagcgaataaataaagggaagaagaaactgtgtgcgggccacacccactatgttgcccactttccttttttagtcttcgttttttcgtattttttcaattacaacatattattttaaaaggacaaccgaaacaaaaacaacagtgtcagcattcaaaaataaaaagaccgtttgtatacggttcaacttttttaataataaatatttattcattcagttcgtcagaaattgccattaaggagctctacaattttagacgtgagtgcacagtgtacacatacataaaaatcattctgtcgaaaaataaaactgattattatttctaatcttttgtccggatatacaggcattcagaatgtgtagctaaaaataccatttagtcttgaattggaactcggacagctatgtttgaggcttggacactaatagtagcactttttgtgcttggcgtggctgaaaatgttgaaaaccttcaacaaattgaagaggtatgtgcctaagcatatatatttatagagatataaatatataccaaattttaattcatatttaattcaattaatgaaaactgaccttttgccagtacagctaaagtgcggatatggtaatccagatgctgtgaaagtgcaatttaatgttaccgaagggcaagcaaaaccagccgagtttccgtggaccattgccgtgatccacaatcgcagcttagtgggtggtggctctttaattaccccagacattgtgctcacagctgcccatcggatattcaataaagacgtggaggatatagtcgtcagcgcaggagaatgggagtacggatctgctttggaaaaatatccatttgaagaggcatttgtgttgaaaatggttatacataaatcatttaattatcagagaggcgccaacaacttagcgctgctcttcctggatagggagttcccactaacatacaagattaacaccatttgtttgcccacccagaaaagatcgctatcttccactcgctgtatagtggctggttggggtaaatatcagtttagtgacacgcattacggaggcgtcctgaagaaaattgatttacctattgtacccaggcatatctgtcaggatcagcttcgcaaaactaggctgggccaaaactatacactgcctcgtgggttaatttgtgccggtggcgagaaggacaatgatgcttgcaccggcgatgggggtggggcacttttctgtccaatgaccgaggatcccaaacagttcgagcaaattggcattgttaactggggtgtgggttgtaaggaaaaaaacgttcccgccacttatacagatgtttttgagtttaagccatggattgttcagcaaattaaagaaaatttatatacacccgataattattaactaattatacaattttctgaaaccaaaatatagttcatccttaatattactttttaagctgttattttttcctggtggcatgtcaataattttataaaacacacaatttattgggcatagctttgaaggttggtgccaaagcgaaaggcgttgacaagggacggcgttcacataaccactaaccgcacatctacaaaaaaaagcaacgtaaggacagatcaaccttcacacgcacaaaatggcatgatataatgtttataaagcacataggaatacatatcaacacacacatagccacggaccatttccgccaaacgtacaacgcggcgaatacttgatatttaattcaatctgggcgtaggttttcattttttgccattgtaagcgacgtgcgctttaaattaacacaaacaaacgttgtcagcgacagcaacacacgcacccacatacacccacaagcgggacaacagcaatgccacacacacacacacacacacacacacgtacagcaaggcaacagcaacaaggcacttgacaattacagactcaatgacagtcacagccagcaaatttatttgcattttagctgcctttctggctccgaatcctgtcgcttcctccgcagctctccttcctcgcatgtcctttgtcccttgtcccgccaggatccttgttctttctcctgccctgtttctctgtataatttgcccgatatttatacccttatttggggccggttgtgccatcagcaagtccagtctatacttcatttaaaaatggccccacgctcatttacatccattaacacttttaatgttgctaagaaatttgtttattttgtgaataaaatgtacctactaaagctgtattcctgcttaaatgtttccttaatcaatatttcaatattatattatattacattgatgttttgtactagatcattaaaagtaaatattagaacaaatgtagtattttttaaaataattatgaaatggtatat

SEQ ID NO: 27860 - DNA, 885 bp, DROSOPHILA
atgtttgaggcttggacactaatagtagcactttttgtgcttggcgtggctgaaaatgttgaaaaccttcaacaaattgaagagctaaagtgcggatatggtaatccagatgctgtgaaagtgcaatttaatgttaccgaagggcaagcaaaaccagccgagtttccgtggaccattgccgtgatccacaatcgcagcttagtgggtggtggctctttaattaccccagacattgtgctcacagctgcccatcggatattcaataaagacgtggaggatatagtcgtcagcgcaggagaatgggagtacggatctgctttggaaaaatatccatttgaagaggcatttgtgttgaaaatggttatacataaatcatttaattatcagagaggcgccaacaacttagcgctgctcttcctggatagggagttcccactaacatacaagattaacaccatttgtttgcccacccagaaaagatcgctatcttccactcgctgtatagtggctggttggggtaaatatcagtttagtgacacgcattacggaggcgtcctgaagaaaattgatttacctattgtacccaggcatatctgtcaggatcagcttcgcaaaactaggctgggccaaaactatacactgcctcgtgggttaatttgtgccggtggcgagaaggacaatgatgcttgcaccggcgatgggggtggggcacttttctgtccaatgaccgaggatcccaaacagttcgagcaaattggcattgttaactggggtgtgggttgtaaggaaaaaaacgttcccgccacttatacagatgtttttgagtttaagccatggattgttcagcaaattaaagaaaatttatatacacccgataattattaa

SEQ ID NO: 27861 - protein, 294 aa, DROSOPHILA
MFEAWTLIVALFVLGVAENVENLQQIEELKCGYGNPDAVKVQFNVTEGQAKPAEFPWTIAVIHNRSLVGGGSLITPDIVLTAAHRIFNKDVEDIVVSAGEWEYGSALEKYPFEEAFVLKMVIHKSFNYQRGANNLALLFLDREFPLTYKINTICLPTQKRSLSSTRCIVAGWGKYQFSDTHYGGVLKKIDLPIVPRHICQDQLRKTRLGQNYTLPRGLICAGGEKDNDACTGDGGGALFCPMTEDPKQFEQIGIVNWGVGCKEKNVPATYTDVFEFKPWIVQQIKENLYTPDNY

SEQ ID NO: 27862 - DNA, 4822 bp, DROSOPHILA
ctccacactttgggattccaccatcagcagtgctccccgaatcgagatgagttcgtaaagatcgtggaggagaacatttccgagggtcacgagaagaactttgtcaagtacgaagaagacgaggtgggggatttcgatcagccgtatgactatggaagcattctacactacagttccttggcattttctataaatggggaagcgacaattgtggctctgaatccagagggtcaggagcaaatgggacagcgcttgatgatgagtgacaccgatgtcaaacgacttaataccatgtacaagtgtccgattcaattgtaaaaatagcaataaacttgaaggtcaaaaaggcctataaattttaaaaactttttgactttttttcagttttatacaataaaattctcagtcattgacttatgctccggctttttttatcatttggcctgactacggaaattataggcactaaaataagagattatttaacactcgattctgcaagcgtgttaactgattaatttcatcgcttagattaaacaaataagtatatataaacatcaagaaaagtatccaaaaagttgatgataaggaaatggcaagcaactaatttaacccaaattttatagctctgcattttccaaacaaatgaaagtccgaaacttggcgctctttcatcgaaacacgaacatagccgcatcagctgattagataataaaaaaaaacgcttatcttatctgcagtggaagtgtagagcacaagccgagcacattcataatcggatgaaattcgttctttaatattttgacggaacccagtaaatgtaaggtaactcaccattggaaagcagctcaactgttagtcatgaagtaagtggagagacgagttttgaacactcagtcagtccagaactaccaagcattcccaaaccaaccatctcgaaaatggcgatgaagtgtaattgagaaggttccttccagtcgttacgaatagtattcagcttatggctctgcaatgtgtcacaaaacccaaaatgtggttgggccttaagcagatacttctctatgtaggcctgttgctctgcgttcttctgcaggtctgcagaagcaagacccagtcgcagatgttttgccccactgtttgccactgtgatctacacgcccagcgcaatcgcgcagtatgcaggtgagttgtcatcggatttggggaattatttcggttgagttatattatatatatttctttgtgcagcgcaaagcgcttgataagcgccaatatagaaatacctacaacggttgagctgttggacctgagctacaatgatataaccaccattgacgatgactccttcaaagtaagtcatcaaatggaaaagattagtgacaccaatgtttttgttttccatgatttcctagacacatatactgcttaaccaaaaataattatttttactctattgtgtttcctgcagaccacaatccacctgcttaatcttacgttggcccacaacgcgatacacacactttatggggatgcctttgtggagttgaccagactacgctacttggatctatcgtacaatcgcctggagcagatcgatgaacatatcctggaatccaacaaccaactgatccaccttaatttggaaggcaacaagttgtccacattgggaaaaggacctatattaagaagtccatcgctacgctctctcaatctgcgcaactcgcaggtaaatcaacttggaacccagcttctgagtgccttgcctcaattgcgccaactggatttggcacagaatctactgttaaccctgagtcctggagattttcatgcaccccgcaatctggcgtcactgaatgttgaggaaaatcccttcaactgcgatcgggcgttagccaaagtggccactggattgcgacagcgcggagtggctattttcatgagcaactgcatggaagaagaggttcaggatcaccaggacgatgcggaagctgtgaattttcctaataaaaacgagaagttcgaaagcatggagtacttggagcccagcacccgaggaccccaatccgtgctgtccgtctggcgggatctggactccagtgaggagcagaacagctcgcaggacgacgagcagatgtcatcgctaagcgatgtgtgtgagggaagtcgggagaaactgtgcctaagataccgcatttgcttggagcgtgtgagtcatgaactcctggctggcggaaactcccaattggaagatgaaatcatacgcacgcacacctacgatgaggatgatttgaagctggcctttgtggtgggcggtgccacgggcgtttgcatggtcatcttcatcattacctttgccctgtgcctcaagagttgctgtgagatgcgcaaaaagaaaagtaacccggaagtggccactggggtttcaggtaggtctgcccaattatgtgattgaccaatatttgacagagttttcccttgtttgtttcccccagctcctctgaacccttcgcaggatagcctacccactatacacacctggtcaccacagcgtacgcgcaaccccaggcgctctaatccccagcgtccccgtagtactcaatcgcatgccgtggttcgacaaccctacggaccgcaggacaacttcgtgtcccggctctttggtcgtccggcccgcagtcagtactaccggaccatcaatcagaatacggccaccctcataaggcgccttagtcggagtaacctcttcaccagtcgcgaccgggaaccgagttcccccgccgaaccgccaacttctacggccagattctacacggatgtgattgaaagtggggcgatacgaccggagacaccgcctccaaactacggcgatgtggtggtcatcgagaattgtgataacaagtgaagggagtatctttttaatatagccaaacattcgtataagctaaaagtaatctaagttatcgctcttctcgacctcaattatttactattcaaatctatatgagataattacaaatttaaagtctaatcatttatattggcaaaatataaaatgtcatatttcaaatcaacatcaactatcgcagtcgtcatagctgtttactaaatatttattaagaaagtctacttcatgcactttttattggcaacataaaattatgtttgtattcaaaatattttcttagcctactactattttaagtacaacatgtaatgcacttagcccccaaacgatattttagagagcccacaacatggcggccaaaatgcccttgaaaacttcaatgtttcctcattctcattttacacacaaaaatatcaattggggaattccagcatttttgcttctcgttttggataagcattacttttacaagacttggacttgcagctgcaacaaatcgcaataaaaacttttgacaaaactatcaaagttggcaacgttggggggaatgtggggatggggcatggccaactgtgaaattgccacaggaaaatccccgaaaaattcaagtagcaaaagtttacacactcaaataaatgctgaaacgcgaaagaagatgggtccttttaggccccccgtcccccaatccttccctgcagataaatcgaaaacaccacaaaggaaaataaaaccgcacaaaaaatgccataagaataaaactcaaaaaaagaacgacaaacccaacaatttgcactgcaaagcggcaaaagtgtctccaaagaaacaaccacacaaccccgaccagatacggaaaaagaataaatatatatagggaaagaaagaaggtccaagttatgttgcaatgggtaaaaaaaaaatcatgtggcaaaaacggcatgtggcagtgcactgaactacgaggtatcttcatacaatttaataaaaaaaaatatttacaaacataatttatcaaattgaacatttacctatatgaattggttgaaaaagaaataactaaagaattttgattattgcttaaatatctttgaaatggttattatgaatagacgtgttatgaatccgtcaatattcaaattagaaaaacttgtaaatattattttgcattaaaaaaaacctttttacagcattttcctggactaaacggcattcgaaatcattgtgcgttttcctttaattcattctccatttgccagatcacttgtgaagcaaatttgctgcgcggcatctttgtgggttctgttgttaagtgtttgtctagctatctatctatctatccaaacgtatctgtgttttgtggtgccaactttcattgcactgagcccggcgctgcagcacactgtggtgcacaaaagttaacgtatcctgggaccaaagttgcgttgtcaacaaccaaaacgcaggaaaaaagcggatttgggaaaagagctgtgaggaaatgaggagcccaaatcgaggaagcttggcgaaaaaatgctcgcaccaggagggctgaggaagcagagttgcagagcgtgaaaaaatatctaaatccaacattaatgaaaaactttttgcataatccacgatgaagctggcggtggcaaaagcagcaaaccaaaatcaaacccccatttcccccaaaggaaatgcagccaagcggagtaggaactccccatcgagtgaataaaatgcaatataagagggccaggataacaaagcaacagattccgccgggaggtggtggttgaatgggatttttgaggcattgaaggacatggcaagcggcttaaaaggtgctgaaggttaccccgaaagaaagtagtaagtgatgagatggctcagactttaggattctggaggcgaaagttgcactaaatc

SEQ ID NO: 27863 - DNA, 2182 bp, DROSOPHILA
atggctctgcaatgtgtcacaaaacccaaaatgtggttgggccttaagcagatacttctctatgtaggcctgttgctctgcgttcttctgcaggtctgcagaagcaagacccagtcgcagatgttttgccccactgtttgccactgtgatctacacgcccagcgcaatcgcgcagtatgcagcgcaaagcgcttgataagcgccaatatagaaatacctacaacggttgagctgttggacctgagctacaatgatataaccaccattgacgatgactccttcaaaaccacaatccacctgcttaatcttacgttggcccacaacgcgatacacacactttatggggatgcctttgtggagttgaccagactacgctacttggatctatcgtacaatcgcctggagcagatcgatgaacatatcctggaatccaacaaccaactgatccaccttaatttggaaggcaacaagttgtccacattgggaaaaggacctatattaagaagtccatcgctacgctctctcaatctgcgcaactcgcaggtaaatcaacttggaacccagcttctgagtgccttgcctcaattgcgccaactggatttggcacagaatctactgttaaccctgagtcctggagattttcatgcaccccgcaatctggcgtcactgaatgttgaggaaaatcccttcaactgcgatcgggcgttagccaaagtggccactggattgcgacagcgcggagtggctattttcatgagcaactgcatggaagaagaggttcaggatcaccaggacgatgcggaagctgtgaattttcctaataaaaacgagaagttcgaaagcatggagtacttggagcccagcacccgaggaccccaatccgtgctgtccgtctggcgggatctggactccagtgaggagcagaacagctcgcaggacgacgagcagatgtcatcgctaagcgatgtgtgtgagggaagtcgggagaaactgtgcctaagataccgcatttgcttggagcgtgtgagtcatgaactcctggctggcggaaactcccaattggaagatgaaatcatacgcacgcacacctacgatgaggatgatttgaagctggcctttgtggtgggcggtgccacgggcgtttgcatggtcatcttcatcattacctttgccctgtgcctcaagagttgctgtgagatgcgcaaaaagaaaagtaacccggaagtggccactggggtttcagctcctctgaacccttcgcaggatagcctacccactatacacacctggtcaccacagcgtacgcgcaaccccaggcgctctaatccccagcgtccccgtagtactcaatcgcatgccgtggttcgacaaccctacggaccgcaggacaacttcgtgtcccggctctttggtcgtccggcccgcagtcagtactaccggaccatcaatcagaatacggccaccctcataaggcgccttagtcggagtaacctcttcaccagtcgcgaccgggaaccgagttcccccgccgaaccgccaacttctacggccagattctacacggatgtgattgaaagtggggcgatacgaccggagacaccgcctccaaactacggcgatgtggtggtcatcgagaattgtgataacaagtgaagggagtatctttttaatatagccaaacattcgtataagctaaaagtaatctaagttatcgctcttctcgacctcaattatttactattcaaatctatatgagataattacaaatttaaagtctaatcatttatattggcaaaatataaaatgtcatatttcaaatcaacatcaactatcgcagtcgtcatagctgtttactaaatatttattaagaaagtctacttcatgcactttttattggcaacataaaattatgtttgtattcaaaatattttcttagcctactactattttaagtacaacatgtaatgcacttagcccccaaacgatattttagagagcccacaacatggcggccaaaatgcccttgaaaacttcaatgtttcctcattctcattttacacacaaaaatatcaattggggaattccagcatttttgcttctcgttttggataagcattacttttacaagacttggacttgcagctgcaacaaatcgcaataaaaacttttgataaaaaaaaaa

SEQ ID NO: 27864 - protein, 550 aa, DROSOPHILA
MALQCVTKPKMWLGLKQILLYVGLLLCVLLQVCRSKTQSQMFCPTVCHCDLHAQRNRAVCSAKRLISANIEIPTTVELLDLSYNDITTIDDDSFKTTIHLLNLTLAHNAIHTLYGDAFVELTRLRYLDLSYNRLEQIDEHILESNNQLIHLNLEGNKLSTLGKGPILRSPSLRSLNLRNSQVNQLGTQLLSALPQLRQLDLAQNLLLTLSPGDFHAPRNLASLNVEENPFNCDRALAKVATGLRQRGVAIFMSNCMEEEVQDHQDDAEAVNFPNKNEKFESMEYLEPSTRGPQSVLSVWRDLDSSEEQNSSQDDEQMSSLSDVCEGSREKLCLRYRICLERVSHELLAGGNSQLEDEIIRTHTYDEDDLKLAFVVGGATGVCMVIFIITFALCLKSCCEMRKKKSNPEVATGVSAPLNPSQDSLPTIHTWSPQRTRNPRRSNPQRPRSTQSHAVVRQPYGPQDNFVSRLFGRPARSQYYRTINQNTATLIRRLSRSNLFTSRDREPSSPAEPPTSTARFYTDVIESGAIRPETPPPNYGDVVVIENCDNK

SEQ ID NO: 27865 - DNA, 21893 bp, DROSOPHILA
accaataatccacgcacacactacacacaacacgatgcgatgcggtcgagccggcggagctgattctgtggaacgtagaacgtctgggccgagaatcacaaactacttcgtgccccagctttacactgacacaaaatttaagttcccaagataaataaatttgtttcatcattgccatagttaatataaatctattcatatttgaaatacctctattaaagagcgcttttaatataatataaacgccctgcatctagattgtatatttctttacaaacgattcgtattttgtcttaaaaatatttatttttcatacttcattgtaagtatgcaacatggaatgggtagttttgcttattaaaaactttactgccttaaatattttcttaagcttgatttgtttttctctgcgcagactccaagggcgcatcgggcaattctcgcgaaatggaattataaaagaatgcctcctcgcctgggccgaggtctcagtctcagtctcagtctaagcctgagtctcctcagcactccgagtgcgtcgctgtaccaggcgagttttaacgagttgaaaaaaatcaaccagtgtgtttgtgtgtaggagagccccgaaagaaatgaatttaaaataaataaaagctggaaaagaacaaaagggccctggccagcagtgatgagggtgagggtgctgtcgacggcggtcagttggccggactccaaagaaccagaccgggccagctgaggagaagcccagccacaatgagcccgcaaatgaatgcgtagactcaagtggaagcctctctataaagtgggaagcagggaagcgtttcgatgatatatgaaaaataatgcacatggaattggaaataccttgttgaattgggattacagaacatggtattataattcattacgtttttttgaataatttaagaaaacaggaatatggatagaagtatctaaaatatttgacagcattttagccttcttttttgaaacaatgttaaatacccgaagttagggtatcaaacgaaattaaccgaaatgcgatcgaccgcagacccgcagcaacaagtgtacaagtggcatcgccagtcggcggaggagggcgtccagggtctgaagcgtccataagaaggtactgaagagacccggagaccggagaattgcgatcattgatcgcggcaatcggcagagccaagtggtagaagggcgaaatgggggacccagaggtggtggtgctgctctgagcaggcgatccgatcgatggatgagagttgggatgaggccggggatgaggctttatggtggcaattgtacttggccagcgatgatcatcagcggatggcggctcaattgttgttggccgggatggttctgctttttctgttgctgctgcccgtacatttgtgcaattcattgttccaagagcgagcgagaaagtgcgatgatcatcttcaacaccttcgacaggttacaaaacaaaagtggcaacattattgaacatcttaactcacacttggagaaaattgatgctaaatatgagaattttttggttattttaggaaattattaaaaaagccctttctatttgtaaggttaatttcaatatagatattgatctcatctcattcctatggcttggtttaatggatggataatgctgcagtagtatttattcgactgcactctacagctcctccagcacctctttaccctatcggtcaagagaagatatatgcgtacgtggcttgggctttcggctgcagattacgtacaccagcttcccatctactgagctcctctaagtcggtagttagtgcttgatgtatgtaattcgtgttgcgcccgcatcgcagctacctgcggataagtcctactctcaaatgcgacttggctggggaatatttcataaagcgatgcggcaatctttatgggttcatcggaaaggtgatcatcgctggagacggagacgaatagaaatccaacctgttggcataccttgggaatgcctcaaattgttgggaactcagttatttaaaacattagtatagcatttaaagatgtaagcttagggcatggaatagcatactacgagagatcttaccaaaacattctggacaactatttcgtccgagatctcagcgaaagtatataccaacgtttattttgttttcctaccaaccgaatttataaatcccatatagggagtttttaccccacaagctacttcctaaccataaactgtggataatgcttacttcctaaatattctcaactatctctagaaagcatcttaagaatttaaatctaaatgttgcctcgttttgccttggctttaatgcgtccacgctctgcagcaaccttgccaacaggaattgccaacctgctcgaatgcataaggaagaaattaagttttttctttcctctccgagggaattttaatgataatttcctcttcacgaatttatggcattttaattaaaactgcccaaagagcccagcctgcaaaggctgagatcgtttcgtggtcgtttcaaaatacaagttttagccacgtaaatttgccgggtttaaaggccgcccgatggtgtggcttcctgttgtgcatgaacttttggcgcggactgtcaatgctataatcctggccataaacctgcgactcggtcctcgcatataaacgtcaatttggccaattacccagagcgctgggtccactgttgtgtttgtctgtgtgtgcgcttgggtgtgagcctgcaccacaacaagtgcattgtgtgccggactttcgatttcttggccgtcgtcttgccacttgttgctgccttgattaatgcggcagcagctcgtgctcagacagagactcaaaagcccgactggttattaattctaaaggttcttcctttgttgggtgtttccgccgtacacccgatacttggaaaaaactctttatctgggtgtttctgactcaagcttaatttggttttaagcttattagcaaaagcggcctacagatagaacttttaccttaacagcgttaggataatcatttagtattccacaaatagaaatttctaactataacattttaactctaaatttccaaaaagtaactttcgtaatgttgtagtaatatttctaagataatgttttaacttgtttattcactctagcatttttgaatagcttgcaaactattcaaaataattttaagttcacatttctttggtagctactgggtaagtccgcttcgacctttatagcttcttagcttttgatggtttttctgggctgggagtctgctgctggagcaccaccactcgactgcccgaaaaggcaacgtttgtcgccctggccggaacactcaacaggttgctgttaatgaacgcccgcgcagaagcagaatcagagggccgcaggaattggaggctacaatatagggttggtaggtcgcaaagggggtgatctggagaccagaggtggggcagcactcacacacagcaaagttcgttgtcggcggtgccaacgcaaatggttagcaattactttatgcgttcgcctgccaactgattacaagtccctcggctgcacctttctgcaaccaagaggccgacgtgtgcggtagaatgcacgaatgcgttcaatataatgaaattcatttgttgaatgtccgtctgcccgggcggggctcatcccctccacggcagttcttaaccctttagaagtaactttgtatatgatttatatttttgattctacttttagttcaataattgatcaaaagcttgttaacttgaaatatgtccttagattattagatgccgttagtcataagaggaaagtcttaacatataattttatttatatcttaagtgctgttggttttttttaaataagcatatttcgagtttgcccaggttaatttggtcacgaaggggttaaggtttggtattgggtgccgccgcttttcagttctcaattctcggcttctctcagtcgctaaccttgaattttcgtttccagagatctccagcatctcgagtggaaacaagaattctgccgctgcctttttacttttcgcattttagctttagttgcgactcctccgctgctgtcaggcggcaaaaacttgttacaccgcaaaattatatatacacaaataaacggccaagtgtgtgctgcgaaatgagcgaaaaaatacgtccaccacagacgccctcgtctctgtctgaatttcagtctgagtctcctactcctgctccacttgatcttgatccgtctggctgattcataggctctgcccaaaagttgccagcgcgttgattaaacgttctccaccgggccccattggcaaaatgctgttgatattattaataaacataaatttctgtttaaacagttgttaaataatcgtttttagtgcccatattgacagacagacaggccctagttggtaaggaagtgggctaaaaaaaaagagtaaacagtggacgagtctcaaggatattaccagacgttccttacttgaactgtaggtgcagcaccaaagagttaatcacttagtatgctattatttcctaagatattccatgcaataaacaagaggcatgttagtttgcttgggcatctactgaaacccacacacctaattgctacatttcaataataacgcattagcaatcatcatgtagaacacaacgccgcctgaatgtctgcaaaattaagcactttaaacgtaataaccattaagttatttatcttttcattaataagtgggaaattggcacgcagacgacatcgaggagcgatctcaaagcctcgacgccgagatggagtcagattctgcgaagattctgcctctgtttggttctttcttcggctgcctagaatgtttacaatttgagctacgtaaatggacacataaaatgtgaggccagaagatgatgggcaagacccttttggagggggctgccgcactcactcgatcatcatgggtacgatgatgatgataaagatctgcaaagtgcggaggactagcttcgcaaactgtccgagatgaagatgcggacgacacttgatatggcaataaatcaagcaatctgcttaattaaagtgcaacttagaacatttagatgcaatttattttaatgcgataatttattaatttattgacttttaataaagggctaccagtggcagttattgcctgttgagcactgagggaaaatgatatcatatatgaacattaatataatgaactgtgtatatgaataattgtgtacatttatgtttaaatgcctaataagactactagtctaaagacttttcaatcgtatagcattaaaaacctttattttgaaataaatttgagttaagttgtagatttagcaatgtgcttagtgggaattaaatttttcttagtgcagattcatttaaattagcccagctcgggagcagagtccgaaggataggatccgagtctcctacaatggcctcgctggctgaagatttacgagctgacaggcgtaaaaactgttaagtaagttgacaaaagtgccagagacaagcttctggtttgcagaagcagcttttcccccatcgccttgcccctttttttttataagcaattccacctgtcctcgtctgttttcgcatggcattcctcggcgtatcttaattgacgtgcacatttcgctatcgcataatgtgaaaatgctgctggctctaggaatctccagtgctgtcgcggggcatgatttacgacttgtggtccagtccagtgccccgccagctctccactctgctaatttcttaacacaattttaatgttatcattaggaggcaagtgcgtcaacacactcgctcatcgagagagtttatggtcaactggtcaggccatttatgggtgaaaggtgcttgccgatgtttggcttggcttgttctcgcgagtcgcaccgtttgaagtttgatttatgtcatgggtgttggaggagaaggaagatgacgaggtggcctacgcgaagatagaggcgggcaagggcgctttaggacatgccaagtgttgattagtggctgtcgatgcgccatgttctcatctacgaagataatgcatatttatgaggtggcaggaaggccttttaaactcagcgcactccacaggtgatctagactaagaacgcaagacatgattttaggcaaagctctctatttttatgagcccatgtctaaattaattgttggggcttacaagtaattattagccaaaagatttacgattaagggtgcttgaatccttaatgacgcctttaaactcttttttatgaatcgcaaatttaactatgaacccataatttatattaattacattacactaaagttgtggagagcataaataattgcggtcagatcagaacaaaatctcttgttttggattgcaaataataatgtaaattacagacttaaatatacaaatccgaagacattaaactttttcggttgttgtaagcatccaacaaaaataaattacccactttatacgtcttgtgtgtataattacatacccacttcctagttcccccatccatataccgccgtaagggcgatgctctggaggcatgttaacaagtgtagttggaagtccgtagtacctgtttaaccagacgaaaacagcaatggcagcagcaacatcagctgcaactgcaacggcaacagcaacggcgacgaagcaacatgcgacatcaggaacagcgacaacaggactgacgacaagacgacccacagtcggggatacaccgacctggagaaacagaaatatggcacatgccgccatgtgcaattgtaatttctcccggaccacatactgcccaatcccaatttcaattccatcctcagcccctttcagtatctctctatttcgaaggtgtcaacgcgcatgcgcgcccgagttgtcagcacattaatttcatttgcatttccgctcggcgctggtttcgcattaccaacgcgcgctggctggaaaaactagtgcgagattttccaaacgttgcccacttttggccgcggctcgtgccatggcccactctgaacgtggccaggatgcactgcgcagaatcactgaattgttctagaacttaaatttgaaatgtaatattattaagctgtagcagttttatgttaaagctaatacactttaagaatatatatataacagaaagtgcatcctggaattatgcctttcaaacgtaatctgcttcagaaagatcagatatttcagtactcacaataatattcaaaaatccccccgtttctagaaataatttagttaacactaagactttcttcaagtgcatcggtagtatgacaatctccacctggctgcttcgcactgaacatgaatcacacacgcatttctggctctgccgcgacgatggttgttgttgttgattatttacatagttttgctattactacaaatttttatttgccaagcacccaagacacagttcgtcgtggttgttgtggtgcttttcgctattggccgccgccgcgtcatctgtcgcctgtttctcttggctcactgtttaattgtggcttaaagtggtaataaacaagcttcggcggtggaagaatattaatagcccatgttattgatggcaattgctcgttgattttggcgtaattaagtcgttgtcaatgtgtgagtctgtccatatataggcgtgtgtgtgtatgtgtgcctacttggggcaattaaagtcgctaatttatgcacggcatcttttggtatttttatgggcaatcatactcggacaagcaagtgcaattcgccccaaggcggatatgaacaactaaaaaagcatcagaaacacttaaattatcgttgtggcgatattcaattaataacgccaactaataggtgatttaataatttatgtgtccgttctgcatcaaatggttttcttggccaagttgcgattatattacattatatgcaaaattattgaagtaggaagtaaagctaatttagttgcttatagattcaagtagttatggatgtttccaaataccatacctcctaatacaagcgatccataggaagtgccacttcccttgtagcgcttgaacaaacaaacttcctaatcgctgcatcgcctcttatcccaacatgacattagctaatggccaccaggccaacactctgctcctcccaatccccgtctgccccatgggcacaccatttcccccttcacatgtggccaaaatggtggtgctgcccaccgcctgacatttgatggcttcgtgatgcgcgtcgtcgccgccaaacatcaaacgaggatcgtcaaacgcccaacaacaaaaagtttctctacgaatatggccagcaggcagctctctctttctatctccaacagagagagaataaaaaggatcaacagccatggactaattaaaataaaaatttaatatataatttaatttaatttataatttaatatatactgttaattagagggcttacttttatgtttatgtactaaattaatacaattaactatataatgttagttaacggttaccctgcacacccgtgaatgcgtttttctcagtgtactctttctctggctttttctttcgaaatctacgagtcttatcagcttccaaatgcagcaaaggcttacaaattagcgcgctgccaactgtctaaaatggcccaaaaggcagcccccaagtcaaatgacactaacaacaacaataaactactgttgacacagtgtttttgttgttatggccgttgttgccattttgctctctagtccattcaatgggttaaataagactggcgatgcgagcgtgactactataaatgcttaatgtgttataatgtacttataatcatatctatataacaaaattttatatctgaaagttaaataaatcttaaaatattatttaagaagagtagaatggaataattacaatagtttttgtgcttatgtacattttgtgcaattaaatgctacgtttattcatagaaacgaaagcgtaaattggaaagatttgacagtcaatggtctatgacaagataatttgcttaaaatggttccttttcgaaaatctctatcttgtgcgatgtttccttggcctcacgagaaaaggctcaccactgtggatggcccaatccaaacctcctacaactaatacaatggagcacttgtgactctgcagaatggcgctgcgtgggggtgagtgttagtgattgtccatgggtttccatggcgagtgtgtcgactttggtgggtactttatggccacgcagctccagccggccaaaagagagcttgtcccctggttcggactccaaccggccatccacaaactcggacttcgagtccagttccaactgcagcaccaagtccagctcctgcgctcctgtcagccagtcgtatgtattcatttccaaagggaataacttatgtacgctctgggcacaataaattcttgcactgcaaatgtcaattaggccgttgattttctctctttttttctcttgcttattttttttttcgttcagcttttctgtccaggggagagcgtgaaaaatctaattggcttggtgggtatttgttttcgcgtggccccttgaattgatttgtattcaatacacacaaaaaagtgtaaagaaaactagaaagcatggttaaagacaaaggcatcgtacatagttcgtataatcagtattaaaacttttgatacataaaattcttgttgaaaaactatgaagaattagattaaaacattgcaattaacctgcacatacagtgcattaatttttttttgggtgcacttcgagcaccatttgaatttacacttgctggcggagaaggaggttgtccgccgactgccacttagctgtgaaatgatgacataaaagaacatatgccctgacacatcaatggcgatgatggtggaggagatggtggaagtgggggcgactaataggcacaaaagcgtaaccggaggagctgcgactgtggctcgtttgtttgcttattgacagcttcttacgcacgagagtgtggccacaagtgccattggcaagtgtacaatggccaagtgcgtcgtcgccgtcgtcgccgtcgtcgtcttggtcgccgtcttcttctgcaaaaattgcagaaaaaatcaaaaataattgccaagacactggacaagcagcgcaacgcgagagatgccgggagatgcgtttggtgtgattatattgggtttttgatacgttaaccaaagggctaagaaacagaaagagcagaaagagcgacggtggttgtagctgtggcagtggcaacagcgaccgacattgacaggtcaatattgatggaaacaagatttatatgacaacgctggctatattttcaaatttaatgagccaggcggaccgactggccataaggaagtgcccgagcgactgccgctgatggacccggtcgtggcacatccacatgggcccagatgagatgcgacatggacgtggagaagtgtcgagtaactcgcttaaatgatgtgctaataaggcgcacataacttcgcaaaagatgatggatccccgttggcggcggcttcttaggggtttcaataaatgcaaacaggtggggtcaatcaagtagcgctgagaaacatggtactgtatgaaactgtaatcattttaaaagtaattacagatatccgattcgatggaacgtatgcaatattgctggtcatttcaacgctcaaaataaagttcattttacatgaaatatataaattaataattttagctgacttctcaaaatgatgacctcaactgtatgaacatatgccattgtcttgtgcttggggatttcacgcaatcccacatttggtgtcttgggatgcgctcagattatggcaaatatgatgtgaatttcttgttttttttttcgtttgtgaccaacgagcatgtaactaatgagttgcgtaaatagcttacaaatttgggtcaaatataagaataaataattacatcctggtcaaaagcattcgaaaaagagaaatgatggatatttaaggatatccttgacctttggcttgaaaatctgacttcggacagtcagaggtgcttttgtggccacaaatgctgacacccacggctcttacacccacacccattgaaatggccagacgtctacattcctttgaagctccattatcgctgcacgtcatcgcagatgaaaggaagtgcggggaatgcccccttcgccactgcccgtcgtcacttgtctgatatatcacctgtacttcgtaccagcaggaaccacaaccaagcaaccacatcgagtgcctttccagacagaacaaaccaaattggaacaatgcttgctggccaagaactcgcgatccgggccctcagacaattgtcacacttcagactcggattcgaattcagattcagattcggactgagcctcaaagtcagcgagcttgaggcttttggcgctggcgtcttttgggccgaatcaaatgcattaatccaatttacgcatgccggctccagacgcagcctgaggttcacggttctgggcgtacactgtaaaaaatatacgacacctaataactaaatcgattcaagagataaggtacattaaagttaggggaggatgaagtaaaacattttaactttgtaagtaaatttgtggcaagaaaataaaatactttttaattttaaatatatatgagaaaaatgatattattttattattatttacatttcgttttctctgcgtgttgatctcacttggtccgaagccacttgctccagaatgtagacaacaagtaactcgcctgatgacggcccccgctggagctgtcaaatggaatgcgttccataagagctggggaccaaaaaaaaagaaaaaaaaagaaaatacgagtatatatatgtaaaacactttgccaatccgcagcgttggattcgaagatttccgtgtaaatttgcagattttgttcggattttcctttcctttttgcccattttttgcactttttgaaaagttggcagcacaatttaagagcaaggcaatcaaggaggcgcaatctgtggaagagttcgcaagtgcaggcgaccgttgacaattttatttatttacagttgccgactgtctatataaattgagaccgttgaccgctccgcccccccttccaagctccagctccatcctgagatcagcgagcgggctggacaatgtcaacatagttgcaattaatttgtaaccgattatcatcttcaggtgccaaataaacttctcaacgtgttgagtgtcctctccgtatcggtttttccccggttgttgtttgttctcctttttctcgactccttgatttttttttcttcttttttttttgacttgttgttttgcatgttcctggcgtctgctttatgtgcaacatggtcacataaacaagatcaatccgctgctggttggactcaatgtggtgcgatattctcgggacataaagcaaggaataacttcatgaatcccgcatagaggagaatgcggaccaaaaatagtattatttttggggtgttttgcaatgcaaccatagaactgtgtgagttatatttacaaaaaatatacaatacaattacaattggtcaagaatgccgatgttagaaaatgcaagcagaaagttatttaatttaacattacggttttttcactagccgaatatataaatatcgcctcacggacccatctccagagctaccagggtgacaggttgccatttggatgcacgggtcgctcgggttgctctttcgcttttttccggctggcgatcgcctcggttgccaacacttgacggatttaattatttcgactctccaggcccctcaccagcatcctctccagcgcaaagtatccactctgcacttggccccgaaggagttgcgtgtcgcctgtgggcattccacatgcatcatgtccaatcgtaatgagaaaatatggcatttgtgatacaataaagtgtgcttcgcacttatgttacaccaacatacgactgccagtgcccgagtgccaatgaagtggggctcaagttgaggctgaagttggcctccgactttaacccttttatgccgtgaaatgactacggcaaatgccaccataatggtcagagagtgaggcgatttgttagctgtccttagaattggcaagagattttggtagcatgaagtttcaatttgaaaacgaaaaggatagaaaatcaacacatatttattgaaatttattttatttgaaaagtttcaaataaaccacacttccattttgagtaattacaataaaattcgaagtgcactatatatgttatatttcatctttgattgtggccctaatgggttaacgcttaaaatgggaatggagattgtacttgcttctgctgctggcattttgcatgcgcctaaattatgttgacaactgtctgtagcgtctcattgctccatctgctactcactcattatgccaggacgacaagaggtggctcagttcagatttggccagctctgggccacgtatcatatcgccggctcatgcaacatgcaactgcaactagctgcggtttggcaacggccaagtattcgtggagagctgctgagactgaagctggtctaatgcctacgccatttattaaatgtcttcacggtgcgacaataactttatcagcctcaagagaggaagctattctggcacgagacaaacacacggattcacgggaaacatttttatttaacttagcctggttaaataatttaatgaaattcaccaatcctatatgtatttataatgttaagatattactcatattttcgagttattatattaacttgatttgtaaagtcttcaagtaattttttatattatcgaatatttttttctctgtgactggcagcgagtcatgttaagtcgaggtgaagaagatgactttgcatgtccaagacggtgtgctctggttactccactggatgccaagtgcacagcatattaacccactgaaggccaacccagagtgttcagctcttgacttaatttagagatggttccgccaatttaaatggcttaacattaattcattgacgcgtctgatttaattatcacggtagaaatagcatttggtaaggctctttgaaatactcttattttaggaataaataccaatcaggtattttttcattttatttttgattattttactttcataaatatagtacagtattcttccactattattaactaagtgttaagtccacatcaggtgtaagccagccaaagatggcgattgggaaaagcaaagttgagctacatccactttaccagctcattaaaagccattgcacccacttgcagtcgtagatcgtccacttattgcattgcgtgtacattgccctctggctaaaaaaaaaagaggaaactctgactttaaaacgactctgggactgagatgtcgattgccatgtgccggccttataataaagttggcccagagcgtcggccattttgtgtgctgattcgaattgtaaatttgtcgccttctttctcgctttacgcaaattagccgattcacattttatacatgaattctaaacgagttatatgaggttggcaaacctgtcgggtaataatttttggtcccgaacatattaaaaaaaaccccaatggagccgcagtaatataattttttttgagatcacctaatgagaaattcgtgtttcatttttcggctcaacagaaatgccgatgcatgcaaatttgtgtatttcttgttgagctcgaataaaaataaataagtcgccagcggctcaaagtgccataaattctaagagtttatgaacgggtcaatatttgcgttaagccacagttctgcagtcgctttaaaaatttgacaaaataatttcaaaaaggcaacaaagttgccccttacttgtgtcgtcttagccattaaagtagccataaatatcgaagcgtttttaattagtcgccgatcgcagtccagtttctggataaaaataacaacgaatcaggtgttgatgctgctggggaaaatcggtttgattcgaaatcatttcaaatgcgtgatggagtcggtgtcggtgtctgtgggtcttctcaatgccagttagttttctggtggctaatggcgtctaatttgactaaattattcatggcagccaccgatcggttcaacttgttttccgcctcaatcagttttgtcatcgagccatcataaaatttgtataatttttacggtcctataaagtgacagtcatgggtttttagttggacatccacttgataaggtcgcttgtctccttgatttgctcgctcgcatttgtattataattttcccccctattcattatgtttttatgcttttcaattttcccaactcattttccgccgagctgattgttttttaatgaagcttcggcggggaatgtgtaacgaaatttgtggatgggtttaattggttacagcatttagatgtgattattcttgaatatcttcgaatatttatccaaatatgcggctttttgggtccgatatcttggatctctagtttgtagttgattaaaattggagcaagagtgtaggaaaaggtgaatgaaagtttattactatgtaatttggaaagagttgaatgaattttatacgggaaaaatgctgaagtgtaatcaaattaagatgaataaaaacggaggtgaagaaggtgttgataaaattacaaattaccaagtgtggcttagatagatgcaatccagatgttgattaagtaaaaactttcaatttgattaactgacaatataagtggtataattgaaaatggtacgatatagtaatgttttgtatttgtaaatcatatgcagctgcaatctcgactttccccatttcacaatgctatccagacctacaagttaactagacttcccgctctttaacttcatgtccgaatcactttagtcgctctgatcgctaaatcccaaatgacaggcgggctcaaaacaaatgttaacctcctgtttctgcccccgaaaaaatatgtgtccaactggtcggagcttcctgctgttaccgctctccattggccaactcctcacgcccccccggctacccaatcatcaatttaattgaaacgcccacgtcataaacttggaggcagtttgtcggatgtctggccccgtctttctggcccccattgcgtgctcaaatgtttgccatttgcacccacgcccacttaaagcaaactcctaactcgcggcccccaaaaccacatctgcatgtacatcgtacagacgaatgcaagcggccactaaatttcgggtaaaattattgttattacaccgaaatcgtttattattaattttaatgtatggacagggcgactttgcgttgcgtgacgctcccatggcgactggcttgtgcatccgaaaataagccaaatccgctgcaaatgcgtcacgtgactcaccagacgacccacggacaaaaacacagacgcagacatgagtcgtcctttgcttcccgatttggttgtggacgcgttttttattggtgcaccggaagatcgcatttggtcctttgacttcgatgatgaattatctgaaacatacttatatagaagagtaaaccataaaccaaattgtcaaatgaaataagatgctaactaaaaacttttatgtaagaaatgtttttttgcataagttaatattttttgttcagtgtgtctgttttttttaatctactattttccaaaggacgtgcccaactgggtgcagctcctgtccaggtaacgaaatccagtggttgagaagagcgaggaggcacgcgtcgaattcccaatcctcccctgcattgaatagaactttttatgcctaattgaaatggcgaggaaactttgttttgtgttgttttcattttttccatgttgttgctcaccttctgacacgctcgtggctcattaattatagcactcgcattaagtgggttgctaacaggtagtaaactggcagaaaaaaggaatacgcaggttgcaaaaattatgtataaacattaagtatattgtatatcgtgagttaaggaatatttaaaaatcatgttccattctatttctaaatatatatttatttgtgtttattggatatattagagttagttaaaagacaagaaatgccattcatattcgtctgtgcataaatatgaatttttcgcatttaaaaataaaccaatttttttcaaagtgcacctaaagatagggttgcacgacagtcgggggtgtgttacggttttatgtaaatttgtgacaaccataaaaagctgagccgtcgtgaaatgcatggaaatgtaatttcagcttagtggtactgcagtttccatcattgatgcacttcaaggtggccagatgactcttccggatgaacttgagggtgatacgatccggctggaccttatattcacggcaaggaccttcccctgcacaaagtacttaatcattctgcacgctaaattaatcaagtggctagaatttagtctggggcgccgtttttaatttgtactgctcatggaatattcaagcagcatatggccttagttctagacgggtcatgcaatccttgctccttgaggctgcataaaattaggcaaaaacaagtcggaaattaaaaatcaacctgggctgtcatgtggccacaatagcgggcggtgcgagagatcctttgaacttggcctgtcaggacctgagaacagcgtccatgattaatcggcctcatctgttgtttaccatttctccatttccccgctaatgggcgtgaagccgtatacaatttctcccgatttcgttatgctggcttcaaacgcataaaacacataattttcaaccgagtttttaagatcatgctttcaatttagggatgtaattcctttttaatacttagatagcgtggtcttaaattcaaatgaaatttttttgtgagttctactcatttattaagaaataattgaaacctcatttaatgtctgtccattttaaatattaaaaacacttttatggtgaataactcctcggaaagtcaagacaacaggttgagtttagttgtcacgaaaaaaatgcccgtctccaggaattttaaatcatggcgacaattcggagagatccgaaaacggtaagcaaattggcacggacttgttagcccggctcgctggcatttcaggcatcttaagtacgcccaccagaacatgtaaatagagtttcggtatcgaggagggagcccggtatgcaatttgctcgtttgacacttgaaatatgtggcaacaatacgagaggaggaactggaaattttgcgcatttcgcgtttcgcattcgcaattgcaatcgaaatggccatgtctgcggctttataggcaaatgtcagccaacaacctcgtcgcaggcggtgacaatgacaggtgaagggggccggcggggcttcgatggacatcgggctaactggcgacgacaagtggacaagccagctcctagctgcgagctgcctctggatcagcctgtctatctgtaggtctgtctgccagccactgatcgccgggatgaactctgaacccgtacaaaatatgcggccaacttgtttccaatgcacgccccgaggagtaggcagcaacgcccccaactcgccacggcatctggatgttggccaccctctggtggatagagtctctagacatttgaagaaggcgaacaggcggagagaaatgcttttctttatataacattgatgcatacttggttatacatgcgttgatacatacaaattaaataataagctgaatttatatattttaaatataaacactgtataaaattactatcattttgtaaaaccttaaactaaattattattattcagatttgaattgcttatttttttacatcatatctaagagaagagtattaaaatttaactgcttggttttcgcccactgccctaaccgagtgtagttcttatttggatgctactatcaacgctgagtgaatttgtatgttcacagttctaaagagcgggcgcgaaagtgaacacggtctgtacaaggggacgttggggtggtgatgggtggagcagggaaggtgggaaggtgggtggaggaacggcggtcaggctcggctcctttggaccgacttgctcctttgcgtttacaatagctcaagaataccgctatcattattctttaagccgcgaggccggcggaccaactctgtggacttagcggcagacacactggaaaaaattagtacgatttcaaaattaatattgtattacaaaattataaaaaaggaatatatatccttgtaccttgtatcataaacttcaatcctatgattataccaaaaatgcaaaaatttcccgccgtgcagccactgtaacctctgccatcagcaaccccccatccagccacctccttccctggcccgacctcctccggattctcattttaatgaaccgccgttctatttttcgctgatctttcgccactaataggaacgtgttcacgtcgtcgttgttgtcgtcggctttggtggctctggctgcctttggctttggctatagccccaggttaagcccgctgcctggggtgtgggggagaagtggctgctcctttcggccagacaacaaactggaagccaacggcagcttaaaatctatgaggacgccttacaaactatgcttaagtgattgtcaagttgggcttttaatttatcatccatagacaaggcgagagttgtcggcagcagactcgccagttgggggctaagtagaggttacgctcgggttaggctacttttttctccatgttcctggttacttttaaggggtgtgtgaagtaagttctattcatgggtaaggataactttccatataaagaagaaaatattaggaaattttgttgaaccccaaagatcgtgctccacttgtaaagtactgaattatgtgtatctatatatatattttcagcttgaatgatgtcattaataccccaaaacaataatgtatattttcagaaaacataatgcgatatcttaattggttactgggtatatccatgtcgaataatccacccaaagagctaactttttggatcgaccaagtgtttgcattgcataatctttgttctgggcctgctgcttgggtgtcctcggatggccgcttctatagcgttccacattccggcataattgattttaaagcgactctgggctaataaatcgtaactttatcgcttttcgttgtaaaatgttgcagtctggtggcggaggatttttcccccggtggcttccagttgatagcacttgctgctcccgcttttcttttctagcttggcaacggcgattgtctaataaataatgatagcgaaatgctggaaaagcttttcacattttcagccctccgcgatgggaaggggggagggcgtgttcgtttgaaaatgctgcacttgacgacgccgaacaaatttttagctcgtttatggtcaaatggcatggcaccagacacaccggctgcaactctacctggatcgccaattatccgtacaagctgcggctgcgagctgttttccacacccccgacattgcggctttccgacatcccggcgactttacaagttactttaacttgcccgaatgtccggctctccgggcagctcggttgttgcttttgtcgcctgcctttgttgctggctggatttttctgtgttttttttgccgttttcctttttttttctggccagcttcttcggctgccgctatcttggccagcttgtcccaagacttttatcctatgcgtctgcattatctgccgttcttgttctgtgttctgttctggtcggatctgtcgtcccgcgcctcctggaccgtgtgttttctgttgtattttatcgcaaaaatactacttgagtagctttatggcccatgttggccaataaaaagctgacaaaacaatattccccgtgcgcctgccttcgttgaccaggctgtgtgcaaatttttccagagactcctccagagagcaaaccgaaaccgaacaaaaatagaggccaccaaacgagcgcacaaaatctacatacaagcttattttggctgcctgcttcccagaaactgatcttatggactttgttttagataggttttgataaagggtaaaacagggtatatacgttgaaaaagttaagaatttaccagtatacttttttttatttaaatactaaaggaagtgctgacttcgcataattatccatttatatatgaacttatgttatttataatggtaatacaaaatatctaatacatggtataaaatctatctaataccattacaagaaaaaaaaacaccgcaagaagatcggaatcggtttccaacggtcgaatcttttattaatttaatatgcacgcccgttgtgccaataaagttgctacattttacgccggcttccccgatcatccacatccacctccgccgatcgcccagggcgtgtcagctgggctgtagcccagatcttaccgatcgggcggcttaaatcaaatggatacagaaaacttctcaatgcttttcggttgggtttttgggtaaaaaggtagaaggcgccggtgtgggagaggaatcggagttcgagaacaggaaatataatttaacttgactcgaaaacgcggcatgtggtaattaaaagggcagagcaggtacctatgcgatgggcgtggcacgacggtagctattagtttgaggagattaccctgatttcgtttcgaggctgttgccacaaatcaaatgacttagacaacgaactcgatcgccc

SEQ ID NO: 27866 - DNA, 2721 bp, DROSOPHILA
atgcagacgcataggataaaagtcttgggacaagctggccaagatagcggcagccgaagaagctggccagaaaaaaaaaggaaaacggcaaaaaaaacacagaaaaatccagccagcaacaaaggcaggcgacaaaagcaacaaccgagctgcccggagagccggacattcgggcaagttaaagtaacttgtaaagtcgccgggatgtcggaaagccgcaatgtcgggggtgtggaaaacagctcgcagccgcagcttgtacggataattggcgatccaggtagagttgcagccgagactctatccaccagagggtggccaacatccagatgccgtggcgagttgggggcgttgctgcctactcctcggggcgtgcattggaaacaagttggccgcatattttgtacgggttcagagttcatcccggcgatcagtggctggcagacagacctacagatagacaggctgatccagaggcagctcgcagctaggagctggcttgtccacttgtcgtcgccagttagcccgatgtccatcgaagccccgccggcccccttcacctgtcattgtcaccgcctgcgacgaggttgttggctgacatttgcctataaagccgcagacatggccatttcgattgcaattgcgaatgcgaaacgcgaaatgcgcaaaatttccagttcctcctctcgtattgttgccacatatttcaagtgtcaaacgagcaaattgcataccgggctccctcctcgataccgaaactctatttacatgttctgtttactacctgttagcaacccacttaatgcgagtgctataattaatgagccacgagcgtgtcagaagtatgtttcagataattcatcatcgaagtcaaaggaccaaatgcgatcttccggtgcaccaataaaaaacgcgtccacaaccaaatcgggaagcaaaggacgactcatgtctgcgtctgtgtttttgtccgtgggtcgtctgaaactggactgcgatcggcgactaattaaaaacgcttcgatatttatggctactttaatggctaagacgacacaatgtacgcccagaaccgtgaacctcaggctgcgtctggagccggcatgcgtaaattggattaatgcatttgattcggcccaaaagacgccagcgccaaaagcctcaagctcgctgactttgaggctcagtccgaatctgaatctgaattcgaatccgagtctgaagtgtgacaattgtctgagggcccggatcgcgagttcttggccagcaagcattgttccaatttggtttgttctgtctggaaaggcactcgatgtggttgcttggttgtggttcctgctgaagccgccgccaacggggatccatcatcttttgcgaagttatgtgcgccttattagcacatcatttaagcgagttactcgacacttctccacgtccatgtcgcatctcatctgggcccatgtggatgtgccacgaccgggtccatcagcggcagtcgctcgggcacttccttatggccagtcgagcgtacataagttattccctttggaaatgaatacatacgactggctgacaggagcgcaggagctggacttggtgctgcagttggaactggactcgaagtccgagtttgtggatggccggttggagtccgaaccaggggacaagctctcttttggccggctggagctgcgtggccataaagtacccaccaaagtcgacacactcgccatggaaacccatggacaatcactaacactcacccccacgcagcgccattctgcagagtcacaaacagttggcagcgcgctaatttgtaagcctttgctgcatttggaagctgataagactcgtagatttcgaaagaaaaagccagagaaagagtacactgagaaaaacgcattcacgggtgtgcaggatagaaagagagagctgcctgctggccatattcgtagagaaactttttgttgttgggcgtttgacgatcctcgtttgatgtttggcggcgacgacgcgcatcacgaagccatcaaatgtcaggcggtgggcagcaccaccattttggccacatgtgaagggggaaatgcacacacttggccgtttatttgtgtatatataattttgcggtgtaacaagtttttgccgcctgacagcagcggaggagtcgcaactaaagctaaaatgcgaaaagtaaaaaggcagcggcagaattcttgtttccactcgagatgctggagatctctggaaacgaaaattcaaggtgttgaagatgatcatcgcactttctcgctcgctcttggaacaatgaattgcacaaatgtacgggcagcagcaacagaaaaagcagaaccatcccggccaacaacaattgagccgccatccgctgatgatcatcgctggccaagtacaattgccaccataaagcctcatccccggcctcatcccaactctcatccatcgatcggatcgcctgctcagagcagcaccaccacctctgggtcccccatttcgcccttctaccacttggctctgccgattgccgcgatcaatgatcgcaattctccggtctccgggtctcttcagtaccttcttatggacgcttcagaccctggacgccctcctccgccgactggcgatgccacttgtacacttgttgctgcgggtctgcggtcgatcgcatttcggttaatttcgtttgataccctaacttcgggtatttaa

SEQ ID NO: 27867 - protein, 906 aa, DROSOPHILA
MQTHRIKVLGQAGQDSGSRRSWPEKKRKTAKKTQKNPASNKGRRQKQQPSCPESRTFGQVKVTCKVAGMSESRNVGGVENSSQPQLVRIIGDPGRVAAETLSTRGWPTSRCRGELGALLPTPRGVHWKQVGRIFCTGSEFIPAISGWQTDLQIDRLIQRQLAARSWLVHLSSPVSPMSIEAPPAPFTCHCHRLRRGCWLTFAYKAADMAISIAIANAKREMRKISSSSSRIVATYFKCQTSKLHTGLPPRYRNSIYMFCLLPVSNPLNASAIINEPRACQKYVSDNSSSKSKDQMRSSGAPIKNASTTKSGSKGRLMSASVFLSVGRLKLDCDRRLIKNASIFMATLMAKTTQCTPRTVNLRLRLEPACVNWINAFDSAQKTPAPKASSSLTLRLSPNLNLNSNPSLKCDNCLRARIASSWPASIVPIWFVLSGKALDVVAWLWFLLKPPPTGIHHLLRSYVRLISTSFKRVTRHFSTSMSHLIWAHVDVPRPGPSAAVARALPYGQSSVHKLFPLEMNTYDWLTGAQELDLVLQLELDSKSEFVDGRLESEPGDKLSFGRLELRGHKVPTKVDTLAMETHGQSLTLTPTQRHSAESQTVGSALICKPLLHLEADKTRRFRKKKPEKEYTEKNAFTGVQDRKRELPAGHIRRETFCCWAFDDPRLMFGGDDAHHEAIKCQAVGSTTILATCEGGNAHTWPFICVYIILRCNKFLPPDSSGGVATKAKMRKVKRQRQNSCFHSRCWRSLETKIQGVEDDHRTFSLALGTMNCTNVRAAATEKAEPSRPTTIEPPSADDHRWPSTIATIKPHPRPHPNSHPSIGSPAQSSTTTSGSPISPFYHLALPIAAINDRNSPVSGSLQYLLMDASDPGRPPPPTGDATCTLVAAGLRSIAFRLISFDTLTSGI

SEQ ID NO: 27868 - DNA, 5998 bp, DROSOPHILA
caggtccgagctcgacttaaggatcaacgatagatcggattgagagcgctttaagccatatgacccgctcgtgcagggctcctcattctgattgattggtttaggtatcaacttgcgcagttcttgcacttccgccgccaagaaatccaggcgtgcctcaagtctggtcagtacctcactgggtgtcagttctgaaacgggagtggtcgccacaatgggtccatcggcaaatccatcagtgcgttgcctcgcatccgatggcaagaattggggggaactggttgccgcatatagtcctctgttatcacccacttgttctgcctctatataatgcccaggtggtgtgtgatactcattccggtgggtcattatgtcacttaataagtctgctgaaagtggcacaattcgcttcattccggaggattttactttacttttaatttggaaacaaactagttgaattatatctgaatacacatgatatggcaaaaaaacctttgatttttgattgaaagggaaatggacactgtgcagtgttatatatattagttcagagaattgtatgcatagttttttggtaattgtaaatttgcagaagtatataaaacacgactaggtttattgtaataccaagattccctccgaaggtcaaaatttttttaagttttgtagcttgttactttaaattgattgttctactgcctattagttggaataagcaccttttataatgttgtcaaatattttctcagataaacaaaatttgaatgcacacaagacactaaggaaagtccggcaatccgcataatttcaaaggagttccttcgaaaaattgtcaaatgttgtagggtcctcggatacctggcaacagaaatggagctcggaagagacttcatcaaaaggacgttagaattgtcacgtatgtgaaataaatagaaattatatccactcgctaagaaattccttctgaactcagaatgccaataatcaagaagttctgctattgttttagtctaagaattggcgcattttcaattgcgtacgcaggtcttacaatggatgtattagatacagtagcgactatatatactaagtcgcaatattgcgctgatatactactcctctggataatttccaccatttggaatatcatttccgcattggttcttttgactgcactttttcgggtaagatcaatctgccatgatacatttagcatcactaggtatctgagcatcctttgtttcaggaaaatccgcatttgctgccagttcatctggtgacttctctttgtggcctgatgctcgaaatgaccaatcacatggtgattgcctcccttggcagaaccgattacgttttgatatcctatgcgttcattatgattgcctgtaagtgatggccccctcttgatcacatctacttcaaaaaaaaaaaaaaaatcgcccacagttgtatctgcggacgtcgtgatcgtgctgagctactaccaatcggaggtttagtgaaccactccgattacccattaacccaggcaaccgaccgggcgcagcatgtagcattttgtggtgcgcgattaggcgcgaaaatttatttggaaaatgttgcgcaatccgcgccgtgcataaatcgtggccaattgtcaccagcggattggcaaccgaacctcagcgacctgcgtttaattatcgccccgccagcgcccgccgagctacatgcgtgctaattgaccaggctgcagctcaacgctgctccaatccgaaatccgaatacgaatccgactccgactccgaatccccagtccaagtccacgtcccagtcccagtcccagtcccagtccaaatgtccaaatgataaccgcgacgatgaaaacgcatgctgagccaaatgaaaattatgttgcaatggggcaggcgtgctgctcgctggctggtcagtgaaccgcagtttgcaccaccatccatccatggggcttaattaatttccttgattaattgaaagtgcgccttgctcgcagtattttcgttttctgtcttgctttttttttttttgtttatttctgggccatggtatgtttatgtgtatttttggcagtgcaaagttgaaggcaataagaaaaatcgccccggattcgattcggtagtatgtgatgggcgttgccctggccaacccttggccattactcttggcccgaaccgtacctttccatttttcctcagctggtattcgattatggccggaattatgatccttgttggttggattcggtgcaattacttcgggatgccctgtaaaatgtaagcaactttttaagttgttgtttaaagcgcttaaaaaataagtcagtagaattactcttcgaaataaaatcttaaaaaacaatgtctctatacaataccattcgggtcattttcaacataaacaatgatcatacatcaccagcgaatcggaaccataatctttgaccttgtcaacccactgagagcagcaagtacatcaagataaattaagcctcaattgtggattcaacatcaggccaactaacatccatcattccagttttatggccgcacaatagaacccggaatacccagcgagtcaattttgcagcggcaactaagttgcaattcaacttgcaacgttcaccgaaaattcactgatttcataaaatattacgataaatgtcgctttcaacatttataagccaaaaggattttaatactttattgcttataaccgcaaagcgacagtaaatgctcctactttaagaaacaaaatgcaatcgcattgaggcgaatcgaaaataaggaaaacaagaaaaatgaattgtcttcattttgtaatttaatggtattttattgaatttctgatgcgaatgggcagggacaaggcggattgcccccatccttggggtatctgtatctgtatcggaatcgggatcccatcccatcccatccgatccgatcttccccagcctgttgacatttaaaatatggccgcgtgtcaatgcgactgccctacgcccatttttaagtcaggtttacatttcgatttcggtttcgatttttaattcgcaactcgcccgaaatcccagcgtaaattcaatttgaaggtccgaaggaaggcctgcagaaaaatgtgctttcacttgacccgcaatgctgcgtaaataaattttatcgcatcgctgacacgtgcgcgtaatatttcattaaatttaaaaactacaccaagggaaatatgcaaaagtaacgaaaaaaaaaaaataaagaaaataaatataattgcgttcggttcaaaacggcagcataaacaaatcggcgattgcatcgtaacttcgttttcaatttggcaagtttgacacttggccagttagtgagtgtcccgcgatctccgccaggcattccaagtccacctcaccagtccgaagtgtgtgccacctacgttgggccaaactaagagtccagcttttccacctggagtcaacctgtcgttgctactgccgcctgccactcacttgccggcagtgcgtgctgcagttgctcctgtggctgctctgattgcgaatgccaattgttggcgaagcaatgccaatgtttatgatggctcataatttgtttgcccgcggctaggtcgtaaatggagctcaggatttatgcacaggccagtctaattactaaagtaaatggtgaatggtatttaaatttaaatattttcagggttattaatttttatactttcggttgaattcttcataaatgtccggtggtttgtaatgttttttctgggccttgaagacaggaaagttttatcctttacaggaattctttattaaaatatctatacaaattaatataagggcactgcaactttgaaagtttagtccatacacacatttacagcactaaatacaaaaaaaaaaaaacttgacaaaatgaacgcccacagagacggactaagtcgcaagagtgatgtacgcctattatgaataatttttaaagactggcaagaacgccataaacatatggccattatgctgtacgctttggctaatggcccgcctgccactaagcccactgaggtgagaggaatatgtacatacatacacatgtttcggctcttcccgtgccggagcagcacttccaatgagctcgtaaaactcgccgggctgtgggacgattgcttccagagcttctttcggtgcttactgatgtcttagatgcaactacaagtgctgctgctcccgctggtcattagccgagatggcggcacgcacccgatgcggcttggagttgggtcatttgtgccgacgaatggggcgtctcttaagccgatgctaatttccataatgcacgccttgatggcggccaacaggtcctgatccccactgcgttttccacactctgcgaataaaaagtgggggttatgggtctgggttttatacgctttacatatgtaagcttacaagttcatttgtaattcaagttcaagcacccaaaaaatactctctatatatgcagtaagtatttttgaataatgttttagttttcagtgtgctatcacctcgaaatgagtaaatgtctgggtaatctaggaaacttagcttgcggaatggtcacgtgatacgtcaggtgcgggagaaacctattctgaaatacaaaaatgagtattttgcaatcaaatgaaagccaaaatccaatttaggatcgcctccagttgacacctccgtggcctagagactccacttgcctcgactgtggccctggccatggcgatttaatggcttcgcaattggcctgacccatctgtggaccaggccaagtgccaggtgatcgtggccagtatgactgcgaatcgtggagcggagcaggcggcttttgtcgctgtccccggcaacatgagtatgatttattgtactttatgtggccggagcagcttctgcccgcagttcgtgatggcttcgctggcttcgttagtcgcgttcctgggatctggatgcattgctatatactctgtacatgggtatttggaaagtgttctgtgccaggagtactgtatttttggttgtgcttagcatattaagtggtaacttatacatgatgacctaaggaatatgcagcatgaagcagcaaatcacacgatctatttatataaaataaggactataagctcacatgatattgcaagggtattacaaagtacggttctaaaacttaaacgtattttgcttttttgatctgaaaattctgcacttggccgtgcggcgattatgtgtatcatttttctttgccagcggctgggattctacgttattgtattttatattatttgtgcttaatttggggagcacaggtaaggagcagtgggagccgtgcacctgatcccaagagtgttgtgactcttgaggccgctggacaagttcgttgattcgcggcaggcaaatgaccatgtgctcctcaacattttgtgggcaggagcacttggactattagccaagatattttccctcccctttccttttttttttcgtttttttccttttgtcaattcccagggacttttgcttggccaaggaacgagatttatgttagtatggtgtcagtttaagttaatgggttatactccccgccagttttttatttaatattttataggcgaacgttttttgtgcgtctcattcttatttttatgcacaattttattctttttcctttggctgctgcgcaggtgaattttttttgaatttatgaccataccttttaaattgctttgtggcaatttccgtggcacccacacaatgcgagaagttaatttattagtaaactcaatgtttcaggtttgttatgatttttgttttttagctgaaaaacgacttaagtatatatgtataatctatataatctatctatataatctatatttttccctgcttaacgagttgctattaaaaatctgacacattaacttttagtaattttcgcgtatgaatatgtatcacaaa

SEQ ID NO: 27869 - DNA, 1149 bp, DROSOPHILA
atgcatccagatcccaggaacgcgactaacgaagccagcgaagccatcacgaactgcgggcagaagctgctccggccacataaacgacaaaagccgcctgctccgctccacgattcgcagtcatactggccacgatcacctggcacttggcctggtccacagatgggtcaggccaattgcgaagccattaaatcgccatggccagggccacagtcgaggcaagtggagtctctaggccacggagcgggagcagcagcacttgtagttgcatctaagacatcagtaagcaccgaaagaagctctggaagcaatcgtcccacagcccggcgagttttacgagctcattggaagtgctgctccggcacgggaagagccgaaacatgtgtatccgcgggcaaacaaattatgagccatcataaacattggcattgcttcgccaacaattggcattcgcaatcagagcagccacaggagcaactgcagcacgcactgccggcaaggcatcccgaagtaattgcaccgaatccaaccaacaaggatcataattccggccataatcgaataccagctgaggaaaaatggaaagcatgcgttttcatcgtcgcggttatcatttggacatttggactgggactgggactgggactgggacgtggacttggactggggattcggagtcggagtcggattcgtattcggatttcggattggagcagcgttgagctgcagcctgatgtgatcaagagggggccatcacttacaggcaatcataatgaacgcataggatatcaaaacgtaatcggttctgccaagggaggcaatcaccatgtgattggtcatttcgagcatcaggccacaaagagaagtcaccagatgaactggcagcaaatgcggattttcctgaaacaaaggatgctcagatacctagtgatgctaaatgtatcatggcagattgatcttacccgaaaaagtgcagtcaaaagaaccaatgcggaaatgatattccaaatggtggaaattatccagaggagtagtatatcagcgcaatattgcgacttagtatatatagtcgctactgtatctaatacatccattgtaagacctgcgtacgcaattgaaaatgcgccaattcttagactaaaacaatag

SEQ ID NO: 27870 - protein, 382 aa, DROSOPHILA
MHPDPRNATNEASEAITNCGQKLLRPHKRQKPPAPLHDSQSYWPRSPGTWPGPQMGQANCEAIKSPWPGPQSRQVESLGHGAGAAALVVASKTSVSTERSSGSNRPTARRVLRAHWKCCSGTGRAETCVSAGKQIMSHHKHWHCFANNWHSQSEQPQEQLQHALPARHPEVIAPNPTNKDHNSGHNRIPAEEKWKACVFIVAVIIWTFGLGLGLGLGRGLGLGIRSRSRIRIRISDWSSVELQPDVIKRGPSLTGNHNERIGYQNVIGSAKGGNHHVIGHFEHQATKRSHQMNWQQMRIFLKQRMLRYLVMLNVSWQIDLTRKSAVKRTNAEMIFQMVEIIQRSSISAQYCDLVYIVATVSNTSIVRPAYAIENAPILRLKQ

SEQ ID NO: 27871 - DNA, 3920 bp, DROSOPHILA
gaaaacaatttgcacttttggccaactttctcctttctaattgcccgattttcctttcgtttttcgcgccgaaaagataatcaaatcgacggagcgcgacttaggcgactaattacgcctcgtaaattggctggcgaggatttggcgcgttattcctggcgcttccttgattcgcttcacgcgactaaacggccaaatccgccgacggatgacaggattctgaagcgaactgctcccctgctggggcttcctgccgagttgtgtttgattttgcgcccgacagtttcgccaaagagatgatggcgtgaggggtgacgactttgtttattgttcacacctcgggaattagtcatatctaaataaacatttatttaggtaattactaaatatttgtatttgcactgagctcaatttaagttggttcggtattatgaattacttagtgcatacgatcgagatcgatgtaaatggtcgtggtccttgcagtcacgcggatcacgagcagtcctagtcagtgaagtcccaatcccggcggcactcatcaatatgcatatcactgctcgccggaatcgcgtgtcgattgtgggtaaataaataacacgaaacctatttccgattcgccagctccactggctggagggcagaaggtgctcccccctcaggggcaattgcagttgaacatacagccgagtttccacaataaacacattggcgaacgatttgtatttgtcgtatgtagacatttgcccggcgggatgagtgaagtggatctctttcttttgtgtctgggcccaatatatatatattcatatatatatatatatgggtaaataaatcggggactcgaatggcaacagtagttcttttgtcaatccagccaggatttaccgagtatatactgtaccgagtatatatgtgaaggcgaatgtcgtttaccacataagaagaaagttctatgtgctgaaacgtaaatcggaaatgtatttcaagctcataatttggttgggatatgaaagaaactttatttaaaactagttcatttcattaaaactattcatttcagcaatctgtgattctagtttctgtttaaccatatatagatagatatagatttgagtggagttgagttttcgtggcgaacaatcgcgatgataaataacttaagaacgacaaactttaagctaaactatacaaacttcttaacgtggcttagattagactaactgtttaggaggcccaacaagtgacatagttacttggaggtcctaaacgttgtagttgtgtttttcgttggtatagttttagttgtcgttggcttgtttgaaggtttaggtgttggttgttgtttgtttgtttttgccgtggctcccgggattttggtggttttggttggcttccttgtttgggaaggtgttttcgtatcgcattcctgcatttgatatgacaaccggggttattggaatcggctattggttatttgcgatgcaatcaaagccgtcagatactcacaatttccacttgattttgctcctgctcgaatttccgtgcaaacatatccgcaatggtcgtacaaaatggattttctttcgaggattcgtcgtagatttcgttgtaggagaactccttggaaccctgaaatgatgcacatatttttaatatgcatttcctgcaatcctgcagaatagagaagagtcttaactcaccaacgagcagatgagttcggcgatctcccttagaacatcgctatttctttgaagaacgctgctttccgattcaatcctcgcctccagctctgaaattttgactttttgcaaatagggaaatagttatagcaaaagtatcgagaatcggatatacccacttttcgactcggtgtccaggcgctggtactttccgtgcagttctcgattaagttggctaaggttgagcaggcgtctacgtagagcttccagcatctgagcatccgcgtccagatcacagggccctgattcgggatcaacggagattaggcaggattgatcgaggtctgactgaaggattgtcagatgactacgaatgctctcgagttttttcagagtgtcctcacgctcggatacctttgattaagaagggtgtaattaatgaggatatgctaaagctcagaaatatgtaagtcgaatccctcaccagtttttcgataaagcaggacacacgttttcgccgaatctcaatggtctggaactcctgtttgttgtgcagatcgagaagatcattgagctccgcgtttagcagccgcagcatttcgctctcctgggtgtcgtggatcgagagattctcgagcatatcgcttgtaatcgcgtccgcggtcagtgtatcgttgggcgattcctccattttggcctgatctctggactcaatgcaccgggtgatctcgtgcagctgttttcacggtatttggaatgttaaaaaaaagctagttagaaagtttcgatgtgctttttgattgaatacactgaaaattttaccaagaaattcggtatttcactaaaaagatactcgattaggttttcgattgtacgcttaagcagccgattaagcgataagaaaagtattccaatgaatctataattaaactgagctcaataatgagtaacgtcacctgacgacgatgatgtttttgttttttgtttttaaaacaacgaattgaataaattccttccataagcacacaatgcacatatgcagatttctggttgagtaatgccacaataggatatctcacctgttgattgagctgtgctatgcactgatccttcaaaagtaacttctgcctggccgtgtgtacaacctcgtccaaggcattgatctgtgacttcagttcgccgatctcgtcatgcttggcggctatctcgccgactaaggacttcatgctctcggacatctgcgaacaaagttaaacgccaatcaaagccaagcattaaatatcgatgaacaaaatatcaaattttattaagagcagcacaaaatatacgtatttagttagcgagacaatcatttagagttctcgcgcttgtgggacgacttcgggtcccacttgacattggaatcaccgccgccttttcccttcaaggatctatggcctaccttctcgctctcgcattccgcgtgggcgggatcctttcccacgccccgcaattgattaacggtcagtgtctctagggaaatgccattgaaatcaaagtcggtgcagtgaggagaatgctgcacgcgttctatgatcgcacaaatgtcctcacgcagcctacgattctcctcgagggtatgctgttgtcgcacttggacagactgacagcaggcaacgatcttgctgtacgcctccttctccaagtccgacacgttgcccaggatcacgctgttcacgtggagcaggaaatccacccactcctgaaaagtgaccagacgcaactggcaagtgtgctaaaagggtatgaaaatgggtcatataaaataatttatctcaagggggattttgctaggaattagtttcaatggataccatccttgatttacaacgaatctcaccatgtcatcaccctcgtgctcatctaggcagtcaatctcgtccagccgcttcagaaatatgctgttcagctcaaagctcatatcgccagcatcgccgttggtatcccgcagcttctggatcagacagcggtaatgttcggtggacatcgcctcggtgctggcagtgcaccgatcaggagatgaggcttttagcgtcgattcttgatgtggatgcgaggcactcgttccggttggctgcacttgccgacacatttgactggcagatgatggtggtggcggtggcgatgatgcaggtctcgacggattcagacccatggacttggcgtctaggacgaaaccggcttggcgactggccatga

SEQ ID NO: 27872 - DNA, 1287 bp, DROSOPHILA
atgtccgagagcatgaagtccttagtcggcgagatagccgccaagcatgacgagatcggcgaactgaagtcacagatcaatgccttggacgaggttgtacacacggccaggcagaagttacttttgaaggatcagtgcatagcacagctcaatcaacagctgcacgagatcacccggtgcattgagtccagagatcaggccaaaatggaggaatcgcccaacgatacactgaccgcggacgcgattacaagcgatatgctcgagaatctctcgatccacgacacccaggagagcgaaatgctgcggctgctaaacgcggagctcaatgatcttctcgatctgcacaacaaacaggagttccagaccattgagattcggcgaaaacgtgtgtcctgctttatcgaaaaactggtatccgagcgtgaggacactctgaaaaaactcgagagcattcgtagtcatctgacaatccttcagtcagacctcgatcaatcctgcctaatctccgttgatcccgaatcagggccctgtgatctggacgcggatgctcagatgctggaagctctacgtagacgcctgctcaaccttagccaacttaatcgagaactgcacggaaagtaccagcgcctggacaccgagtcgaaaaagctggaggcgaggattgaatcggaaagcagcgttcttcaaagaaatagcgatgttctaagggagatcgccgaactcatctgctcgttgggttccaaggagttctcctacaacgaaatctacgacgaatcctcgaaagaaaatccattttgtacgaccattgcggatatgtttgcacggaaattcgagcaggagcaaaatcaagtggaaattgaatgcgatacgaaaacaccttcccaaacaaggaagccaaccaaaaccaccaaaatcccgggagccacggcaaaaacaaacaaacaacaaccaacacctaaaccttcaaacaagccaacgacaactaaaactataccaacgaaaaacacaactacaacgtttaggacctccaagtaactatgtcacttgttgggcctcctaaacagttagtctaatctaagccacgttaagaagtttgtatagtttagcttaaagtttgtcgttcttaagttatttatcatcgcgattgttcgccacgaaaactcaactccactcaaatctatatctatctatatatggttaaacagaaactagaatcacagattgctgaaatgaatagttttaatgaaatgaactagttttaaataaagtttctttcatatcccaacc

SEQ ID NO: 27873 - protein, 344 aa, DROSOPHILA
MSESMKSLVGEIAAKHDEIGELKSQINALDEVVHTARQKLLLKDQCIAQLNQQLHEITRCIESRDQAKMEESPNDTLTADAITSDMLENLSIHDTQESEMLRLLNAELNDLLDLHNKQEFQTIEIRRKRVSCFIEKLVSEREDTLKKLESIRSHLTILQSDLDQSCLISVDPESGPCDLDADAQMLEALRRRLLNLSQLNRELHGKYQRLDTESKKLEARIESESSVLQRNSDVLREIAELICSLGSKEFSYNEIYDESSKENPFCTTIADMFARKFEQEQNQVEIECDTKTPSQTRKPTKTTKIPGATAKTNKQQPTPKPSNKPTTTKTIPTKNTTTTFRTSK

SEQ ID NO: 27874 - DNA, 3131 bp, DROSOPHILA; identical to SEQ ID NO: 3994

SEQ ID NO: 27875 - DNA, 5304 bp, DROSOPHILA
cacgagcactccgatgaacgacgagctgaaaaaataattattattttaaattccgttttgccagcgaaattcggtgcgtgcgcgaaaaagagtgcggaaaagcgcggttgagaaatttaatcggcccattatgaagcggtcaaagtgcggcgccaatgcaaatggttagccaaatggcaagaaatatgtagcgatagcgtgccagcccagtaaaatcaaatagaatcaaatttaagtttcttgctttgcgaattatgaaaaaccaatcgcaatgcgtgtgtgtgtgtgtacgtgtggtgcgtgcgcgcgtgtgttagtgagcgagcgtagaagcagaaggcgtagcgagaaataaaaataaaaaaccatacaataattgatttaaaaaaaagaaaagcaaaaaggccaacaaacgaaaaacagcagaagcaacaaaaacacacgacaagcggcagcaaaaacaacaacacaaaactggcggtaaatacgcatacagtacgatacaaaaaaataaactagaagcaacaacaaatacgcaacgtaacgggaactctttgacgtatttcctctattattatgcaaaaaggcaggcggcaaattgcagcagcagcgaaaatcaaatataaatagcgaaaagtatactggagtatacacacatttccgcagcgtgttgagcacgccacaagcataaacaaaagtgagcaacaggaattcagctaggattcggcgtgaaacgaatacgaaaaaccatacgaaatggcagcggttcgaggacatcagtatttcagtctgcgctggaataactaccagaacacgatgacgtccgtgtttcagcagctgcgcgaggatctctcctttgtggacgtcactctgtcctgcgagcatggatccctcaaggcgcacaaggtcgtcctgtccgcctgttcgacgtatttccaaaaactactgctcgagaatccgtgcaaacatcccacaattatccttcccgccgacattatcttcaccgacctgaaaacgatcatcgattttgtttatcgtggtgaaatcgacgtcaccgaatcggaattacagggcctcttgcgcaccgccgagcagctaaagatcaagggactctgcgaaaccgccgagaacgcggatgacctgaacgacgcggccactgcaacgatcacagtttcagagaacatacagcaggcggtcgttggcaatatagtgaacgccgccatagttcccggagctccgtcgccctccttggaacagcagcagcaacaccaccaacagcagcaacagcagcaggcgcaggagcagcaccagcaacagcaggtgcatgcccagcagcaacagcagcagcagcagcaaataaacgctgccctgcttacgcaacacggagtgtccagcggaagtgtatctctttccgggcaattgctgagctcctcggctagcggcagcagcggaagtttagccggcggacagcaggcatcacagacgccatccggtttgcagccgacgccgcgcaagtctcgactaaagcgctccaaatcgccagatttgtcatcgggcggaggagcaggaagctctggaggctcaagtagcggctcaacgcagcagcaaccgcagccggcgcaccaccaccacccgcagaccattctcatccagggccaaaatccgaattccattgtgagccttcagcagacggccgacggcaattacataccagtttcgggttctggcgacgattcagacgccgaggaccacgagcacgaacacaaccacggacacgggcacgggcacggaggacatacgcacggacacggtcatagccacgagcacagtcacgatcacgagcacgaacataagccgaacaagatctgcaagaccgagcactcggtggcctcgccggcgtccaattcatccagcgcctcgaacaatgcagcgggcgtgagcggcgtgacatccaccggccaagccatcgtcacacaaattgtagtagcgcgcgacggaaaagatacaaaaaatatgactagtttaggcatgggcatgaacggcggcctgttgggcgtgcccatgggattcctggacttcacacccgagccaccagcaccatctgccaccccagtcaccgtcacggagcacgtcgatctgtcctgcaaccctagcacggacacgcgcgatctatcaaataccaccgaaccgctcgatatagacaatcatctggctcagcagatccatcggctggatcagtcccccatgcactcgatatcgcaccatcatacaggcgatgagagcaactcgaatctggtgcagcatatcaagagcgaagtgatcgaggccaagcacctggctgcccagcatcatgcacttagccaggcccaacagcaacatgcccatcatcaggcccaccagcagcatcaacagcatcagcaacagcagcatcaacaacagcagcaacatcttcatgcccagcagctcttggcccagagtcagctgcagcagcaacagcaacagcaacagcagcagcagcaacaccaccagcagcagcaacaacaggcagcagcagccgccgcagcagctggtgtgcatggccagcatgggggacatgtgacgcatgccgacatcggcggtgccactgtcatggagattgatccgagccagattaaacacgagccgggcatgataataacgccagagattgtcaacatgatgtcctccgggcatatggacatgtataactcggatacgagtgaggattcgatgatgatcgccaacggttcgccgcacgatcagaaggaaccgcactatacgaatttggatcagcagcacggtctgggtggcagcgtttgcggcccggggcccggcggtgctggtggcggtgggggcatgagtggtggggctggctctggctctggcgagaaagatgcattaaagaaccaaaacatgagcctgacgaaagcatccgccatttatggcatcccatcgaccaccctgtggcaacgtgctcatcgcatgggcatcgaaacgcccaagaaggagggcggcaccaagtcgtggaacgaggatgccctgcagaatgccttggaggcgctgcgttcgggtcagatatccgcgaacaaagcgtcaaaggccttcggcatcccatcctcgacgctctacaagattgcacggcgcgaaggcatccgccttgcggcgcccttcaatgccgccccgaccacgtggacgcccgaggatctggagcgcgccttggaggcgatacgggcgggtaatacttcggtgcagaaagccagcgctgagtttggcatacccacaggaacactttacggacgctgcaaacgggagggcattgagctgtcgcgttcgaatccaacaccctggtccgaggatgccatgaacgaggccctgaactcagtgcgcgttggccaaatgtccatcaaccaggcggccattcactataacctgccctacagctcgctctacggccgcttcaagcgcggcaaatacgacgtggtggccaacacgagtggcgtggcgctattgaacacctcgggcaacaccaccggcagcattgagattatcgagcacagtcaggagaattcgttgcatatgttacagcaacagttcccgtatagtccgtcgccgcatccgccaacgccgcagcatcacagcacgccgcagcaccacagctcggcgcagcagggtccgccgacgccgcagcacatgcagcagcacgtggtgcacatgcaacagcagcagcagcagcagcaacagcagtcgccccatccgggccaccatccgcagcatatgcagcaggacgtggttacatcgagcagccaggtggtgcacagccaacagcagcagcagcttcagcagatctatcagcaccacgggacgccggagcgtagttgagaatcactgcatgctgcgacattaatgggcagcaccggcggtggaggaggtggtggggttggtggagtagcagccagcactagcgacggcacggcggccagtagcacgccctttgccagcatttcggcgctggtcagcggaccgtccagtgccccaccaccgccggtaactgccagtggctcgtcggcagtcagtggcggcaccagcaagcgcaagaaagccaataagcaaaagcgttgagagcaggaggatgatcagccacacagggagttggaaacaattgcgggagtggccaggcccgaggacatcaagtttagatttaattgcaagcactggaagcgcaagttgcggcagtttcatttgctattgtccaaacagtagtcagtcagtcagttaggaaggtacacacatatatgaatgacccacagacaaaaaattcccaagggtaggataaagcaatcacaaaaccacttttcaactagatggacattaattacacaaccgagatgtgtataaaatgtaaatatataacgaaatatgctttatttacattatacggaacatagttatataggttttaggttcgcgaaagtcctttgttctagttaggtaaggtaaggtggagaaagaagaaagttaagaaaacataccttgaacgtaagagaatgatgaattttagatttgcctctagactcgaaagttaatggattcgttttgggctcgcagttttaagagcactttgttatcaatggatatagacacgcgtatttattttggtctcgcgaccattctgagaaccttgaatcggcagttgattgtggaatttcgaactagattgttttcccttcaatgtgcttatgtgctttgttataattttcgcttagtgtgagactgaaagtgcgcctaaaactgttgaaaaaccccatgcccaatattatagtgaagacgcataaaacacaacccatacatgaatcaaatgctttataaccatattgtttgaacagatagaacgaagtgggagaataccttaacgtagaattaaaccaaattatcaaggttctagaacttaaatcattagcttgtaacgataaaagaaagcaaaacgagttatttgaattttactggaggcgtcctgaattttggattgtatattgatttgatttcaactgaattaagaatatagccaataaataaatgtagaaatgaagtaattgcaaggaatcaacaaatggaatgtatttttgaaagaaccggaaacagaagcagctgaaattagcgaatcaaactgcaaatgttgttaatactaagctcttaaataatgtcctttgaagtcacattcaaacaaagatttaaaacaagcttgtaagaaaaagaaaccaataaatacacacgtatatatatggatac

SEQ ID NO: 27876 - protein, 1046 aa, DROSOPHILA
MAAVRGHQYFSLRWNNYQNTMTSVFQQLREDLSFVDVTLSCEHGSLKAHKVVLSACSTYFQKLLLENPCKHPTIILPADIIFTDLKTIIDFVYRGEIDVTESELQGLLRTAEQLKIKGLCETAENADDLNDAATATITVSENIQQAVVGNIVNAAIVPGAPSPSLEQQQQHHQQQQQQQAQEQHQQQQVHAQQQQQQQQQINAALLTQHGVSSGSVSLSGQLLSSSASGSSGSLAGGQQASQTPSGLQPTPRKSRLKRSKSPDLSSGGGAGSSGGSSSGSTQQQPQPAHHHHPQTILIQGQNPNSIVSLQQTADGNYIPVSGSGDDSDAEDHEHEHNHGHGHGHGGHTHGHGHSHEHSHDHEHEHKPNKICKTEHSVASPASNSSSASNNAAGVSGVTSTGQAIVTQIVVARDGKDTKNMTSLGMGMNGGLLGVPMGFLDFTPEPPAPSATPVTVTEHVDLSCNPSTDTRDLSNTTEPLDIDNHLAQQIHRLDQSPMHSISHHHTGDESNSNLVQHIKSEVIEAKHLAAQHHALSQAQQQHAHHQAHQQHQQHQQQQHQQQQQHLHAQQLLAQSQLQQQQQQQQQQQQHHQQQQQQAAAAAAAAGVHGQHGGHVTHADIGGATVMEIDPSQIKHEPGMIITPEIVNMMSSGHMDMYNSDTSEDSMMIANGSPHDQKEPHYTNLDQQHGLGGSVCGPGPGGAGGGGGMSGGAGSGSGEKDALKNQNMSLTKASAIYGIPSTTLWQRAHRMGIETPKKEGGTKSWNEDALQNALEALRSGQISANKASKAFGIPSSTLYKIARREGIRLAAPFNAAPTTWTPEDLERALEAIRAGNTSVQKASAEFGIPTGTLYGRCKREGIELSRSNPTPWSEDAMNEALNSVRVGQMSINQAAIHYNLPYSSLYGRFKRGKYDVVANTSGVALLNTSGNTTGSIEIIEHSQENSLHMLQQQFPYSPSPHPPTPQHHSTPQHHSSAQQGPPTPQHMQQHVVHMQQQQQQQQQQSPHPGHHPQHMQQDVVTSSSQVVHSQQQQQLQQIYQHHGTPERS

SEQ ID NO: 27877 - DNA, 3323 bp, DROSOPHILA
ccttgaaaacgcttatgatgaatacacaatgatcgtgcaaaggagtcctgagcgactcataaaccataaacctgtgacttttgctggacatacgagtaaaccaggaggcctttccatcttgcatgcaactgcccactttaggggcatccatcacacggaggactgtcaatgtcaggccagtcgcgaaatgtcagtcagccaggaaggcgcgttgccaacaatcagctatatatacgctcgatcggctatatgcgatcccctcattacgccacaaaatcgaaggcaaacagaagctccactccactgccggggaaaaacaatgccaaaacaaagattggcgacgctctggcgacaaaatactattacaattatcacttgcgtaaacattgcaatgttgttaacgtggtttaaatgtgagggcgaactgaaaggggctgggtagtggacccaattccatggcgcctgccaggcgaaaaatgaaaaaacaaattccgaagagctggcagttgcgcttaatatgcaaacgtgatgcaaagctgcgaggtaaaggttgttgggcagccactggaggagtcaacaggggggaaaaccccagaagggaggacttttggggcatgaaaatggagtagcaggcaaaggggagtgaacgcctgacagccgccaaagtgcaaaaatgcgaacgcgaaacgagggcagggaatgcaatttgcaaccactttgtctttgtcactgcgtcggctgaacttgtggggcatattaaaataactaaaagtatattagactcgagtaaattaaataacacagcaataagcagatatttaaaaaatagctctcaaagaaaattaaaaatttgtgagccaaaatttattcctttagggacataacagccatatcctataatccatatacgtttgctgtcaactatcgacttttctattatctgaaaactttgctaaacgatttccatttacatggattacttctacttattgagcccagattagcataggaattcgcgattgccccgtggcatactgagcagatgggaaatgcaagtgtcgtggaacgtcaactcacctcttcgtcgatgggaactgccgcggaatttgtttggcgagaggagcggcggtcgaggcgccatcatgctgggcacctcatccggagatcccagtcccattgctccagagttctgttgatgttgctgttgatgctgatgttgggcccagtttcccagggaatggcgacgagttccgccacttggcagggtgtgatgtcgatgcgatttgctactgaggattggtcgcaaagatggggggtggggggagaaaagaaagggcgcacgattagcatgggcggaaaagggggcggttcgaaactgtcaacagctgcaatcgcatcctgtcatcacctcaccctccccattaaatgctcgattctggggattgctcaccttgttggcgatgtcagcggattgaagacctcgtcgtgatccccagctacggatgcacctcctcctccgggacactgggagctgtgggtctcgttgcaagaattcaggcgttcccggaactctgagtgcgaatttgcagatcgctggcggtacatgttcatcgtctgcagttcaatcgcgtgctgaaatgcgcaaaacggaagaggacggcacattagaagggctcactcgactccacaggaagtggcagatccagcagataaatcagaatcagtattccgaaatcggagatcggaatatgctctattaaatcgctactcacttgcggatagccggcgagggaattgaagctgccccgcggacttcctaatgccatggtagccgtggtatccagattggcggatgtgatcagtcgcatctgttccggattggtcatcaccagcggccgggggctgctgcccttcgagttgcgccgcttgaagatcgagaatccccggctggaggactgcgagtccggggtgcgcggcgacttggtttcattgcaaaagtaatacgggttgtctggggagttcaattgcaatagaatgaatgaggaatggagttagttttctgatttgaacttatcaaagtttgaggatgtgcttataaagtataataaataacatttatttaatatcatatatgtacgtttttaatctgtatgaatctctgtatctttgtataatctttcgcttttgctcatactttctaacttaaaactttgatatttgttacaattcttttcgcataaagaaacttataaagtctttaagaaactctttcactctttttacctgagaagaaggtgtttgtgttatccacagtgacaaacatcttgagatcctttatgcagtgaatttttccttagttgatatgcgattcgcagagtctaccacaattcagagctctgatttgcgatgcatttgcactttcactggctgcgcatgcgcacgcgccaaaagttgcgcacagggcgcgaattcgagaaaccgtaaacggaaatcacaacggggagtgccacaaatggcaacttaacaaattgtcagtttgaaaaaacggggcaaataaattcaaaattcaaatttaggcggcaatgcaagttcgtgatggttcgacttaatatttcacttcagttcacttgagttcgcgcagtgcgtgcgtctgcattgacatcccgaaacggaataaattctaaaacttcaacgagaacaaaacactccgcgccgtctgcattttcctctgccaccgccgatgtctctgtcgacgtctctgccgacgcagagaatccctcctcgtgttttggtttttatttaccatacgcgcacttcttcatccattcccattctcagcgtgcactgataaaaataaatataccgaaaaatcccaccttctcatattaatattttctttcgaattctctaagcgaaactgttaggcataattttcttaataaattcagatacaaaaaattacttgaaataagtaccacaagattttgaactggatacattaattaaataaaataataatatttaatcggtaaatttgatttctttatgtctgtttctgtgtcttcactaataaatttgtacatcattttgagagatcaatcaattctcatctcttattttctcacagtgcagcgacatcggcagcagcataaaaacattgcatctctccctcgcactctcaccccatctcgctcccgcccgcgcacgcacacacgcatacgggatcagtgtttaaatatggttgccatattgccatcacccactcggtactcccccacccctagaaaccgatcggcgatcaggaaaactcacttttcctcgac

SEQ ID NO: 27878 - DNA, 750 bp, DROSOPHILA
atgtttgtcactgtggataacacaaacaccttcttctcagacaacccgtattacttttgcaatgaaaccaagtcgccgcgcaccccggactcgcagtcctccagccggggattctcgatcttcaagcggcgcaactcgaagggcagcagcccccggccgctggtgatgaccaatccggaacagatgcgactgatcacatccgccaatctggataccacggctaccatggcattaggaagtccgcggggcagcttcaattccctcgccggctatccgcaacacgcgattgaactgcagacgatgaacatgtaccgccagcgatctgcaaattcgcactcagagttccgggaacgcctgaattcttgcaacgagacccacagctcccagtgtcccggaggaggaggtgcatccgtagctggggatcacgacgaggtcttcaatccgctgacatcgccaacaagtagcaaatcgcatcgacatcacaccctgccaagtggcggaactcgtcgccattccctgggaaactgggcccaacatcagcatcaacagcaacatcaacagaactctggagcaatgggactgggatctccggatgaggtgcccagcatgatggcgcctcgaccgccgctcctctcgccaaacaaattccgcggcagttcccatcgacgaagaggtgagttgacgttccacgacacttgcatttcccatctgctcagtatgccacggggcaatcgcgaattcctatgctaa

SEQ ID NO: 27879 - protein, 249 aa, DROSOPHILA
MFVTVDNTNTFFSDNPYYFCNETKSPRTPDSQSSSRGFSIFKRRNSKGSSPRPLVMTNPEQMRLITSANLDTTATMALGSPRGSFNSLAGYPQHAIELQTMNMYRQRSANSHSEFRERLNSCNETHSSQCPGGGGASVAGDHDEVFNPLTSPTSSKSHRHHTLPSGGTRRHSLGNWAQHQHQQQHQQNSGAMGLGSPDEVPSMMAPRPPLLSPNKFRGSSHRRRGELTFHDTCISHLLSMPRGNREFLC

SEQ ID NO: 27880 - DNA, 9291 bp, DROSOPHILA
tgcaattatggacaccgacaccacagtacgacatctgatcgtattcggtttgcttgaaagaataactaatttaacaatttagtttgtttaaaagcgaataccacatatgctccttttacatattactaagctagtctgtataagaaatactcggctagtgtactcattgtatgcatatataaaactagacagtatcgtaatttgttatgtaagctaccttccatcgtgtgttcgcatatatgtattgtatataaaaacctacagacatgagttcatgagtaaccacaaattcttaccaaaaacaaacaaagtcccgataatcgtgttttgggcaaagaaagagccgatctcgaaggctttaaattttagctcagattacaaaacaattcaattcctcttggtcagttttaccgatgttttgggtaagcaattcttaaaattacattgtttcgtttagcacttgattgcagtcatttcaaactcttcacaaagcctaggacacatctgagtattttttccgtataatatttaagttatttgcaccaaagtcgacaatgctagaatatcaattcaaagcatattttgtttataaagttacgtttgtacaattttagaacgccttccagcttttgcaacttttttttttggaaacaatcgtttgtttgtcgaatttaactcatgaaatgaatatttcagcaataaaatacattttaaacataaaaaaacatattccactacatcatgtggacaaagctgaagtaacattttcacttagcgtgttcagtttattgcattattcgatgatcttctgttttcaaaatacaaaacttcatttaaatagttcgaacaagccaagggaaaatcatgtcggctaagcgatatacttcatcaatcgctaagaaatacaatatgttatacatatatatatatatagagttatgtatatatcgaattatttatcactgttgctggtttgtgttttgtttagttgcctagttgtctactgtgcgccctgaactgcagcctctccagattccgtttcgaaaacatcgtcggattcctggccaacgtagtcaatatcctcatcgccgtgctcctcatcgttttcatcgtagtcatcgggatattcaccatactcggaggattcaccaagcgtccaggcgtcgttttccacggagtttcgaggactgtagctgttgcctccgctcgtgatggtcatattgttggctgggcgcagcacactgtgtgtatggagaacttaagttaatatttcaatcaaatagagcggttaggattattttgaataaatgcacaattcggaatgcaatcaatttgaatggcatgtgaagtgtgttctttctcgatctcaggtgagttttattactagcgagttctaagaaagcgtttaatatttgtctatgtgttagcttggtctactgactgacttttggtgtggttagcaggtttcgggattagcttggttaggttagttaaggagtggcatgttgaatgcgatgtttaggttaggcaataaacgggacaaacatttgtacacttgagaactaactaataatgttaaatggtgggttaagtagttttggttgcagcaatttacagaataatgaagattttttcgaagttgccagagcacacggaggattttacaattttgaaagattcgaaaattgcaaattgaggtttaataaccgattgtttcagtgatggtatgaaaaatcgtaattgataataacgagccatctaacgttaggacaagtaagaaattacatcttaaagaagcatattaattggaacaggaactttaaactttcagtagactaatggaataataaagtgagcatttcgtataatttttcatagaacactttaatcaatggtttatcacctcattttcaatttctacgatgcgctactaatgcaaatttagtaaggaatgcgcccaaaaatgattatatttcgtgctgtacaaaaacataatcaccatgaggagacctttaaatgttttatgaagttagaattgatgcggttagtttttcaatcttcgagagcattttattggtcgaattcgttgctcagccaaataaaaaccaaatgaagccgcacaagacaaagtaactaacgaactgacgaacaaacaaattggtcgagacaattgcacaacggcgaacaacaacgaaatgattgagttgtatgcataaatatttaacaataatactacgacatttttgataaagattgctctattacattggcaaatgatagccccacatttggcttcgggttggctgtcgttactaagcatttcattctagttgtcgttgcattggaaaatcgttttttttattttctttgtggatactacgcgagttagatccgttctcaaaatgatcgttgttcgattcgattcgattcggcgattgtatctgacactagatttggattctagtgatacaatctgctgctgccgctgctgcttgcaccatgttagatcgtgtggcatgtttttgtagtggaaagtatttggttttcttttttttcttgtttggtttcgtggaaagatagtcaactgaatgtttagtggtaggttgatgactcaaaaatcggtaactagcacaccatccgttggtcataattgtccacggcggtagtgggagcgtgatggtctaccgatggttattggattgttttcgttgtgttgataggtagtgttggtgtttgttgtgtggttggggtgtacagaaattaaaagagaagaaatcaattagcaaaatcataagtacagaatgcgctggatcatttacgacatagttcctatacatccgatttaactgagcggtgttacgttacaaattcaatactgaactcgttacttggccactacttatgtaagtacaaattaggaaaaaattataaatttcatctagatgtgagtcatgagagatagttgaattattactaaaatagttgtctatttccagaacgcacctttacctctagccgcgagattacccacaaccttaagctaataaaagaaccaaagtaaaggatacaaatcaaattcagataattgaaagtatgttaaaaataattacaaaatagtatactaaaatttagacctctatggcctagtcttgtttataacaacacgtaaatatttcatgagcttatatatgtaagttgatctactctaatctaagagaatgagacttttgagaacatattgaaatatttagctttacatttataagaaaacatgattatttcatttagtaataccttctaaaggaactcttcaatggagaatagtaacgatctgttaaaaaaatttaaatattttgcaggtaaagattgtgaaaccttttaatttcatttaagtttagggccttgctttgctgttcttataagatacatatttgtaacgatgtctaataataactatagatctattatctgagggagttaaacacaaggaaagtcacctaaagcaggctatttatcagaaaaactttggcaagtgatgcccatagaatttacctttcgaaaggtatttcatcaacgtcatcgttgatctgtcgctgagcttcgttttgggcacgtcgcgcttcctccttcttgcggcgatcctcggctgctgccttcatgggatcataggtagatcgacgcttccacatggccatttcggcctctttttgcttgtttactattttaaaagaaatgtttttagcaaattatttgaaatgggaatgaatgtgggaatgttagcttacctgacgcatcgcgacgaatggcagacgagtttcgtgatcctggatttccgccacccagtgacgttgtactggtattcatcgcggaggcagcactgcgcacactccggttactggctcgcgttccctcgccgcgactcagacccatggatgaggcactgggacttcgtttcatttgatctgctggcttcagagtgctcttggcatcgttcttacgcaaaaagttgttggattgcgccgacttgtacttggaaatgtccatgtatttgggctgaacacgctgatccctcgaattggaggtgacaccagcattggcagtttggagcagctgcttcttggcattggccagagaactgggcacctgctgtgccagtcgactgagactcgtctccctgggcattgactgacgggcgactcgattgcccgatcctggagctgctcggggcgcactcttaattccccggcgaggcatttcgggagtatttgggcaggccaccaaaccagcaccgctttgtgccatgctcagctttcccgctggtgctgaggttggtttggccggcgcctgtgttccagccaccctctgtttgctcctctcgatccgcattagcagtgccttgttcatgcgtgtgttacttagcggcacggcgccctgatcttcgtgattctccacagcctcctcctcctcgttgctggagtagtaagcgccagtagtgcccatttcatcctcatcgtttatataatactgcaactcgttgtcatagtcgctgtaagcctgctcaaaattgttgctgctggcggatttcttaagctgctgctgctggtgaacggtgctcaaggcgtgggcatgacgggcagcaggcggtgtgtagaggttctggaaattgggacgcgcctgacgcacaggtggctgaccctgctgctgctggaagctactcgatcgacgcagcggcgacaagggagcagctgctggctcaacatgctccacttcctggctaggatcatactccagggagtttttccggcgacgcaattgcttcagcagatactcgccactggtgagcagctgcagctgcgcctcattgatgctgctggtcatgagcgctcgatggagcggagatcgtctatagccaccgccagctccggcacccattcccgattccagactatgctgcggactgctctgagccggtgacttaaccgaacttctgcgcgaaagtgactgctggagattacttatagccgcagccgtttgctccaagtatgcatccgttgacgggcgcgagcgactggcactgcgcgcacgtcccagcgtgtgcagcggcgagggtatcttgctgggactctttggtggcttgtaacctggttccagcacctgtccacctccaccaccgccatggctgcacagcgccggatcgctggcgtagtcacagtcgcccagtaggcgataccgctccgccagattgcgattgagcttggctgccgccgcatactgccgctgctggttgtacaaactgaggctgtcgtccgtcaaggaatcgcctcccgtgtcggagcaattatagctgcgcgtcatcagttgctgaaatttaaagaaaggaatattagtaaccaattctatgtatagagaaacagtttaacaaacagttttcctcattaatcccattcctcattttttctgtaattaagcccaaaaaagagtacttcatttatggcttgctttgtaaatgggtttgtgtccgtgctaagacagtctttacttcacgtatattttacatatgtaaaacaaatgtaaaatttaaaatttatatacaaacattttgccctcaaatttatctcacaaaattgatcctttaaattgttgttatgtttgaattatgatgattattattcttttaatgtaactaaaatttcaaacaataattttaattttatatacaaattttgcattgtatgttttatccattagatcactgtgatgaatcatttcagcaatctaatctgttaataggatgaggtaaacaatgccagctaaatagcacaacgtcacttgaacatagcaaatatcgctaattatttgttaaatcacatttccaatgactgcgactacatcataataaagcgagttattcaaacgaaactgtgttatagaagttattgttgcatacattctgttctatattcttaaaaaagtaaaacacattttatactccgttgaattttttagggtgactcatttagcacccgaaactagccagacaagattatgccaataaaatgggattttccataaattacttatcaaagaagcttgcccaaaatccggtgcaaaaccggttgactagcttacctgtgcctgcgcttgtgcctgctgctgttgttgctgcttccggcgagcggcgctcgtgccgctcacatcctgcgccaggctcctggcacgcgcattgcgcgcccactcctggatccaatcctgcttggtctgtgccgtctgcagcaatgcggcctccgagctctgcgtgggcgtggtgggtgtatccggcaactggtgctgctgattgttgctggtggtgaacacatttagtcgatactcggccttctggcgatcggtggccgatccggacaaggcttgcgtgtgcctaagtttagcctcattgctaacatactcggagctgtcgatctgcgaggtggacaagctgtgcgagtgtcgactgagcttcggatgggtatccaaggcgcgctgtttggccagcactccactggtggtcacactggtaaagcagcccatatccgccgccggcgacgggggagttggaggcgataggggaacctgctgacgcagcacgcgactcttgagttgatccagataggcacctgcggaaaaataaacggtaatcagtgtgtgctcaattaaggaaactcattgaactctggttcacacaaatctttcatcatcgaacgtaaattataactttctattatatataaatacttctaaatcagttttctgacctgtggaactcctctgtgctggcaattgctgtggcagctgttcttgcagcggcgtttcgtggtagtagttgacctcgaggacattgctgccacgactggacttaactggcaattgcttgggtcgctgctttgcggccgcctcctttaaatttctatcgatgttcatgagatccttctgctcctccgtatagttgtccccgtcgagggtgtaggtgcctgcctcgctgactgcatcgttctcggccgacggtttgccatccactagcggtggctgtggacacagcatctccacctggcgcagggccagctgcatggcggtggagcgaggtgtgaactgattggccgtgcggttggccaccatgttggaggtacccttggtcgccgccggcggaggtggcagtttcgagcgactagcgggtctgggtgcaggtgctgcaacagcttcggtcgcgttggccgagctcctgggcgaccaactgtgccgcttcgaggcatctcgcacccgggaggcgctacgatcccgcactcgcatcttcacctgcaccggtggcgcctgttcgctgctgggcgtggctgctgtcagggaggagacatcgtccgccatgctgctgccagcatccaaactgctcctctgcgactgccgtccgctgttcgatgtggccgtcgtgttatccttctccgtctccagcttggacatggaggcaccgcgcttgtgacgattctggaaacgttccatcatgttcttgtagcgcgccgcctgtgccgcagaatcgttctcggaggcatcgaaatgatcaatggtgaaggccagcgatgcctttgtggttgtgttcgactcgctcgagttctcctcctcaacagccgccgccgatttatggttggagttgctgctgttgctgttgcctggcggagtgccatgttgctggttcgctctgctttgtgccgcagctgctgcaatggaatagaaaagaaaagaagcaaacaggcatacaattaaattagcatttatttacagttaatattattatttttattattagcgtttaagcggtgaaaacgaaactaagctgctggcgtaaattaaactgaactcaactgaagtggcaagcggacgagaaaaatagatggatgaagtgcagcaaaacgaaggaattcgggagcggatcagaggtaatgtggtgtaaatcagatatataatagataatttgaatatatatgtaaataaaatgtatatacatataatctacatatatgcacaagtccaattagtaagttttagtaaccgtcaaactttagaaccaacttaattatgtagcttctcaaatattaaaccgcaaagtaacatctgtgttctggatattccagcttcgagagacagttaaggaaaaaggcaatcaacctgcattccggatgacaatctctaggtgtacaaatggcgcattccctgaagttcatccgattcaagggccccgaaacgcccacctgcagccgggggaaatccatcaccgcttccgctagccgatttctatacatttccgcggccaaagcacgggcaaaaagaaaatcaaacaatttgctttcagctctgccacgcgaagtggcacaagcacatacaatgccgagtggagaggtgggcgaccatctagggggccgcctctcagaatcgtgatctatggatgggtagcttccacacgtactctatataaggcagtcggttgcccggcaagtgaaggttagagttcggtgatttcggtcaattgcaggttcttttaccaactatatggtatagtggtatttggtaaggggcggttgttccactgggggaagacccacaaaacttttacgctctgccaaactttgctggccgtagaacttccgtttcgcttgccatgaaaatatatttcaaataccatatccatattcatatttaccatagatctcacagccttattttgcacaagttttcggtcacgaagcaacacatatatttctttggtaaccattaatattagtatgcagatgggcaattaaatggggagtcaaggtgataatgtatcatcattagcattggtttgaaattaaaagaagatacatatatgtagtatgtatatgcatcttcttcattcgaatagcttgcaaataatacacccaagtaattactagttaagcatttctaattagtgtttttcatcttgtgcatcgctgcagaaaattgctgtactttaaatggacaatatttttgttgtactaacagaaaacattttccggattaagctttcattggtacaaattaacttgttactgtaattgtatcccaaaacaagattcatagatatcaacctcagatgcaagtgctcaatcgaaatcataaagggaagtccagcaaacgatgtgcataatttctttgttctcaatttcccacaaacttggctaatacttcatatttatatctcatatcaaagttattctaattgaaaatattttctacttcttatacattttt

SEQ ID NO: 27881 - DNA, 3615 bp, DROSOPHILA
atggatttcccccggctgcaggtgggcgtttcggggcccttgaatcggatgaacttcagggaatgcgccatttgtacacctagagattgtcatccggaatgcaggttgattgcctttttccttaactgtctctcgaagctggaatatccagaacacagatcagctgcggcacaaagcagagcgaaccagcaacatggcactccgccaggcaacagcaacagcagcaactccaaccataaatcggcggcggctgttgaggaggagaactcgagcgagtcgaacacaaccacaaaggcatcgctggccttcaccattgatcatttcgatgcctccgagaacgattctgcggcacaggcggcgcgctacaagaacatgatggaacgtttccagaatcgtcacaagcgcggtgcctccatgtccaagctggagacggagaaggataacacgacggccacatcgaacagcggacggcagtcgcagaggagcagtttggatgctggcagcagcatggcggacgatgtctcctccctgacagcagccacgcccagcagcgaacaggcgccaccggtgcaggtgaagatgcgagtgcgggatcgtagcgcctcccgggtgcgagatgcctcgaagcggcacagttggtcgcccaggagctcggccaacgcgaccgaagctgttgcagcacctgcacccagacccgctagtcgctcgaaactgccacctccgccggcggcgaccaagggtacctccaacatggtggccaaccgcacggccaatcagttcacacctcgctccaccgccatgcagctggccctgcgccaggtggagatgctgtgtccacagccaccgctagtggatggcaaaccgtcggccgagaacgatgcagtcagcgaggcaggcacctacaccctcgacggggacaactatacggaggagcagaaggatctcatgaacatcgatagaaatttaaaggaggcggccgcaaagcagcgacccaagcaattgccagttaagtccagtcgtggcagcaatgtcctcgaggtcaactactaccacgaaacgccgctgcaagaacagctgccacagcaattgccagcacagaggagttccacaggtgcctatctggatcaactcaagagtcgcgtgctgcgtcagcaggttcccctatcgcctccaactcccccgtcgccggcggcggatatgggctgctttaccagtgtgaccaccagtggagtgctggccaaacagcgcgccttggatacccatccgaagctcagtcgacactcgcacagcttgtccacctcgcagatcgacagctccgagtatgttagcaatgaggctaaacttaggcacacgcaagccttgtccggatcggccaccgatcgccagaaggccgagtatcgactaaatgtgttcaccaccagcaacaatcagcagcaccagttgccggatacacccaccacgcccacgcagagctcggaggccgcattgctgcagacggcacagaccaagcaggattggatccaggagtgggcgcgcaatgcgcgtgccaggagcctggcgcaggatgtgagcggcacgagcgccgctcgccggaagcagcaacaacagcagcaggcacaagcgcaggcacagcaactgatgacgcgcagctataattgctccgacacgggaggcgattccttgacggacgacagcctcagtttgtacaaccagcagcggcagtatgcggcggcagccaagctcaatcgcaatctggcggagcggtatcgcctactgggcgactgtgactacgccagcgatccggcgctgtgcagccatggcggtggtggaggtggacaggtgctggaaccaggttacaagccaccaaagagtcccagcaagataccctcgccgctgcacacgctgggacgtgcgcgcagtgccagtcgctcgcgcccgtcaacggatgcatacttggagcaaacggctgcggctataagtaatctccagcagtcactttcgcgcagaagttcggttaagtcaccggctcagagcagtccgcagcatagtctggaatcgggaatgggtgccggagctggcggtggctatagacgatctccgctccatcgagcgctcatgaccagcagcatcaatgaggcgcagctgcagctgctcaccagtggcgagtatctgctgaagcaattgcgtcgccggaaaaactccctggagtatgatcctagccaggaagtggagcatgttgagccagcagctgctcccttgtcgccgctgcgtcgatcgagtagcttccagcagcagcagggtcagccacctgtgcgtcaggcgcgtcccaatttccagaacctctacacaccgcctgctgcccgtcatgcccacgccttgagcaccgttcaccagcagcagcagcttaagaaatccgccagcagcaacaattttgagcaggcttacagcgactatgacaacgagttgcagtattatataaacgatgaggatgaaatgggcactactggcgcttactactccagcaacgaggaggaggaggctgtggagaatcacgaagatcagggcgccgtgccgctaagtaacacacgcatgaacaaggcactgctaatgcggatcgagaggagcaaacagagggtggctggaacacaggcgccggccaaaccaacctcagcaccagcgggaaagctgagcatggcacaaagcggtgctggtttggtggcctgcccaaatactcccgaaatgcctcgccggggaattaagagtgcgccccgagcagctccaggatcgggcaatcgagtcgcccgtcagtcaatgcccagggagacgagtctcagtcgactggcacagcaggtgcccagttctctggccaatgccaagaagcagctgctccaaactgccaatgctggtgtcacctccaattcgagggatcagcgtgttcagcccaaatacatggacatttccaagtacaagtcggcgcaatccaacaactttttgcgtaagaacgatgccaagagcactctgaagccagcagatcaaatgaaacgaagtcccagtgcctcatccatgggtctgagtcgcggcgagggaacgcgagccagtaaccggagtgtgcgcagtgctgcctccgcgatgaataccagtacaacgtcactgggtggcggaaatccaggatcacgaaactcgtctgccattcgtcgcgatgcgtcagtaaacaagcaaaaagaggccgaaatggccatgtggaagcgtcgatctacctatgatcccatgaaggcagcagccgaggatcgccgcaagaaggaggaagcgcgacgtgcccaaaacgaagctcagcgacagatcaacgatgacgttgatgaaatacctttcgaaagtgtgctgcgcccagccaacaatatgaccatcacgagcggaggcaacagctacagtcctcgaaactccgtggaaaacgacgcctggacgcttggtgaatcctccgagtatggtgaatatcccgatgactacgatgaaaacgatgaggagcacggcgatgaggatattgactacgttggccaggaatccgacgatgttttcgaaacggaatctggagaggctgcagttcagggcgcacagtag

SEQ ID NO: 27882 - protein, 1204 aa, DROSOPHILA
MDFPRLQVGVSGPLNRMNFRECAICTPRDCHPECRLIAFFLNCLSKLEYPEHRSAAAQSRANQQHGTPPGNSNSSNSNHKSAAAVEEENSSESNTTTKASLAFTIDHFDASENDSAAQAARYKNMMERFQNRHKRGASMSKLETEKDNTTATSNSGRQSQRSSLDAGSSMADDVSSLTAATPSSEQAPPVQVKMRVRDRSASRVRDASKRHSWSPRSSANATEAVAAPAPRPASRSKLPPPPAATKGTSNMVANRTANQFTPRSTAMQLALRQVEMLCPQPPLVDGKPSAENDAVSEAGTYTLDGDNYTEEQKDLMNIDRNLKEAAAKQRPKQLPVKSSRGSNVLEVNYYHETPLQEQLPQQLPAQRSSTGAYLDQLKSRVLRQQVPLSPPTPPSPAADMGCFTSVTTSGVLAKQRALDTHPKLSRHSHSLSTSQIDSSEYVSNEAKLRHTQALSGSATDRQKAEYRLNVFTTSNNQQHQLPDTPTTPTQSSEAALLQTAQTKQDWIQEWARNARARSLAQDVSGTSAARRKQQQQQQAQAQAQQLMTRSYNCSDTGGDSLTDDSLSLYNQQRQYAAAAKLNRNLAERYRLLGDCDYASDPALCSHGGGGGGQVLEPGYKPPKSPSKIPSPLHTLGRARSASRSRPSTDAYLEQTAAAISNLQQSLSRRSSVKSPAQSSPQHSLESGMGAGAGGGYRRSPLHRALMTSSINEAQLQLLTSGEYLLKQLRRRKNSLEYDPSQEVEHVEPAAAPLSPLRRSSSFQQQQGQPPVRQARPNFQNLYTPPAARHAHALSTVHQQQQLKKSASSNNFEQAYSDYDNELQYYINDEDEMGTTGAYYSSNEEEEAVENHEDQGAVPLSNTRMNKALLMRIERSKQRVAGTQAPAKPTSAPAGKLSMAQSGAGLVACPNTPEMPRRGIKSAPRAAPGSGNRVARQSMPRETSLSRLAQQVPSSLANAKKQLLQTANAGVTSNSRDQRVQPKYMDISKYKSAQSNNFLRKNDAKSTLKPADQMKRSPSASSMGLSRGEGTRASNRSVRSAASAMNTSTTSLGGGNPGSRNSSAIRRDASVNKQKEAEMAMWKRRSTYDPMKAAAEDRRKKEEARRAQNEAQRQINDDVDEIPFESVLRPANNMTITSGGNSYSPRNSVENDAWTLGESSEYGEYPDDYDENDEEHGDEDIDYVGQESDDVFETESGEAAVQGAQ

SEQ ID NO: 27883 - DNA, 4132 bp, DROSOPHILA
gtgaagctgctggccatcgccaagggcagcaaaaaggtggacaactgcggtgtcaagcggcgcacgccaaagcgcaagtgctaggagtgggtggagcagcgtcaccagacgtagcaacagctggcgtaggagcacagcacagtctcctcccgccagacaagtcatagccataggcctcgaggggcggagtcggcgcgggcagccgacgacccatcgccgccatcgatcacatacgtactgccattgtgtcatcgttaatcgttaacgccggcgccaggaggggatcaggatcaggatcaggatctggttcgggatcgggatcagctggagtaggagcggcagcgggagcacccacttggcagaggccacctcctggccccgcacccattaaccgtatgcggagtatatgcaacatatttttctttcttttaaacatctaagcgttacattatttaggttttttttattaaatgtatttataattaataaacaaaagaaacaaaaaagcgaaagagcaacaaatataaatttgagcacaacaattcaaagcggacgaccgatcttctcatttgggatgccagtaacccagtagcgaaccgccagagatacaagccgtccaggtttttcctcaatttaacttcggatttatttaatatattttacaactagcggtatctttacatatataacatgtaaaaaaaaatagagttaaggaatagttaaaaaaacgtggagcacaatggaggcgacggcgtgtggcggagcgaacgctgcagtctcgacgagctcacacccagccggttgtgttggatttgtgtgctgatgttgcgctgctcttgccaaaggataaatgcgaagcaaaacaaagttccatcaaggattagaatgcgtgtcaaatggtgggtgatgtgtctccggctggatgcaccgatgtaagagatattggtgggtctcgctccgactgctgatgactgataactgatgagctgctttcgccgccgaccacgcgacgtcatcgttccacatcgtgacttaaacagtatgctggtttcggttctcatcacatctccctccccctctccggctgtcgaccagtcagtggcagtcgcttacatcatgccacccatgccgcccatgcctcccatgccgcccataccacccatgccgggcatggcaggagcgccatcctccttggggatctcggtgacgacagcctcggcggtggtcagcagtgaggccacaccggaggcgtctgtgatggcggtgcgcaccaccttggtgggatcgatgatgcccttctcgatcaggttgccgtattcgcccttcagcgcatcgtagccgtagtcaccggcctgattctccaccttggccaccaccatggcgccatcaacgccggcgttcttggcaatcgtcatgcatggcatgcgcagggcacgacgcacaatctccacgccgagtttctgttatgagatttcatagacattaatacacgaataacagaaaagagagatagataatcgtacctgatcctcgttggtggtctcgacaccctcgagcttctcaatgcaacgcagcagagcggtgccgcctccgggaacgattccctcttcgacggcagcacgggtggcgttcagggcatcatggacgcgatccttcttctcgttgacctccacctcgctggagccgccaacgcgcagcagggcaacgccggaggccaagcgggccagacgctcctgcagcttctccttctcgtactcggaggtggtgtcctcgatctggtccttgatctgattggcgcgacggagcacatcgtccttcttgcccttgcccttcagcagcagggtgtcgtccttggtgatcaccacctcgccgacctggcccaaatcgctaaccttgacgtcctccagcttgacgagatcagcatcatcgccgaagacaatgccgccggaggcgatggccatatcggtgagggtgctcttgcggttgtcgccgaagccgggtgccttgacggcagccacctgaaggccgatcttgaggcggttcaccaccagggtgctcagggcctcaccatcgatatcctcggcaatgatgaccagcggcttgcgctgcgcattggccagctccagagcgggaatgatgctctgcaccgatgagatcttcttctcggacagcaggaggagggcatcttggaactccaccttggcgcccttcgaggagttgatgaagtacggcgagatgtagccgcgatcgaacttcatgccctcgataacctccaactcatcggtgagggtcttgccatccttgacggtgataacgccatcgcgtcccaccttcttcatggcctcgctgatgagattgccgatggcctgatcaccgttggccgagatggtggccacctgggcgatctcctcgggcgtgctaacggggcgcgacatggtcttaaggttgtccttgacggtctcaacggccagcatgacaccgcgacgaatctcgacgggattggcgcccttggagatcttctcgaagccctccttggcaatggcgcgagccagaacggtggccgtggtggtgccatcaccggcctcctcgttggtattgttggccacatcctggaccagcttggcaccgatgttctggaacttgtccttcagctcaatggacttggccacagtgacgccgtccttggtgattttgggcgagccccacgactgctcaatgatcacattgcgacccttggggcccatggtcactgccacagcatcggccagcacatcgacgccctggagcatcatggcgcgcacctcgggtccgaaacgcacatccttggcatagccgcgcatggccaactggcggctaatggaggagcgagcaagcgaaactggcaaacggaacatctgtggaagagcagagaggattggtatgatgagaactggctggtagcaagagatgaatcaaagcacgtgttccgccttgggcagaactaagatgcggtttctttgagttgtttaccccggagtttcttagttgataagcttccagcgggtcaaaggtcaaaaatcttcgttcttgaatgtgaaattgggaatacaacgcgtgagcactgtttaacacacgcagttcgcttgacttttccgataatcagagctgtaaacttctcagattactgacagcaaaagccaatggaatgttatttacacggatacttatggaaattacataaacgcacaatgctccaaaaattgggaattttcaaagagttataaaaaaaataatatacatttttttaataaagctcaatgcaaaaaactcattatcaacataatcattgagctaatttatggcatataacacgtggattagataaatacagatgtacatacatctagtttcggtttataaaaattacaattttcgaaaattacataaactaattaatatctctgtgagaattgcataagcagaaagaatgttttttttttaggttgttattaatgtgaatacaataaaataaaatataagacgaatttaaacagtaatcacctattgtttctatctaatttaatgatgaaatagttctaaaaacacaggcaacatgagatatttacatggattctgctcatccttataaacatcattattttgaattgaaaaattaaaccaaatcaatgagtttaggtattactgatagtattatgtaaactaattcgttgcagcagcgaggctccactgtaccggccaggccccctcattccagtgcccacccccaccccccggggaacgaacaacatcttggcaccgagcattccagaagaaacgatttatgtaaccagcacttgggcaaaagactaatatgtagctcccaaaatgggagggaatgttattcaatgaatcaaagatttccgcaaacgagagtggaaagaaagaaaggaagcagggcaagcagtagcagcacatgcaatgccgtctgataaatgtgaaattgccggcaagcagtggaaaacatgtgcaactgagtttccaccagctttccaatgtgcgcgcccgtatgcgtgtttgtgtgttttgaggtggatttaataaattcttgttggaatgtaatcatttactgcacaatgcagacatcgtttacttt

SEQ ID NO: 27884 - DNA, 1954 bp, DROSOPHILA
gaaaagtcaagcgaactgcgtgtgttaaacagtgctcacgcgttgtattcccaatttcacattcaagaacgaagatttttgacctttgacccgctggaagcttatcaactaagaaactccgggatgttccgtttgccagtttcgcttgctcgctcctccattagccgccagttggccatgcgcggctatgccaaggatgtgcgtttcggacccgaggtgcgcgccatgatgctccagggcgtcgatgtgctggccgatgctgtggcagtgaccatgggccccaagggtcgcaatgtgatcattgagcagtcgtggggctcgcccaaaatcaccaaggacggcgtcactgtggccaagtccattgagctgaaggacaagttccagaacatcggtgccaagctggtccaggatgtggccaacaataccaacgaggaggccggtgatggcaccaccacggccaccgttctggctcgcgccattgccaaggagggcttcgagaagatctccaagggcgccaatcccgtcgagattcgtcgcggtgtcatgctggccgttgagaccgtcaaggacaaccttaagaccatgtcgcgccccgttagcacgcccgaggagatcgcccaggtggccaccatctcggccaacggtgatcaggccatcggcaatctcatcagcgaggccatgaagaaggtgggacgcgatggcgttatcaccgtcaaggatggcaagaccctcaccgatgagttggaggttatcgagggcatgaagttcgatcgcggctacatctcgccgtacttcatcaactcctcgaagggcgccaaggtggagttccaagatgccctcctcctgctgtccgagaagaagatctcatcggtgcagagcatcattcccgctctggagctggccaatgcgcagcgcaagccgctggtcatcattgccgaggatatcgatggtgaggccctgagcaccctggtggtgaaccgcctcaagatcggccttcaggtggctgccgtcaaggcacccggcttcggcgacaaccgcaagagcaccctcaccgatatggccatcgcctccggcggcattgtcttcggcgatgatgctgatctcgtcaagctggaggacgtcaaggttagcgatttgggccaggtcggcgaggtggtgatcaccaaggacgacaccctgctgctgaagggcaagggcaagaaggacgatgtgctccgtcgcgccaatcagatcaaggaccagatcgaggacaccacctccgagtacgagaaggagaagctgcaggagcgtctggcccgcttggcctccggcgttgccctgctgcgcgttggcggctccagcgaggtggaggtcaacgagaagaaggatcgcgtccatgatgccctgaacgccacccgtgctgccgtcgaagagggaatcgttcccggaggcggcaccgctctgctgcgttgcattgagaagctcgagggtgtcgagaccaccaacgaggatcagaaactcggcgtggagattgtgcgtcgtgccctgcgcatgccatgcatgacgattgccaagaacgccggcgttgatggcgccatggtggtggccaaggtggagaatcaggccggtgactacggctacgatgcgctgaagggcgaatacggcaacctgatcgagaagggcatcatcgatcccaccaaggtggtgcgcaccgccatcacagacgcctccggtgtggcctcactgctgaccaccgccgaggctgtcgtcaccgagatccccaaggaggatggcgctcctgccatgcccggcatgggtggtatgggcggcatgggaggcatgggcggcatgggtggcatgatgtaagcgactgccactgactggtcgacagccggagagggggagggagatgtgatgagaaccgaaaccagcatactgtttaagtcacgatgtggaacgatgacgtcgcgtggtc

SEQ ID NO: 27885 - protein, 573 aa, DROSOPHILA; identical to SEQ ID NO: 2847

SEQ ID NO: 27886 - DNA, 2274 bp, DROSOPHILA
agaggagcaggaggaggacgtggaatatggttatgcgccttcgcagctgctcctcaatggctattgtgccgccatggtagatgacgccgacatcagcagcactccgtccattgagccagataacgaaggcgtcgccattacagcggatcatgaagattcaaagaagcacaagtccgttgaggctctgcattccgacgatggaatgtcctcgctttcaacggagtccgtggattcgtctgtgtacggtgcagatgtgcagcccgatgacttccaaaagtcttcatccgccacaacagattcgggcaactgtggattgagcagccgctgcaacggcacgccacgaatatccagtgcagtggcacgggaacgtatggaggatctgaaggacctgccgcctcacctggccactctggtccagaaagcacttcacgatctggacatgcgggactacgaggctatggtgacgatacgagcagagaatctggcggctattccttagagaaaaactagttcaattgaggactcccaaagaaatggatgaaaccatatctcagtgttgacaaaagatataatacatatatatattaccgcaacagcgtacaataaaaccagattatataaaataaatcactttattcaatcgatattgcgttgaaactggatatgtacaataactatagcatacagttttaaaagacgcgcccaagttatcgataaataatatgcggagtgttgcataccgttagcataaacacactctcacacactcttatttctgggtatacattttctgataagaatgcaataaatatcccgactggttggagtaatttcgagtttttgaattaaaaatgccttaagaaaagtttttaatgagccatgtagagttaacaccagtgccacatatcctgggaatggagcaccaatcaaaagtcatcatcaagcggcccaaatcaggccaattctagtcggaaagtcgttgcagccgcccattgccaccatgtcgaatgatgtgcaggtcgcccgggtggccaagatagctaccgatgtgccgcgtcgcagtggcaagcagcgtgactccagcggattccagggcaagcactccggcagcgcggctggcgaggatttcgagtacgtcttcggtagcatttcgccgcgcggtggaggacccggtggcaggcacttggtgggatcctccgacctggactctccggagcacacgcagcgggacaccaccgagagtgacaacaacatatccagctgctccacgctagacattgtcaacaaagtgagtaatgatgcccgcactgagagaaataactagatcttaaatcaaaaaaatcaatatattaatttgcaatgatacattggtactaaacatgatcaagttcattttaaattaatttttaaaatgatcacaaaatatttaaaaatacctcattattgtgtagtttaaaataagaaacgcagaattttcaatcattggttttcaaagtgtttcgggctttaaattcggttggcgtccagtgcgcagatgcgtgtggaaggctgagggtcaagttgcagcggcggagagcgcggatgcatccgcggtcggatgacgacgtaatcgccagtcaaaattttccactggaccatgatttcggagcaactgcttccgcgcagcttgagctgcctgtgctgcagcgatacgccatcggtgcccaacgacaagagacgcagttgggagtatacgctgatggctcatcctctggccagacggcccataaacgtgatgaccccaagaataaccacttagaaagctctaatccgcctcttttcttttgattcacctccaggttgagcaactgtcggtacaacagctagaaaaccgggtgcgggatctaacgcagcgtctgcagcaggcggaaagacagctcactgagagcaacacagagcgggaaatatgccacaagcgcttggaggttgtcagccaggcccacgagtgtcgcatcacagagatgcactgtgtcatcgccgagttaagcaagaaattgcgcagtaagcaggaccacgttatcatggaggagcaggagcccgacggcagcggtgcgtagcagtttcaaatgagggaaacaaacccctaaccgacagtcttgttttcagaactcagctttcaggagggttcagtgtacaattccgagcttaacctcaccaatcctgatgccgaatgtcaaacagaaccactggaagacttcgagggcgcctgcagtaccaccagcgtgggtaacgttg

SEQ ID NO: 27887 - DNA, 274 bp, DROSOPHILA
atgtcgaatgatgtgcaggtcgcccgggtggccaagatagctaccgatgtgccgcgtcgcagtggcaagcagcgtgactccagcggattccagggcaagcactccggcagcgcggctggcgaggatttcgagtacgtcttcggtagcatttcgccgcgcggtggaggacccggtggcaggcacttggtgggatcctccgacctggactctccggagcacacgcagcgggacaccaccgagagtgacaacaacatatccagctgctccacgctag

SEQ ID NO: 27888 - protein, 91 aa, DROSOPHILA
MSNDVQVARVAKIATDVPRRSGKQRDSSGFQGKHSGSAAGEDFEYVFGSISPRGGGPGGRHLVGSSDLDSPEHTQRDTTESDNNISSCSTL

SEQ ID NO: 27889 - DNA, 4647 bp, DROSOPHILA
gttccatggcctacatgcacaccttcagcccggacagcatgcgcgacgacgtgggcatcctttttctgcgcaccgggctgccgatgtctccaggcggtggtgtccatctcacagtggcccccatccagctggcgggccagatcacgccccccggcaagctgtgccaggtggccggctggggtcgaaccgagcaggtgagtcggatttgtagagccgtaggcaagccattgagcccgcagcttatctgactctttcccagagctccctctccaacatcctgctgacggccaacgtgagcaccatccggcaccagacctgccgcatgatctacaggtccggcctgctgcccgggatgatgtgcgcaggacgcctgcagggcggcaccgattcttgtcaaggcgactccggcggaccgttggtgcacgagggccgtctggtgggtgtggtctcctggggctacggatgcgcagagccgggactgccgggagtctacgtggacgtggagtactaccgccagtggatagagggacgcagcggggctccccattccaggctggctaccggactgttcctactcctgctcctgcccctgctgatgcggtgctcggggtcgtggctatagccaccatttcggcatccatgccagtgctttagtctatgtagtaactatgttctaaacaaaatattcataatacacattcacgtacaatgtagcgacagctctgaatctaagagctaccgtatgcaaacctatgtatgtatctatctttcgaatcacttttggtacctcgaatgccattccgcagctatcagttatctacaatctacaaatctggacggtttcgaaagagtcggataattacaacgacctcttcgtatcttgtcgtgcaatgaaacgctttccactcaacaatcaacatttatttacagcgaaacacacttagattcggaaacacgagtcaaggaacaaagcagggtgacttggccacgggcatggcacctaacagttgcggcagttgcgccgcgagcagggctcctctcgccgatcgtggaggcgcaccaggtcctccggctgaccgtaggcgatgttcggcaggcatcgcgactgggtcagtagcagggagaactcgcggttgcaggccgcgttctcgatccgctccatgacccggccaaccagcagctccacggcctccttgacgttggcgccggtgcaggcgctcgtctcgatgtacggcagccggtagcgtcggcagagggccgccacctggtcgcgactcaccacgcgcagctgcagcaggtcgcacttgttgccgcagaggaccacgtcggggtcctcggagtaggcgtgcgtccgcagctgcgacagccagttggccgtctccaggaagctcttctcgctggtcaggtcgaagatgagcaggaaacccatggcgtcgcggtaaaacgccgtggttagtgaacggaagcgctcctgtccggcggtgtcccagatctgcaggtggatgcggtggcggcgtccgcgggagttgtacagctgaaggatgcaaaaaaaagtgatgggtcactagggttcggaaatgatagtgatgtggttgcaaaatcctcgtgactctcaaaccgacttcactaggattgtgttggctatgttaggtgagtcccatgaaaaggatcacaggatgattagccgcttgaacttaccagccgcttttcgcggaagtcgatgcccacagtggagatgaactgggtgtggaaccggccatccgtgtactggtagaggagacaggtctttcccacgccggagtcgcccaggacgaggaacttgagcaggtaatcgtagtcgatgttggcgcccgtcataatggccgttcgtagcagcgcgtttggaacgttcaggaccgcagacgcatcccgtccgcctggaagcagggaaacgaatgagctgcccgttcctgtacagctctcccaagcaatggttgtcccccagctaccagcttcctgcctcctgcccctgctgtctatccactcgccactcttcctcctcttttgtgtaagaccgggcttaggctgacaggagcggaggcggggcactctaatcgggaggcatcttcgtgagcgtggctcccacccactgccagctgccacccccataatgcgacccacttacccacaccacaccatctcgctgcaccgtggcaaatatttgaaactcattaaatcccgatttattgattttctgtcccgttccgggcgaaattcgggcgtgtggagtgggttcgatgggtcgcgatggcggggaatccctttcgcccgcttccgcatcaatggacaagccgatcgagatttcgagcattcccgctggaagcggcgcccaacggtatgtcgctcggcagaacagagagagatgacaaggggcagtagaaaagtggaaagtggctggagcataggaaggctaaccccgcccctgccccgctaattagaccaacggccaacgctcaaaatgacgcgatgcggtgggcaggaggagagaacgtgcagcatctctgcaccctggcttccttcccgcgctaagcggattacggtcgctgcctgcggttgaagtggttgctagacaacggggcctccgtcactggaaagtaacaacagagatcgaagtaataactgggaccgcgctcccagtgcgccttctgcgcatcccgaatccggcagcactcaatggaatcctgcctgctgatgtcttgtaatctaatttcctcccgtttccggcagctgtctcacgtctccggcccctatttccgaatccgctgcctcgcagagggagcacgcataggttacagtcgtctgctgctcgccaagtctcccagggggagatggtaggcgggtggacagtggttggtgggcaaatcgaattagcatgcacgcacagccatagccatcccactcggctgacggttaattttaaacctttattgattcgcaagatcttgcggggctcaggtgggcctagcgacggaaatagcctcccgtttccgggggtggtgttcaacatgaggggggtgggctaaggcgagtgatggcaattaggagcaaaccacaaggcctccactcaaggacgtcctcccagcttccttccgccctttcagcgcgtccagctgcactaggacaaggacggcttccaattaaagctagaccgcagtgccgtaattagctgcagctgccgcgtttctgccgagcgattaaacatagccaccgccaccttagccccttagttcctcagctcacctgttcaccggatccggctaattgcagaggctcaggctcaggaggcgcggcacgcatttctgctccgacgcccgccgtcgactttggcgcccaaggcggcttctttcggcacgccgcacgccactcgtcactccaaggatctggaaggaatctgcgattcagctgactggaccagactgactgggcgggcaaccgttatttttagcgcgcgcaattcgtccgcgcgggggaagggaccttcaaccaccttgcagaggtttgctaaacgaaaacaagcgacccacgaggacttcgaaaactccgaggctgtgcggatgctgcggatgcaacgcagtggatcctctgggcggtgcgctgcccgacctgttgccatgcgctgcccagcacagactacagggctcgttggccgccaacaggcagtcccttttccgaggctcagctttcagccaaagcttgcgccagctttcaagcgcttccgcgcgcgacaggtgcgccgcacaggtgtcctttcccacgggaacgtggttatttcgtgagtacttcgaagcactctcgagacataatccctcgggcaactttaagaatggaacggctttggacggagcttccgcgggacggcgcctaagctttgctctccgacgaaggcttcaaagtcaggagtgtatcccgtgctcgaatagtccactgtttctataatcctagtgttcagcaatcaaatttcgtgttactaaataacactgagccacatttttcagtaaattgaagtttgcgcgcgcagagctatcgataagtatcgcgagataaaccagtgctgtaaagcgccgccatttaattgcacttatcgagtttcttgcgggctcgggatttgctttgttttttttttttgaatcggtgcggaaacttctcggttgaggttttattctctatttactggccatggacaacgcaagctcaacttttggccagtcggacttcgactgggacgccatcaacgtgggtgactaccagttggatcactcccagaactttttcggtgcgtatccaggccaccgcgtccaagctgagaaaacgcgccatttttggccgaccattgctgaccatttcccgcatttcccagcagcacgggccaacaaggagaacaacaggagcctcagcaatgttaaccccctcctgctgtgcaccactccgcagaagatcggccgggaacagcgcgatggtgacttcgatggcaagctgattagtgctggggatctcaagaaggagtcccccaaagacacgacagaggcgtccaaggatgcactcactatcaagcccaaagttgagccccacgatgtgccagaactcaagttgaaaacagagctccaggag

SEQ ID NO: 27890 - DNA, 1022 bp, DROSOPHILA
aacaggtcgggcagcgcaccgcccagaggatccactgcgttgcatccgcagcatccgcacagcctcggagttttcgaagtcctcgtgggtcgcttgttttcgtttagcaaacctctgcaaggtggttgaaggtcccttcccccgcgcggacgaattgcgcgcgctaaaaataacggttgcccgcccagtcagtctggtccagtcagctgaatcgcagattccttccagatccttggagtgacgagtggcgtgcggcgtgccgaaagaagccgccttgggcgccaaagtcgacggcgggcgtcggagcagaaatgcgtgccgcgcctcctgagcctgagcctctgcaattagccggatccggtgaacagttcctcgtcctgggcgactccggcgtgggaaagacctgtctcctctaccagtacacggatggccggttccacacccagttcatctccactgtgggcatcgacttccgcgaaaagcggctgctgtacaactcccgcggacgccgccaccgcatccacctgcagatctgggacaccgccggacaggagcgcttccgttcactaaccacggcgttttaccgcgacgccatgggtttcctgctcatcttcgacctgaccagcgagaagagcttcctggagacggccaactggctgtcgcagctgcggacgcacgcctactccgaggaccccgacgtggtcctctgcggcaacaagtgcgacctgctgcagctgcgcgtggtgagtcgcgaccaggtggcggccctctgccgacgctaccggctgccgtacatcgagacgagcgcctgcaccggcgccaacgtcaaggaggccgtggagctgctggttggccgggtcatggagcggatcgagaacgcggcctgcaaccgcgagttctccctgctactgacccagtcgcgatgcctgccgaacatcgcctacggtcagccggaggacctggtgcgcctccacgatcggcgagaggagccctgctcgcggcgcaactgccgcaactgttag

SEQ ID NO: 27891 - protein, 236 aa, DROSOPHILA
MRAAPPEPEPLQLAGSGEQFLVLGDSGVGKTCLLYQYTDGRFHTQFISTVGIDFREKRLLYNSRGRRHRIHLQIWDTAGQERFRSLTTAFYRDAMGFLLIFDLTSEKSFLETANWLSQLRTHAYSEDPDVVLCGNKCDLLQLRVVSRDQVAALCRRYRLPYIETSACTGANVKEAVELLVGRVMERIENAACNREFSLLLTQSRCLPNIAYGQPEDLVRLHDRREEPCSRRNCRNC

SEQ ID NO: 27892 - DNA, 6882 bp, DROSOPHILA
gctggcacgtaggaaaataacaaaaaaaaaacgcagtttacacagcattatgttataattgtaattacatacaagtgcgataaactactaaagaattcatttgcaatagaatattccctcaatgttcgaaacagataatatttttcccactgtgtgcggctgaagtaatttttcttctttgatactgcaaaaacaattacctgaatacctgaatgttttcgtatgctgcgcggccgcattaagctcacattaaaattatcaggaataaagagcggcaggtaaacgaggcgaggaaatcaaattgaatcgtttacatcatttaaagctacgccaagttcacggacacgacggcaactttgcgtccttgcggccattttgttcaatcctgtgtacccatacatacacatggttgcttgttgggaaaagctaaggggccatgtcaacagacggttaacgctttacttcctcgaaaggcgttcgttgacttcgcagcgtaaaataagcaagcttatgctgctttgttctgttatttttcgcgcttttcgcagggctaattaaggcgttcgtccttcgaaacggtaatcctatatatcctcgattcagcgaccctgtcttgcagcatcgcattaccgacggatgcacgcgcttctgattatgccgcattattgctaacggcgtcatttagtcttaataggtattttgaaatgtgattaacgctcccgtccgtgataagcgctttaacgtgtgcttattacaaattaaatagtggtatactattttggttttagtgcagaaggaagttcttaaattaaatacatttgaatttggcgctcaaaaagcagactggtacaaaattacagcatctaacggtcgcactttagcgaatacatgcacctatcgtagcaggtacccactaccttccaagctagttcgctctctcaacccaaattgccatcactactagacaaaatcaatcgatatatgcaggggatagtataggaggtatcgaacaatcatcaactgaagtgccagctctagcgttttgctttggttgaaaatacaattaaaaattgattctgaagtatttaaatattctgcatcgccaggtgagtgcgtgttgccagcattggcatatttttcggccggaaaaaggattcacagtccattcaaccatcgaattgatgtccaaaagtcggtttaaaaaggcgcgtcatgtgctggaatcgaagaaaatgcgttacaatgcagcagttgcagttgtgcactttattttttgtgtttcaataattaccagtaactaattaattttctacctcccccacccactctccacccatctccctttttagccataaaaatctgcgaaaaccaaacggtggcggcatcgaaaataccgaaagaagcacaaaaagaaaaatttgcaaggctgcgtctgtgttagtgagcgtgtgcgagcgcgcgtgtgttgctctgtgtgcgtgtgtgtgttggcgagtgcgagtcttttgccttcagtgcgtgcgctgtttctcgtgtggagcccaaaggaagaaaaacacacaaaaatacaaggaatccgctaaggaaaaaagcgtaaccaaaaagaacatccaaaacaaacaagtgccgctgcaatggagaagagaatagaactggaaagacgcgcacgcaaagtaaatcaggtaagctaaatacaaacgatgaaaaaaaacacgcgccacaaacttaaattgaggtccaaattaagtgacgctttcgtgtgtgtgtgcattatcatgtaaatctagtttcaatttgttcatagacgacatacaaaaagtgctacggaagaagcagcaaagcggcatcaacaagaaaaacgaaaaaaagaaaagaaattgatcgccataagcaaattctacacacatgcctctgtgtgcgtgcgtgtttgtatgcatgtgacgccagtgttgccatgtgcgcgcatttttgcgccttgcctgctgtttgctcctttagaatgcaggttttgaattcgtttacaagctattacgtatttaattgcaagtccctgagtgattttactgcatggctgatggaaagcgatcttttcgggccagacgagctagagcacttggaattgtattatctccacagctggcaatgctcctcgcttgttgttcttgctgctgctgttctcgtcgtagttgttgttgtggttattgccggccttcaattgtgacaaacacgggcaacatgtgtttgtgtgtacgtgtgtttgactgcatgttgtaatttcaggttatttgataccaaattgtatctataacaatattatagcgcgcgcatcatccgcacaaacacacgcgtaccacgcacaaaagatacacatgcatacgtaagacgacttatgcacaaaataatcgacacatagcatacatatcagtacatccatccatacatatgtacatacatatattgactgcgcagtcataatacttttatgctccccttcttcttttcttcttctaacgtgtttacctgcacgccatcgcctctagccatcccgctcccgcccactcgaagtggcaaagaaatgcaggcgaaaagacaaagccgctgattaataaacatgcgctctggctggccggccagcctactcaatctcaatcagcggtcacccaaccgcccagccacccactgcccgcccaaaatgcaccccacaacagcgaagtcagcagaagacaaaaaatagcaacgtatacacactcattcgcgcctaagtcaaagccaaacgctgtgtgcattcatttccactcatttgctcaaatacagtagacactctctactgttagctatattttagatcatttgcattccccactttggtgcttactagatcgatcaatagatcgagcacaaccgaattcttagccgtgaatttcatacgaacatttttttcatttccaatttttataaattatacctttggggaagtgccactttgtttcctttccaagagttaaattttttgtttaaactacaccatatccataaaaagattcttaacatagttaaattgattccattaccaaaaacatgattttgaagttcatcaaacaataagttatttatattacaaagtatatcaaaccgaatacagattaggttttgcagtcagtttttatttacaattttatattttcatattcaattttgttgataattattaaaaattgtgttgagctacagttaattttcttttaggatataccaagattcttgccacttagaaataaaataaatttgaaccataattcaggttagaaagtgtccgctgtaagcacataactgtttctcggctagacagagacggacagacggactctgaaggcacccattttgtttctttgttgttggttttgttgtggcgtcgtgacatattgataattgggtaatctgaagtgaacttgcacagcctccaaaaggcgtacgttgtgtacatttattcatttgtagattatcagaccacaaaacaccacccactctcacccccacccactattcgcagacaggcgcaacaactaaactacgtcacggtcaaccatgttgttgttgttttgttgctgcgagtgccggctagtcttgttgttcccctgccatctcccttccacttcttgataattccgttttgctcgtcattcttctctttgcgcattctgctttgtgtcgaagcacacgcacacatacacacgcttgtggcacacacacatatattggggttacataaacgcgagttggcactttttcctcgtcgcctgcattacaaaaatatgcaatttggcgatggagcagcagcaatgtttaccaagtcatttgcattaacgccaaattggttattttgcatgtaatttcgttttgcatttcaacaaaaaaaaatttctcagcgtttgatcgatttttgcgtatgtattgttctccattttttttttctgttcgctttgcgtcaaaaaatgttacaaatgtgaccagactgcgaggcttgaatattccacaatgaatacatcaaatataccaaaataatcggtatcgtttgttcttgtcttcaataactaatatcgataagtaataattggtttaaaaattattcaaaactcgtttcatataaataaaatgaactacttctaatttatgtatttactctcaaccctattataacctagatcacagagctgaatctggacaactgccgtagtacaagcatcgttggccttacagatgaatacacagccttggaatcgcttagcttgatcaacgtgggtctcaccacactgaaaggtttccccaagctgcccaatttaaagaagctcgaactgtccgacaatcggatttcgagtggcctcaactatctgaccactagccccaaactgcaatatctcaacttgtctggcaacaagataaaggatctggaaaccctgaagcccctggaggagtttaaaaatctggttgttctggatttgtttaataacgacgctactcaagtggataattaccgcgagaagatcttcaagatgttgccatcgttaaatttcctagatgggtgagtttgagtaacttctttctattgtagaacaataaaagtaacttcttgaccacttccagatttgattgcaacgacgaggaggtgcaatctgatggcgatgatgatgatgaggtcaacggcaacgattccgacgaagtgggaggtgtgtattcgacgtatttatagagaccaaagattaaatcgcagaattcaggagttttttttttataaaagatttccatgtaaccaccattaaaattccattgtccgtctgtttaacttaatcgcttattgtgaatcgcgctttcttcgtattaacaataatatcatatactcaaccgtggcttttgtcgcctttcagataagtgcaatgcattctgtttaaatggtttagagatcgatttagacgagctcgaggctttcgagaagcgggttaaggcgaaaaaaagtttgcaggacaaaccacctccccaatcggaggacaaagaagtagacgaattagatgaatacttgaaagagttgcagctaagggaatctactgatgcttcaaccgatgaacaatctgtgataaatgccacaccgcagcctcctagcaattctaacttaagttttgtaatcctgctgtattggttccttgccattttaaatttgggcagtgctacatattgtaagcataacgtttctgaacttttcttcagtattagtcgaacttctctaactcgaaaatgctgcagaaaaagtaaagattctcttacccacaagaagcgttatagtagttcgtaggtttgttgatctcaattccgttgaacacattaaaaaatcgatttagggaagttcgagatgtacaaacaagcaagttggtttaatcaaatttacctttgatttttcagtttccgacgaagatgacgacagcgatgatagcgacgaagaggcgaatggtgaagtgtccctgtcggaggtgtacaatgacgatttggaagaggataactctgattgggaaggcgaagacgaggctggcgaggaggacgaggaagaggattccgatattgatgatgccgatggtgatgcaaacgaatcggctgcatcagtgaatgccaaggacaaggatggcgaaaaggaagcaggtaagttcaattatttatatcccagacagcattagttcttaatgccatatattttcctttttttctttccagacgagtcgcaagtcagaggcaagaagagaaagcatgatggttaaaaccctgatctgtcggtatagcgtctttgtacgttataaatttaaatatacacccacacacaaaacaaaaacacacacacacatcatattttgatagaaaaagatgataaatcctttaggaaacccacaatttgtttctctaaaatgtaagctaatgaaagaagaaatcgacaaaaagaaaaaacaacaaacaacccaaacaaagaggagcataatgaacgtaataatcaaacaaagctaaacaagaaaaaaatacatgtttaagcgagaaaaatcgaggaggaatgcaaaggaaaccaagcaaacaaccaattaagcaagtcgcattagtatagcctcatccgagcccaagttccagtttcattttaaacaccttcgccatcttcaggattcgcaacatgaaatccaaatcactatgttaaagattacacaattacaacgtgtacaatttttagccatccagcagcatcttgttttcaaatttcaatcagtcacgaaaatcaaacaatagctttccggcgttatttgaacaactgcggatttgtcaacgtttcgcgtgaaaacgatcacacaatttactgctaagaacttttaactaactcttaagtcattccttctttaaatacgcataagttaagcatcctacttcgcccactttctgctcaaggcgatttaaacacacttacattgttacccatcacccacctcccagatacacaaactttatctccgcgtcattctgtaaacgtagagcactcacttttgagcaacccgaattgtttacctttatatacttttaagtgtacttttaccacataccgaaatgtttccacttattcattggcagtagtgttttcattaaatgtggcgagtaaatcttatacacaaaacaattttagacaagacttttcatttaatacacaagtaattaaccgattattattaaagcaggccccgcgttaatttaacgagatgagatgtgtctttaccagcccattgaaactgaaatacataaactacatcattttaaaattgtcttttacgggggaaaatgggaaaatgatttctattaaagagaaga

SEQ ID NO: 27893 - DNA, 1186 bp, DROSOPHILA
aggtatcgaacaatcatcaactgaagtgccagctctagcgttttgctttggttgaaaatacaattaaaaattgattctgaagtatttaaatattctgcatcgccagccataaaaatctgcgaaaaccaaacggtggcggcatcgaaaataccgaaagaagcacaaaaagaaaaatttgcaaggctgcgtctgtgttagtgagcgtgcgctgtttctcgtgtggagcccaaaggaagaaaaacacacaaaaatacaaggaatccgctaaggaaaaaagcgtaaccaaaaagaacatccaaaacaaacaagtgccgctgcaatggagaagagaatagaactggaaagacgcgcacgcaaagtaaatcagatcacagagctgaatctggacaactgccgtagtacaagcatcgttggccttacagatgaatacacagccttggaatcgcttagcttgatcaacgtgggtctcaccacactgaaaggtttccccaagctgcccaatttaaagaagctcgaactgtccgacaatcggatttcgagtggcctcaactatctgaccactagccccaaactgcaatatctcaacttgtctggcaacaagataaaggatctggaaaccctgaagcccctggaggagtttaaaaatctggttgttctggatttgtttaataacgacgctactcaagtggataattaccgcgagaagatcttcaagatgttgccatcgttaaatttcctagatggatttgattgcaacgacgaggaggtgcaatctgatggcgatgatgatgatgaggtcaacggcaacgattccgacgaagtgggagtttccgacgaagatgacgacagcgatgatagcgacgaagaggcgaatggtgaagtgtccctgtcggaggtgtacaatgacgatttggaagaggataactctgattgggaaggcgaagacgaggctggcgaggaggacgaggaagaggattccgatattgatgatgccgatggtgatgcaaacgaatcggctgcatcagtgaatgccaaggacaaggatggcgaaaaggaagcagacgagtcgcaagtcagaggcaagaagagaaagcatgatggttaaaaccctgatctgtcggtatagcgtctttgtacgttataaatttaaatatacacccacacacaaaacaaaaacacacacaca

SEQ ID NO: 27894 - protein, 261 aa, DROSOPHILA; identical to SEQ ID NO: 12183

SEQ ID NO: 27895 - DNA, 40839 bp, DROSOPHILA
tttccaacagtaacaaaaaataaattattggcttttaaaatatatgtgtatgttttgtgtatacaatatatagaaagagcgcgtagaacttaagtatacgataactaaacgtatagaattataacatgccggcaagattttcgattcatcatcatcatcatttcatatcctctgatatcttagctcttctcatctcatatcataatattgtataatcttgaatagtacatttagaactaagggctaaaattaaaaacaaattgtgatgtacaacaccggaaatgtcaagttgaaaacgattttggccctcctcaaaagagttaagtggcagaaggagtgagtgaaaatagagcatttttagggcgtaagggggggcgtaaaagttaagagagattacaattaataaacaattaataataatattgagcattgaactcgtactgttcaaaattgtagaaatcgatgcggagtattcgtaattccaagcaaatctcgcgttgaagtctctgcttgaattcaaataacattgtacacaaaacatttcgttaattaaattaaactgttaattatggcaaacaaagattgtaaacgcattcgagctatgcgacttgtgttatccctatacatatcatatatatctgtatctatattcatccgattgttgcgattatttgtggcgctactgttcatcttgaattaattgtttttagttttgaatcaactttctcggctgattattgttcgttaggtattttttttttgtttttcaacaaatgcacaaaaatgttttttttttaaagttgtttttttttcgattttgtttttgccttagcttggacttaagtacgatttttatcaacatgttttattgcagatggttcttatctctaggtgtatatatctagatttagggataattacttcgcgagaattttaccaattatttgatcgtcaaagttttcatctatatgctttatgctttatgctttcttttttttttgtgtacagagatcctaattatacataacagaggggattgtgggtaacgagttagttttgaaacagaaatatagaacaaacgatttgtgttttgtgtgggtttttttttttcaaaaataattttacactttatattcaacaagtaaaacgcttaagccaaacatacaaatggattacaataggctacggctagagttcgtgcagagctaatgattcctttcgttagatgcacctaatagatagattcggtaactcatacttgccctggacctaaggtcatagcataagcaggggagcggaaacgagacttatctcctactggacagacactgttgcactccgcacatatatatatatatatatatatatatagttgtttatatatgagcataaatacacggtacgattacgattacgattacgcttatgggcttacgggcttagaattatctatagacatagcgagaatgtaaaatttgatcaaacaattttagataatctcattgttgctaaaataactaaatcaattttaaagtatcattttacatgcgtattgtgttagccgttcttaacattcgttgcaactcgatttgttgcggatcccattattataactacgatatttagacttaggctctatggaaaatggcttattgaaacaacttgttgtgtccgtaatttgtgtgtttgtttgcttttttttttgagtgcggttagcgggtgctacccgtactgccagcgctactgattgggcagctccgtgagcgtcacatcgtacaggtcgtcctcgatctgttgcacctccagcagaaagatgtcctcgttgcagtagaacgatatcatgtcatcgtcaattttcgcagtaatcctgcaatgagaatgtgaaatagtgaaatgttagctagtacagttagtttgcttatataatttatattagtacacccatgcaaaaagttagcacacgatttgagttatatattggttttgattaagccatgctataatgatgtgagaggtgggaaaggatgcatcctggtgtatatctctctgtgtgggtgtatatctgtgtttttttttttttctatctcacggatcgtttagaactggcttacttaccccttcttgtttgtgcgataaatgttatttatgctcgttgttgagattttgtatttgttttcaatctgcaattgagaaacgagagaaatatgatgttttgtctgttttgtttttgtttctgtttcggctaaaatatttctcttataactcgctggtttttctttttgtgtaattttgttcattttctatggtcagccaatttttatttattcagatttcagtgtatatattgcattcatagctttatgtgctttagtgtgtggtttgtgtacgtagaacatatcgtgggactgcttgggttttaacgtataaatatatacatataagtatatataatacactttggatgagatttgattatgaaatgattcgtaattagttccaactacaggttacaaattatcgaatttcttcgtgtgagtaacgatttatatatatatttagagtttgagatgtggctgaattttagtcgatttatgctttagtctttagtcgattaacgattttagagattgaacattttggcgcttcatttgtttgaattcttttcagcggttccaattagaccaaaatgaacaaaattacagaaaaggtggttaaccattagcacgagtttggtttgattgtttttagattttgggactgggattgattggttggttggttggttggttggctgggtttcgggttgagcttgccacttcgcttaccgcatttagcaggccgatcgtggtgggcggcaccacgtgcaacggtgtatacacctcctcgttctcctgccgcacgtacagcatcacgcgttccgaggtcggcggcgtcatcctgccgcgcttcatcggcggaccaaagtcggtcaggggtgtgctggtcaacatgttctggtccagtatgtgatccttcttatcgctgcatgggaatgcgcaaggttaccgaatgaagagaagaaaatttgaattttagcatgtggatttccttttgaggtgcatacgctcaaaaaaacggaattgtttctgagcgtaggctgtaggctttctacaatggatggacgatttttactcacgtctgcatgtcgggcggaaaatggttgtggaacttgagcgtcggcgtggccaccttctggccgtggagcaggaacggtgaggcccccttcaggtccggcgagtcagtctcatggccgtagaagctctgcaaggacgagtgcgagttggagttggagttgccgttgctcagggggttgaatgtcatgccggtggcagcgccaatgcccagctgacctaccttctccatgtcctcggcgggcgagaatagcaccggcggcttggcgaagtcctgcatgccatagaactcggaccgatccgttaccggatggtaaagctcgtccagcttctttctgcccgtggctgtcatctttcgtttggcggcccgccgctcttcatcgcgcgtctttcgttcggcgccctgaaaatttgaaaaaaaggatataatcagattgggcagtaaaaacgtttggataattcgatgtgaaaatggagggtcgaatttggttttaggatatcgtgtgtgtgtgactaagaccaggcttgggaattttcgagtgcattcaaaatgcatccaggtggattgcgaaagtaccgctccctgacgaattcccactgcgctggcgcacaggtgcacggggccagcgtgtaattagcaatcaatcaaatgcacggatgccaccttttttgatatttctttacttattaattaaattcgtgtatggctggcagtgccataagctgcctcgttgcagtagttgcacaaaatcgcagctaaaaacgaggcaaaaaaaaaaaaaaggaaaaagatggaaaaatatcaaaatagcgaaagagagaaacgagtttctcgcctggggagctgcgatgtcgcacagagacaaagccgccaccgcagtggatttctcagctggagtctgcaatctgcgactgcgcgtcggccacttttggcaaaatggtctacaccgttagggtcagagccaaaaaaaaaaaaaatgaaaaaaaaaaaccagcaaaaaaatggggaaaaaattattataaaatacttagagatgcagcataaatatgcatacataataaataatctggcggcgcctcgaaccatgcaagaaaaagactttgtctgggccagctgcccacctgcttgttgcctgattgcacacacacacacacacactcacacacagatcgcacggatacccatataatatatatagtctgttggctactttgtccgccggtgattgctagtttgcgtgtgcaggcagatgcagcatgcattgctgttgttgctgctgctgctgctgttgcactttgcatttgtaattaaaaatcagcaattgagcgatggaagctgctgcaggaaggcagctgaccaagggggtggcacaaaaggtggagggggggaaagaaggaggttgaggtggtacatcggcggcacaggaagtgatatgttgcagcaatctacttggcctgatgttgctgctgctgctgctgcttctggagcttcatatatgatgcaaggatgtctgcgcatgcccccagcccgctcaaatgaaacccatgctccttagctgcccgctgtagccccctccctttccccacacattaagccaggttcttgcgcttatcacaaagcattttagcctagagccatgcattcgatgtacatcacggcttttcgttgcgttgcgtttgtgtgtggcatgtaaataactgtattttattacttttattttatcttggcaaaaatatcgccaaactggccacttgcaacaagctaaggcgacggcgtctcgaatcgcccaatgcggtcaatgctcgccacagtccagacccctcattttgtgtgtgtgccccatctgggccccttcaccactcccccctcgttgttgccaccactcctttggacgctgtgttaatcgacttcaaagtatgacgaagacggaggacatccgaccaagtgggctgccaacatttcgcagaggcggctggcacataaccattagcattaacgttagctaaattctataatgattcaacattgatgtgcgtagaaaattctcaaatgctcaacttgattgaattgtggaaaatgttgtcaaatgaatatgagcaatataaaatgattgatattaaagatcctgttcgaaaggtgtaataattaactgagatgattccaagtcagatacacaatgatgtgagttgaagatgtattttccaaacattccattaaaagttatttgctgctctaattttctcctttctgggcgaaagtatctctctatataccaaattgcacaatccaaaatgacagttatatggcaagacaaaggcttcccaaggttttttttgaacgtgcggcagaatttctcgtaattttgtatctttttggtcctgccccccaccgaacggggctaacttaaagattcataattggcgactgtggccccagaggtgccaaacgacggaattgcaactgaaactgcaattgcagtgaaatcaaaatttcaaaaaatcccccaaaaaacatacagtgaaaataaaataaaaggaagaacgggacaaaggaaaataacgtggtacgcgaaatttaattgatacatttaccgataaacacacgctggccagcgaaaaagggccggccccaaatgtgaaatataagcccgtcgcgatagcgatatggccatggctacggatcgctggatcgctggatcgctggaattggtggaacggggatgcgagatggtgagatcggagatcgggacaggaggatcgtgtacaataaaagccatgtccaaacggaggcccagggacgtggatgtgtaatgatatgagaaaattaaattggaaatccacgaaatgatttattaataaaccccatcaagcgaaaaagtgaagggttcgcataaaggcgaaggtacagatacgaaacaagggcatggaaaggatgtgcggtgtgtgcgaatgtgtgtgtgtgtgcttgttggccatttacttttggacgcgttacgctttccactaaaggccaacaggctgactgacggacaggcactgccggtgcccccaattcgataaaagttgcagtcgcaacgtagggagaagctgcagcaacaagtggcaggcacacacacacacacacacacacagatgcacactgcaatgtgaaactaacttaacataaggaaagttctgtattttataataatatcgcaagctatgttgaaatttaaatatttaaaaaacttcaaattcgtgtagcatacttttagatacatatatctaaaaatcaaaacaagaattaatttttcttgattcagttgattttgtagtaataagatatgcataaaagtggtaaatatacatagatgttgctttagttagttttacgctttttccaattgttactttttcttcccgtgtaatgcaaaggaagcagcacgtagtcgcttttagttagctcatcaacctgttgcacgtggcagagggagcacagcggctcctgctgcttctgtgtgcgtaattgccagcataggggagctctgcttgtggactcggtggcatcgggtttagggatcaggcgtgagggacgagggaaaataaaatcacttaccttatcgcagaagacctttatctgacagtagccgcggtggaagaccgccgtatctctggggtcctcaaatgtgtcgatttgtacgtgcagcggcaggccctggaaacagaaaacagaatccgtattaatatcacaatggtcgtatcattcaaattgcccgcagggcaaataaaagttgctgctgcagcagcaactgcaacaccaacggcatcaactgcaaaagcaaaagcgacttgcaacagctgcaattagccgttgtcatttgggctgaggggggcgtggccgaagacgaaggggcgtggcaggagtgatgttaaactgccaacatccgttgggcgaatgtgtgtgcaacatgtcgtggcaagtgcataatttcatttgcctattgtccacactcaatgccgcacgttaaaaaaaaaaaaacgtattataatatgttctaaatgcgattaaaatggtaatttgagtaatacaagtaatttataaaattttattattataaattgtatattattataaaatgaaatatttggatttttgtcatacattctgctctcgaaacgagaacaattaatttttttgctgtgcaagctccactgtacctgcagcgatctcttttaatgaaaagcaacgagttctgcctgtgtttctgtcaatgaaatatcagacttaatgtacgcattacaactctggccaggaggatgtgcaatccgctttagattgctggtgcgcaggggcagcgcggtgggggggggaggggggtgtagctcaggtgagagggcgcaggcaggtggcagagaagaaatcccctgcctacgttgcatcagcatcagtctgaccgttgtcaagacgactgctctgaatgctgatcgctttgtgaggggagaggggcgagtggtgtggggaggggggtgatgtgaaaaggaagaagagctctttgcccgcattgattcgccattaacaagttggcattaaattggttattacttaacccatcaaaggcaatgtggctgagttgaatttcatttccagaaaagtgggcagtttatctattagtttaattgaaagtaaaacaaagtgctacaaaaaaaaaaaactatgcaatgatgcaaatgcaaataagcattgacttaaaatataaatttaaatataatattctaaaatagtagtaaactcaccttaactcccttttgactgctgaaatccgtgctcaagcactgaaccgcaatgttgatctgtttaaaagtaaagaagaaaaaaaatgaaattatatgaaaaacagaaacaaaagagaaacagcacggcgcatgtgagaaatgccataaaatatacaaatgtaaacaattatgagcataaaaagaaattatatcggatgacaaaaactgaaatgcgtctgctattagaaggcaattgttttctctctattaagtcgatgtcctctttatgcccacgacagtttaaaacattccaacgcactcggaaagagcaaaaatgaagacaaaaaaaaaaggaaaagaaaaaaaactgaaggagagacaataacaaggcaatacacagaggaccatggatcgaccatggaccacggaccatggaccgggccaataagatggcctgaactggaaccgagcaacctaaagccaagtaacgagccaagtgaagccgcgactttgtatcgcagccaattcatttttcgttcgacttcgattcagtgcaaggtgtgtgcatttcgcatttcgcatctgtatatgtatctgtatctgtatctatatacagatatatgcgtatctgtgtgccgcggcattttaagcatgccaagtccgagtttgagtcaaagtcgtagtttcagacagtcgttggacagtacgaaatggagaaaaaaaaaagaaataaaataaaaagaaaatccatcaacgcaaaaataccaaaggaaacaatcttaatggtaaaagtgcagcagtcacagccgcacagccgcacatccaacatccactaccaccatcccagctccgcagcatcccaagatcgggcggccatccagagaccgagatgtgtggacgagcagtatttaatgtgaataattagcgggcgcgtaccatataagcgaaaagcgaggggcgaagcacctgcgtgtcggtgcgtacgaaagttttgccgctgggaaaggcagtatctcacagatacacacacacgcctgcaaagatggagatacagatgcagctaacggcacaaaacgaaatcgacattatgcgagccaagtcgggccaagatacaaaatgaataaaaaataaaaataaggcgactcgactctctctcctcgaagacgatgatgtcgctgggattaacatctcagcgcgtaaacaatttgtaaataaaaagctccatcaaatgcgagtgggcggggtggtggagaggaggggggtgagcggcgggaaaatgcggcggggggaaatgcacttatggccagccagttaataactgctgaccaatttggcagcctgcacacacagaagtcactgaacttgaatgaaaatcaatacgattttggcatttgtttttcacaatattttttcacatttttttcgaatggcatttcagttggattaagtggacacttgaagaaaatgtttccgcaagttaaatgttttaatcaaaactctatcaattaatgcctcaaataaaatattgggatttttaaaatgaatgctgacgttaatgaaagcagttgctaatcaaaattgatagcaattgaagttttatgtaactcacaaaatatggaaaaagatttgcaaaaatcttggttggtttaatttggcaaaagtaaaattgcaaaatgcattatagttataataataaaagtatgaatataaatatgagcattgctaagcagtcttaaacttaattgaaaaagcagaaaagcacagattgagtcacttaaatttgtgatttttagctcccaaaattgtattgaagtattaaatagtagcatatatcaatgtcttttactacctttaagaaaatgtcattctttgcctaatatggcccactttttcactgtgcaaatgggcggagcatcgcaaaggataaaccgaacccatggcgtatacgtaatatgagggctgtctcgcttactggtcttactactggcgcttgatgcaatagaattgcaaatattttccaccgattaaaatgcttgataattgctaaattaaaacgcggtgggagcctgctcgatctgctgcggttagcagccaaagccatagccaacggacaccaaagcgaactcgacttaaactcagacttagttccaagcatttgcgagtaagtgattaaaactaagtgtcataaataaataaatgcataaattattcttttgaggcaaaaagatactgacactcgctgcgagtgcgatcgagatggaaaatgcgcggacagcgggcgccagaaagggatggccacagtcggctggggcaatggcgacactgtttgaataatttgcgttttactcgcaattgaaaataaatcagaaattaattcttggctcacacacatacatgcatacatatatacgaacgatatagagaggactttgctggtatctgctatctcattttgcttcataaaagtgtcgcgcttaatttttttcgctttttttccatttttaattgaggcggcgctcgaagtaaacaaaatggttggtagggaaaaacacataaaagcacaaagaatttctatgatgatgaagaactagggataccctggaattgctcttgaattctttaaattcgtagtttttaaatttgtgtgtctcttgtctctttctcaaaagctagcttagatacaattctaaactattttactatttagtatattgatttaatatgctgttacttggatatatctttcaatatgaagataaatcttttctttaaaatgttatatgttacaaagttgagaagctttaagatgtcgtacttagtagtccaagtttataacaaaatcagcatacccttgcagataaagggtaaacgaaaattccataactacgattgccgtagaaatgagatctagaatgagcagaacttaccttggcggagctctccagcggattccagtagacggcgatggcattgtgcgacacttcctcgatgcagccaacgaggccaaccgagttcttcgtatctgtagaagaagagcagtccaagcagataatcagtgggggatttcgaggggtaaagatcgcgggattttaaagacggacgaaaagaagtgcgagagatgggaatggatggagtagttgaatggggtaaacaacaacggaggcgagagcttcggacattggaaaatatgtttgtattaacaattaaggaaatttctgcgttgccatccagtgacaagtgcctaatgagttatgtttgatgggccagcggcagcagcagccccatgttgcaagttgcaggctacaggttgccacagccgtggccatagccatcgagattatctgcaatcaaacaaacggagcgcagtttgctgccgccgcgcgatgcgcgtttatcaatgtcataactctcctggaacgttgcgggcctttcaataaaaagcaacaatttactgctagaaatactagacaatacaaatggacaggcgagcaagcgacgctgctggacttcgccgctcagattggttgtggtcaggttgggtattggggattgggggctgggaaggccatgttggttttacgcacctgcatccaagattctctgcttcacggaatgctgacgactgtgccagaattgccaggccttgatctcatcctcgggactcttctcctcgcggaacattagcatgatcacactctggaatcgattgaacgggaagaacgaaaagtaaatatggttattaaattaagtgcgcgactaagttaggggacactaaaaattaactcatctcacttatggcatgcttaaaagtagtagtatctttaacatatttattttcctgcttaaattcgaactaattggttacactctactatttattcatctccaagtttatctactctaattgaaattttaatcagtaaaataaccccttgtaactatgggatttttgaagaaaaactcacagatttgattatatctacgtaattgaaaaagtaaatctaaaatacaaacagccctaaaagaactagggactgcaacacggccaactcagtttctcagtttcgttcactatcctgatctggaaagcgatctgggcgagagttgttgatccttatctgtgaggaaatgccatgtcttgcgttgatttttgccagacatggtcctaatccgtttatactatcccaaggatgggtggctccttgcccgggttcattgctctgacatatatgcgttgtgacactcaactcacaactcggcagatcgcaccctacgcctttgaaaagtcaaaaggattaggcccgggcgaggacaaaaggacgaattcgatttagcagaaaaacgtccaactcatttggtttcttctgctcatcgaggcactattgttttcccagcatttgcatattttgtctattattttgtgtctatttttttacattttgaataattaaggatgcgcgcagagatagccaaagagtttccttccaaaatcagaagaaaaaaaaatgccgaggcaaaggaaacagtttcgaaatcgcaagcaacccccgaaaggatcatcattttcttgagcagtcggggttttagctgattactgcataaatatttttgtgtgttttcttcgggactgtgtaagttttttacatattcatgggctaatcagctcgtaaattatactcagttttttctctcgattcgtttcacatttttcttggatcagttttccccgttagattgcgttatgcaaatgcccaaaagtgttgggaagttgtccaatttcgggtagaaagggcgcgcagctctaaacaaataaactcgtaaattaattttgacacttttttttggtcgagccttgcaaaatatggcacttttatggtaatctgacctgaccgagaacttgagtagcgaagggaaggttaagctcgtatctgaagatctctgcgtttcatttggctacgtttcttgaagtttttgttgcaagtttcgttattcatgcttctttttccttttttttttatcgcactctttgcgtatgcaaatgactaggactcggaatcggattcagattcgcattcggatgccttcaatttcaattgttgtttacttagcctcaagttccgcttcccgtttcctccggccatttcctcaacccatttaccactttcaactgtaactttgatgtcattctttggctctcaacggttcagttttcaatttgcatttgcatcttcagacgtcatttaagcttatctgattgatgatgttgacgggtattgttgtcctgtttctgcgcctgcttctgctccagctcctactccttgagcgatcgtcctgaacaaacattggtcgtgaaagacgatcgagtctgccggcaatttgcattgaacgaaatattcaaattctcatcctagggaacgcactcgcattctcactatcatttatcattgcgccgtgcccctgagcggcaggatatgggatgggtgtaattgagcaaaggggtggcgatggcacctcggggtaggaccactataaactaaagattcccgctgaagaagccgacacagattccctgacaaatcgccctggtaacgaagggttgcctccggggcataattttccattttcttcgttcatgtgctcgtgtgttcgtgtgttcgtgtggtgttgatggcataaacaaaacacaccaaagaatggaaaacaagcagcatgaacttgattgacaaagctccccttcccctttttccttaacttacatatatctaagcatatagatttggatcctaccttgacggtggtgttcttaatgggcttttccgcatcgtgcacatactccagcgttattccatagaattgacccttgttgatgtaggtgatgcgatcgtcctcgcgcctctgcgatgaactgatggggctctccaggtgatatcggaagcccacgtttgtgaagctaatgggttgtatttggaaaaggtatcatagttagaagattgttaatgaaaatgataagaattgtataataataaagttgccaaacggggtccttataagtatattactaattttcaataagtatcaatgatttagttttctttcagcacaagttattagtcatttaaggatcttcatatgacttacatttttggtatttgtattttgtcggcatcattctgacgtccaaagtcgtgccagggccgcgatcgcgtggatccattggtgctggtgtccaccagcgatgtggtgggactgttctggctgccatggaccgccgttctctgctggatgctgttcacgctgacgggtatgctgccattggcatcgatcagcgtgcccggctggcacaattccgtataatcaaaggactgtttgtagagaaaaattttagaattatatagaaatttgttatgacaagcacttattagattatataagagatacaaaaagactacctttacgtttctagggcttaatggacacgtcacgcttttgacaaacactctacaatttcgctacaaatctacttaaatgtgattcttatctgatttagtgttatgtacaacacactacctctaagttatggttttctattcatattctatattttaatggacacgcaacgcattaacaaacataactactttgttttgattgtggcacatttgggattctatcgtggggtatacctgttggatatttgtctgatcccgcggtgtaatggcatccgtaccaatgcccgaatccggacttggcaaatccaccgttagacccgccgccgtaatggctttggcatagagtggcgttgctccgccattgctcttgccatcctgcgaatggtgctgttgctgctggtggtgctgttgctgctgctgctgctgttgatgctgctgttgttgctgctgctgttgctggtggtgatgcacgctggttagcacggtggtggtggcgggcgggggaacgctgccggcaaagcggccctcataggtgaccactccgccgggctgagatacggatacgtccacgtcgccatacaaagacctcgtgctggccggcacatagccaccttggccatccggtgcaaagtattcccgatagtaggagggctccgctataaacgtggtggtgctggtgggcgggggaccgggtggcaggcgactggccgtgtacatgccatagtcattggccgtgatatagggacccggactgggactttgcgcctgcatggacacaccgccgccgccggcggctccagcgggtccggcgccgccgcccgctccgctcgccgtgctgggatgtgaggtctgcaggtggttggttgggtcacacatggcactaactcgcttgctcgtctcatcgagtgttctcacctgtagatagatctgtgtgccgcccgtggttgcatacatctctagtgtggctgtggtcctggctcccggcgatcctgattctgatcctgatactgactgtgagtccgattcagtgttttcagtgctgttgatgctgctgctgggtgtgctgggcctatcagcttcacttgccgttggtgcatccacgtgcaagatctgcgggaaaggtgtgtggttgttgggttgggattttttagcttgaatcacttaaagctaaggtctgattgagaaacggtggctaaggaaatgatcgattgatcaggaatccaccgagattccaagatattctgtcattgtggctaatagtccaacagaccaatgattgatgattgatcgttgtttatggccagcatagcacagcacagcacagaaggtcgcacagaaaccccaaaaaaacgaggtgacaaaattgtgcgtgcgttcttttgggccatgatgtggatttttctttcagccatgattcatacaacaacagcagccagcagcttattgaatataacgtcaacaagtacagtttataataaaaggctataaacacaacaaaaaaaatgctatatacgaaaacgaaatgaaacagtcgccgtcttcgttgtttgtcggtcgagtgggaaagaaaccaattaaaaaatatacagaaaaaaagcgcgaaaaaatcaacatttatatacggcacatgtatatacggtttgaaatatatatatatatatatatgactatatgcatatgttaattatcattgtttttttttttttattggccgcccgaaaatgtcaaacgtttttggagacaaacgcaccgaagctaaatgaggtaatacagagcaaagtgtggtcaatccatgtctttttctatatatatatatatagatatcgggggtctaagattgaaattagcaacgaactgctgattgccattggtctaaagaaagtgaaaccccgaaagagacacaggtccagccgaaagacgtcactatttggctggccttttgatcgaaaccggttgacagcgttttgggcctcaactttttgggggtaattttcgttacacttttcggccatctcaacacacactggcagaacccttgtaataatttatggtctttactttgattatttcggttagcttttgtgtgtgtgtactgtcagtctgactgatttaaatttatacagaggtttttgtgtctgcgtctgtgattttttggattccattttttttttatttttgtattcgttgtggttgaagtctcttgtataatttagcatcagtaaaagattctagctgcgagctaattaaatttgttcatcgaaatcaatttgcattttaaacttttaacgtgcaacgtcagaaaaggccttgacgaatccgatcgacgatcgatccgccagagcagagacacggagacaaagatactttgttgctgttggttagtcggattttcggtctttcgatcttttggtctttcggcattcggcattcggcttttggtttttaacttttggcttttgtggtgcgtgtgtctcggactcaatcgcatccgaatctttagccattgttgttgtcaacatcagctatattggctatgtggtataactcagctatcggttatgagccgtgcggagttgggcttttagaattatgctaagtagcgaccagcgacaaacgattctggcacatatttatgtatgaggaaggaataaaaaaaacaccaaaatcaagcaacaacaagtagcgagacaaaggcaaaaataacaaaatatttaaataaagccaattaactattttaatgccttttggaatgataaaaagtgaaacttttttcttcttcggcccgagttttatgaatatcgttaattctcggaaataaagtgaacgaaaagccgagaaaaacaaaaacatcttcatatatggatgcgaacaaaaaaaatcattttttttgcattcataaaatattttttttaatggttccttgatgttgtaattgtgattctcggtaaggaaaacccgtgactaacagccctcgaaaagtgctcacttttgttggaaatttactagatgctggaacttaatttcagttcaactctttataagagcaataaaccttcaaggttgtcttcgaattgtttggtcgatgctaaaacttccgttgagagagcatttagttattgatagacaaaacctattatattgaagacattgtctcaattagttattaggtattcgaatttattcgaattgtttttcttttgaaagtcccatctgcctgtctaatttatcaatctgtttgttggatcattgtctgtgcaattatcttgttacatcatgtaggctttccattattaattgaattattattaataacgctttccggtttttagcgctttgcattacgtttctgattcttggaatcttaatcgttcatattttgataatggaaaatgagaaatatctattgatgttttctattaaagataagtttattttattgggagttcaggaaaaatttttgaatgttgactcactcaaatatcgtatgattcattttgggaaattaaggaaattctccgaactaaatgagaaatcggaaattatttagagaaactgtttacaatgtttggcgattcgatccaaaaacggggaaatccgccgaatgctataagcaactgataagccacacggagatttggatttggggcaattagaaaggcatccgatgaggcaattggatgtggcgatatatctctacctatttatatagagcaacgatagagagagagagagagttgtttggctaatccaagatctaaatgccagagtctaatgattacactttccggtgcctggggtgcaataaataaattgccaagagtacaaaattgatatgttttccgattctcgatcataaattaagctggcgaaaccttagactttaaactatggcgactgtgtgtatgtaaattaataagacaaatattaagaataattaactgtcaatgcaacaaatgcacaataaattagagtgcatgcaaattgtgcaccgactgaggcaatttaatatttatatgcgtatttttttttgctgttttgtttttcgctggcaagcaaattaatgcccaataaaaacggagacggcaattaagccgcgctgggttctgctcaatgaattttataagccgcactcttgcccacccaccctctaatattcgattcttgattcttggccttaacaaatgcgcgccaaacaaaagacttaggcagcgaacttgttcgcagcgtgggtgttgaaaggcaacgcgttgcgcccacacaatattgttgttgctgcaactgctctgtgctgctgctgctgtgaagttgttgttgttgctgccgtgctgtttttgttgctgttctgctgctgcgcgtgcgctgttgttgttgtttgattcatggtttagatttgactcgcaggtggattggcgttattgatatgccacagaatattgcactactgcccacattccaggcaaaaaaggtactcggtattcgatatcggtatcactcacactcactgtctatttttttttttttttttggttgttgtatttcgttttggatcccctccgatcgatcggtattcggttacaatctacgatgtgttacggatcgcggcgaggaaaatagcgaacggctattacggaatcggattcgaatgcgatacgatcctactccgacagcgtgatacgactgactaaaggccgccgatcgctgccaggtatgacagccgccgctgcgacgtcgccagtcggcgatccgcagttgttgcgtcggccagttggaacacagatacacacgcacacactcgcgcatgcgcacacctcggccgtctctcatatcagttcaaaatggttggaatccgcgcctgtcgcaatattctcaacgggagcgacaaggaggggccggacagggcgttgcagctgcggcggcatggcaatattaaaaaatagctgcacttgctgcataacgtcggacttccttaacttgaactgtccataactaagacggcttattcatagaaggtgggttctccgaatctcactctcatgactaaatcatattgtatacatatatacatatttatatatttctagcgagtaaaagtataaagaagtaatagtatagattctatattcctatcctatatcctattaaatatctttaagtttggtttaaaacgatatcgttgattctcacataaaagttttgaagtttggaaaacagtatcttctatttccataattcgaaagagagtttaatctaattgtgatttttctaaattgattagataattcactgatgaatatatcaagctaaattgatagttagatttgtaatgaattggttttgaatggttttgccatacagaagttcgactgtagttacacttgctgcacttattgagccaaatcgaagccaggtcgaaggaaaaggaaggcgaaccgccggaagtgcgcacttatcgctgccgattgtcgcccagagtttgctactgcaatttcccatttaattatggttgttccttttttctttgcgtgtgtgttcgacgggagtgtaataaagtgccttccaaccagtccgcttgcaacttacaactcgaactcgcgcaaaggaagtggttcgatgtgtgactgcgatggtgctatgtagcgagctctgtgcgggagcgagagcaccatacaaatcacgtacgcacacatacgatcgtataacagcgtgcgagcgtataacagttgaccgtgcagtggcagcagcaaaggctcattgttgttgttgctcgcgtacatagttgttgttgctgccgctgtggttgttgctggcactgttgttgttgttgtttttgttgttgctgccgctgtttcaatagaaccgaacgagcaaacgacgacgacgacgacggcacgacaacaaaaacgacgctgattcgtattggctgcagccactaatactcattgctcactcacaccagcaattgacagaccaattgcaggtctgttagacaacagcagcggcagcaacaactacatcgcccagcagcagcaacatcagctagcgacaacaacaacaagagatacaacaaatatagatcgttaattgatgtagcacacaggatgcgccgctgattggggttgtccactccgctgatgatgattgtgaatgggcagtgggaatgggaatgggtatgggtatgggtatggctatgggaatgggtctcggaatggcattcgaaatgagatcgcatggactgccgatctaagccaaagcttatccgcaaatacaaatttatattgcatacagcatgcaatgtacacgaagagaaaagatagtatgagttatatcaagaatgtatcctaattgccatatgtcagttggactcttcttttcttaatcgtggttgataaataatatagaagctaatcggtttgcttagtgcaccgaaaaaaaagagataatatgttttactatcttttcacattttctttaccaaactagaaacaaatattgtataatataaatttgtttataagattcgctttcaattgtaagcatcatttcaaaataatttcaatagaatgcttaaaataagaaatccataaagtgaaaaaagtatgtagattcttgcttaaaaggatttgtgaatctgtttgttgattttttcactgtgtagaagtgcttgcttctaaattgaaatttgcgtgcgtgtccattaacttttttttttattcataaaagagcttccagctgagctgcactcagcattcgaaaaaactatctttcattacagttttgcttttactcattattaattcttaaggatgctttgtttttaatatgttttgttggcctaccttttgggttatgaccgaaccgggtccatttgctgttgctgcaccggcaatgttgccattcttgggatccttgcgcaagtcttcgggctctcgtttgatgctaattagttgctgctgctgctgctgttgcgccgcagaggagacaatggagcccgtgctccccacgccagcggcactaacaatgtcgccgggatgttgctgctgctgctggtgttgctgctgctgctgctgctgttgctgttgctgctgctgctgctgttgctggtgatgcgagatcgttgtcgtggagacaacgccggttgtgcttaccgtcgccgatgacgaggggtgtgagccgagcaaaaagccttgaatctcattttgcgataggccagagacatcgataggtgtggtctggccattgagctttccactgctgttcaaaaattcaaatgcagagagagagagagagagagggagagagagggagaggaatatatgacattagttggtgtttaataggtgcaattattactttaaccagcgtatgcaaagtatctcatgcaaacaagaatttataaaaatagtttaaagactgtggtgtctttatagagccagcatctacacaatataaagtgacgttttaaagagttcatatacaacaataatccaatttaaggtttatagcccattataacagctaatctatctatctattccagttgcagtaatggcgcccaattgcctggtatattccgacacccccacaaatggaataactccattaggctgcttatcaatcaaacccgcgctcgccaatcacctgggcaatcatgcaatcaagccgcaaacagcgaggcaaggctaatttcattcaccggagccggagacacctgtgcgctgctcacaaaacctggatgcccgcccaaatgggagcaatcggggcaacaaccagccaccataaaccagaatccagcctgcagcaagtgcaaaaaaaaaaaataaggaaaagaaaagaaaaaaagcacaaaaatacacacgagcggggagaaaaacaaaaaataagaaaaagaaaaaaccagacagaaaaacctgacacaaccaccagcaacatcggaatcaaaatcaacaactgcttttggccagcatccagctcgagttggcaacgaacacaatcagccaagggggttgggtggtgggaaggtggggggttggctagcggcatcccccatgacttacttgccccatcgattcgatctcttatcgctttatcgccgacaactctaggaagagtcgtaaattagctgcgatgatgcctgtcgccgtctgtgataatcgaatatggataacttttggcatttttacagccatccgagggggcttaaatcaaaaaaaaaaccaaaagggagagggaagatggccttagagggagacagcactcatcgcaacaaggtcaagcaaacaagcaaacaaaacaaaacacaacaaaccaaaccaaactaaaccaaaagtcctggcagctggaaaaccggattcgattgtggaattatttccaccaagttttcagacacaattaaagctcttttgagggaaaccccgccctttgaccagcgaaaaaaggccaaccgacatatttttgtgtcaattgtgcagcaaagtgagcagatttgcgaatgagcgccttttcaggtaaacaatatttagtaacatattcataaggattcctaaataagatggcggtttgcttgctgcgcaaagatgggtatagtttagcttatcctgtaagtttatttggctagttcaaagatttccaacatatttggttttgaaaagtctttttttttgaaccaacataaatatgttcttgcattcattcacagataaagggaccagaactgatctgatttgaccggctactttcttataaatatctggattctggttctgcgactggtttttcgttgattgattattctactttgttttgattatttcattcttgactcctgttctagaatttatttactttatatatatttaacatttatcacctacatgatgggttcctttgcattcattttcttaaattatacaatattaccctccttaagatctatatccaaataataatatatttgccaatttagctccattcgatgtgcccaattgagcaattcgggtaatagtgtttatacgaatccatcagatatgcccgattttcagctggcttttcgacaatttgtcttaatttgtgcatagatattgattgcatatatgcaaattccgagcgttactgaaattgcgccacaccttggctcacacagatacaaattctgctgggagtgtgtcggtctgtgcgtgagtatgtgtgtgtgtgtgtccgttcttccgttagcagctgttgcaagatatttcagcgctgtctgctcatttccattcggttcttttgctgttttttttttaccacagtatcatttcgaggtttcatttgtgttttttccttttttttttttttttggcattgctcaagttgacaacgctgcctgcgattgcgatcgcttgccccattttgtggcacttgtctccctcgtgcccggtgtcccggtttttcacccgaagttgttttctggcttctcaaactgaaagcgtacatatataaaaagagacaaacaacaaaacggacatcgacatggacacaaaaaaccaaaaaaaaaataagaaatgtttttgtttttatgttctgcagaacattttcgctattaaaaatgacactcggattgcccgcgttataacatttttccctcttttttttcgtaatgcgatatgtgagcgatgttattccgctttttagggtcagtccgtgtaaatcacgtagcggatatggggaagcgaactgagcgcggcaactcgcacatttattagatagccaaagtgctgtccatatctcgtcgccgtcttttggcctttaattgtgtttctaagccaagtgccgagacgcgcgaccttttccaggcccccggccgaactacggttacggtttcatcacggctccataaaaccgaatccgaggcacagaactcaccagcgatccatgtgggcttgggccacttggggttttggattttgggcttggactcgggtttcataaccccagctgaggcaacgtgccgcgctttttttttgcgcatttccacgaagttcataaacgctgcacttaaaaaccaacagcattttcgccagaaaacgaatatttttctaaacatatagagttgggaaatatttgatgtttgcatgtaaaaataccgatttttaaaccttaatttcaaatgatagtaataatgatagaaattctcccaaaactgtattttcttaacaatcaatttttttcaatcaacaactctcaattttttaaatagatatatgtttttaaaatgcacttaatgtagtgcaaaattgtgtgaaagtaaaattcaatattgactttgcccacttaaaatatgtaaactatctgcagtcaaaaaccagtttttatgccaaattaaattataacattttataagagcacccatgttttattgatgaattaatacggttttggcaaatggtattatcgcattaaaataaaattaaatagagcacgccgagattgatttcgaaaacgaaacaggatttgctggaactataactattcgaatccaaactggagacttacctccagggcagatcggcaccgggagaaccattattcgccctttcgccttcgctgcgatagtagctatagatgggataaggactattttggttggcattgggatgcagttgatcctgatcctcgtttagctgaatctcggcggcaacggcctgcatcaaaccggctgcggtgagatggtgaccatggtgatcctgctggtggttcaggggcaaaaccaatccctgatccttgacctgatcacctgggctgtagtagtgatggagtagctgctgatggtgctgctgctgctggggatcgctttccacgtgccccgcgtgcagtgagtccaagctgaagcctctcctgttttgcgaggggggtttttaaaattcaaactgggcgtggcagaaaataagatgatcgccgacaacgcccatgtgcgtgcatttagtttttggcaatccagcatcattagcatttccatttctatttatttactatttacataatcaatttcgggccaggtgcgtccgataatatcgatcgatgtgtgtgtgtgtgtgtgcgtctcagttacggatttgtaagttttgcggcaactttttactgctttcggcatcggaattgattcgtttagcgctattagcgtcatcaaataaaacagaaagaaatacaaaaaaaaaaaaaccaaagagcaggggccgaaaaaaaagcgtcaattttttgttaacactttgccccgcccctggacgccggtggaccccccttcttcacagacgcccctgtactctgcaagtggtccgcagcatttattcactaattatttatttcccatgaagctttttttcacacccggtactggcagaatgtacggggtatatgcggcttttgcacatttatgcaataggaaaaggaagtggttacgattttaatggatttgtaaatgtcattaaatccaaatctgattaaaaacatgacttacattaggaaatttaagcaagacattttatgaggcgcgaactctgaagtttcaaaccatcacactttgtctgtcaaaagtatgctaacaaattttggtttctaatacccatcaatacaataagaaatataagtttatattgagaaataagaagaatattgcatttataatttgataatcagaataagatgacaagatataagaaacttcaaaggattactttcattgtgcttccctgtaattctcacagtactacccattcgaatccttcgatttcataacattttcctcaattttttttttttagctatgtaagtgcatggatggcgaacccgtgattaggccaacacctcggccactcgtccgcctcctgggcaactcccgtcgagcggtccaattgtgcaacaagtagcgaacagtttggcgaaaacaaaaacacaacaaacgccgaggagcacaaccctaaatggcaaccctgtggcgcatttgctgccacctgaattcgcgaggaatcgcatgaatcgaatggatggaacaggaggcaggactgctgtggtctcgatggcaatctcggaaacgcgaaatcaagatcggcgggcctcgaaacggggctttcagcgcggcctgggaagtgctggcccaaggcaaggtgatcgccgggtactttcggggccgccaaccggttcgcaggatccgcggcagctgcccaaacctatgcatgcatatatccctaatcccaagacgcggaggtaagcgtaacggttaaggaaatcatgattgatattagctgaggctcggcgagaagacaacgcagcttgctcggacaccgtccgaggaagataaaggacgaggaggcagcgatcaaagttctcccgagggcgaaacaaaggaactgatttgcataatgctttcagctagcagacactggaaaaggattcgttcgggattcacatgcaagtaagtccaacgactttcctttcctttttcctttaccttgggcccatttgtcacggccgagtggatgcgcgctgcgcctttatattgtcattgtttctcaacgttggacatcgcaccttcggcccattgagaccgctgtccgtgtccggcggagatgaaccaccccttttttttgcggctcgggtccgagggtcctgcgatgtaatttgcataaaagcggacatgggcttaggcccgaatgggcctaaagttttcaaccccttcgcatggaagctgcggattgatcgcgattgtgtctgggcgcaaacaataataacagatatagaaacgaggtccattaattcgtgtcccttcgccgcatccatgtgccatctgttcgcttttctgaccgaccaaccgaccgatcggcgagtgtgggaaacctctcaagattctgattgggaaatggaaaccgcgctcgagcgcggaaaattatccaactcttaaggcattattttcgttgctggctttgttggtttctttctcagttgttattttttttttttgtcttttcatttcttttatttccaaccattttacatctttcttttttggtctgtgtcatttacatgatcatattttatgcaaatggccccgggatctgcggggcatatgctcgtacaaatacgatggccagcagcgctgtcgggcgtgggcaataaatttctcattcgtatcgcattaattactacaatattatcagcagatacagccgaaagcccgagctgcacagacaccgagatacaaagatacatctcgctgccatattggaaacgcggtagatacgcgagagtttcagatacagatactctcggcgaatggccgatatatgcagggtatgtacctagagcgaaagcttcgcttcgagcttaaaaaaaagttacacaatccgtaggagcaacgcacacactcttcagatccttcaagaagttagatatacatttgtatcttttaatgccagcacatgtgactttgtcgacgatgttagtcctttttatttcatttcatttctaccgtggctcggacatccaatccgtatatgatagggcataattcgttgtgcttgtggcttcctgcatgatggactttaataaaaaccgaactctacgatcccgcggatcattcactgatcaagctctccagctgatgataacacttcaccatttttccatgcacttcatcgcgttaccgaaccgaaagatgcaaagatacatacgtatgggctttaagtttaatcggattacgcgcgttctttcactgatttcaaaagaacaacaacattaagtacatataaacaaatattgtcatatgtaagtatgctcaggcatatatgtttatatacatatatgtataaatatgtgtatatatatatatatataaacttgatgctgttgtcgaccttgtggcttttcgatatcaactgaaaaccactttgagcgttcgataaacttgtagcgccaattcagagttttggagtggagcgagagactaaaataacaacaaatttaacagcaacaaaatgacaacaaaataagaacaacaacaacacaaacaacaacataacaaatacaagaacaacaggcgacagtcgaaagcgtacgagacgctgaattgtgttaacatgtttctttcttgtctcctcaacgttgtccccatctacctttctcgctctctcgcgccatctgtatggcgctctctttccttctcgctgtcgccatctctctcgtgcagtcgcttttgctgttgttgttgttggtgctgctgcaggtagactgcgcaggtgaacaggtttgtttttgtatcaaaatgtccaaacgctgttgcaccttttaatattaataataataaaatgagaagcaagaaacaaaaagacactaacaacaagtgagaaattaaacttgattaactcaacgacttgcgaatgccctttgattgagtttagatgaatatttgtaacatttagtgcttcagtaagttaagagagcaatattatatcattatattgatcaatatttatttcttatatgaaatgttcttacaaattatatatgaactatcaagatcatttgagaatattgttgtgctaccaatgttaaattgattaataatgagactttcgacttttttgttatatcctgagtataagttagggtattaaagtgctccatttgcaagcgcatgcgtgacagtgacttggggcttgtgtcgtcgcccctccccttcactcctctgcacgcctgacacaccaccccccccctccccttcgtcttgaaaaccccctcgatttcagatgctgtgaaatggcgacaacagtaaaaatattgaaatattgtcaatcaaggggttaacatggtgaacaggagagatttggcgaggggtggctcgtgaattgagcgtcagtgacagtcgcgttctatcttcaagataagagacactaaaagtgtcgctatgccgccgaaacgcactgtatggcaaataaaatgaaaacttaaaataaagcaaaggagtagcgaaaaaaaaatgttaaatcaagaggggaaaaaaaccgaaaaaaaaacgagataaaatatgttttacagctcagaaacttaatatgatcgggtaaagtgaaagtaagcagagctatataagatatataggggtgtgggtatacatatacatatatgtacatatatccaagtgagagtgtgtgagttgcgtgtgacatgcgcattgaccgcgaacactgcgatcagaaggctaaaacccgaaggttatccttgtgtatggaaatttcacaaactgcattcatttcgcacactttgtggggtttccgcatttcaataaggaaaaagtcccagcactgagctacaaaactaaggtgtgtgttggactgggcttaaagaaaatgcgaattagtaatttccattcatacaagatctacatatatatatgtatgtagatcttttgtggtatacaaatgtcaaagtttaaattcggaacgaaacgattttgtcattaattattattaatttatttcacggccatcaaatattattgcactttaagcttcgcttgaatacaaattcgatttccaatttacgtaggagattctatttttataactttattaaatgtcaaagggtaatttgtatgagaaaggaaatgcaaatggcgtcttatcaattttgagatattttatggcataaacatctgctgtttgttcaaaattttaataataaaaatacataatggtaatacggttttttggtaaatataaaaaatataaactgtactcaaatttttaagacaatcgaactttaatgaaatgtgtagcgttttctggaattaagtctataaagtcagagatttctgtgtttcgcattgttgaaaacacttgaattggcaattaaagaaattatacgtatttatgccgctttgggcgcggttgcataagtcttcgtgcagttaaataatgaaaaatgcataaacaataaaacaattttattgccaaatggcgagaataataaaatcgtatatattgtacattgctttgcactctgctcaaccgaataatatggctaattcggcgaatcgtaaaaactttataagccactctgctgtccgaggctgcaatttgctaatgcaatttatagagcttttgcttggggatttgtccaatggagctttaagcttcagtttcgagatccctgttgatgagtgtaattttaaaatatatttttgatatcgcattacattcaaaagttctgatataactaagaaaacttaaccaatttggcaattacatcgttacatccctttatcctgttgcgaaaaaaatacactgtagcacagtgtaaattaagacgctgctagagggacatgttatgcggtgacagacagacagacggacacaatggaaaggatgacttgaaacaaaggtcaacgtggcttatatatggatatgtataatgtacagactgccatccccaggccgatctgtctctgtcgccgctttaattcgactttaatgaaaacgtggcaaggcgaacacttttgggatgcagacactcgccgtggatgtggatgtggaaatggacatgtcctcagctgcttatcatggtggccagcaaacaaaacaaactgtacatcaagcgaggccagaagaccgagagtgcgaggccacagccaagagcaacacgcaaggtcccaggtcctgcagccagcagcttcttcgacggcatgccaatgttgctgccacagtcgctcggtcgccgtttcagaaaaaaagcctggccaaatccaagcaaagtccgaatcgaagacgacgtttgctgctcggtccatatgcggaaacgcaattttgtcgttatttatggaccttgccgcacatgcaacatgcacgccggccaaacgaaccagcgatgttgctgctgtgtccgttgatgttgctgttgcagcgatgctgctgctgcctcggctgctgcgatcgccgctgctgctgcagcatcctccgctataacaggatgggacattggcattagaagaatgcactgcgaagaaaactttgcagaacaaaattcttgcttgacattgtgttttgagaaaacttatgttcttcatataacatgtctcgaaaatagtcctttttgacattgctatccaaatcccatcatttcgaactgccaacatacaacccttttctctctgtgtaagaatttaggaggagactgaggaggagtagcccgattgggctgcagatgcagatgcgatggcgatggcgttgcagatgtccgagtggccaacgatccggcgattcatgcagatgacgatgacttagttgccaagctccgtggcggcaccttgctcaaggaggctgcgcttgcatctcacctcgctcgctaacggttctctattagattaatttatattcaaatttttattacccgcgcataccactgctcgacgtcgactgctctaaaatgaattgccaaacggatcgctggcggatgaggaggaggaggaggatgcgactgggtttcggtatgggaatggggatgcggttggtgatggcgatgggggtttccgtggagccgtggtgctggatctgggtgttattagctcgcctacttgcacattcgatgcacgccagaatgccaaagttgctgttgttgctgtttgcaggggcagcaataacgtatggaagaaacagttacaacggaagctgtcattccactgggggaatggaggatggagcatggcatggagcatggattggagtttggagcatggggattcggggaatgggcatggatgaggacaccagcctgaactcaatgtttggtcagtggatggggtatggccagaatgcgctggcgttgctgcgacagtgatgttgctgttgctgttgcagcagcaatgttgctgccgttgccggttggcctatcgcaataattaacagtaaaatgcgcgcggcaagagcggttaattcaaatgcatgagaaatgcaaatgacaaacattgatttgaaaggaccacgacttcagagggggacacaaaccgaatccaaactaaaactctgctgtccccaattaagatgttgatgtggtaaccaaccgcagcaccagcaccaccattaccaccagcagccgcaacaactcaaactccagctgcaactgaccgccatgacgaaggcaattagtcgagatttatgtagccgatagaacagcgctcaatgaatagttgagtgggctggtccgtgggttaaggatattaaccggaacacaggctcgacattagataaacgatcttacaaaatattttcgagacacctataactaattttttagttaacgttctcttttgaaatggtataatggttactagctaaatgaaatctgtaaattgttatatacagaacattatattatgcccgatatataaaaaaccaaatctgtaacaacgattctttgtatccaaacttcggaccctttcaagctccgattgagccactaattaagggtcacagctctctggaatttcgagcacaataacaaaccacttggcagtggaccaacccttttccacagctacccttcattaagctaaacgccctttgtgggcaattactcacctctgcagatgctcctcgactcccgctggcaaggcaccgtcggccacgatatagacgggctggccgccggctccggtggtggtggcatacggcagtcccgcctggaccaccacttggccgtcggacaccaggctgccgatgtcgccgcccgagtatatttccaaactcttctgatccgtagtggagtaaatcaccgtcttgctgccatcgttgtagatcaaatctatatgcttatcggcttgatagaggtcgggatcaagtttttggggtaccgtcaaatggggcagttgtttcacattcactccgttcggatcggatgtggtgtatatgatggatcctccgccggcagcagctgctgctgcagccgcatgtttcttgtgatcctcgtagatatcggcctccgtcttaattacattcgaatcattgccgccactataatgcaatacagacgcgtctagcggcaatggtgatgtctgatataccgcctgcccgtgatcattgttcatcttttgggcctggttgtacatggccgtggccactgcattgtcattgggcatcaacttggagggatcactgacgatccgtgtgagaatgtgctcaccagcctcgtttcgcgacaggatatgatgctccccattgatgatctcccgcgagatgatttgctgttgctcgccatttggtcccaccacccggattatctggttctcatcgaactcgatcttggccagcggctggtgttccgtctgctgttgctgctgctgctgttgctgggcttggttgcccatttgggccgcaatccgcgcatcgatggcatgaccttcatcggaattattgccacccccgccatccgctggcatcaccaccttgggcgtttcgtatataaatacagcctccttgtcgtacagcttggagttatccgtgtgcagatccagcacgttgacgttcgtcatggtggccaattctggctgcggtgagtccggtgatcggtgcattgttgtgagaagtggcactccgttgggcgccagtggtgaactgtttgtgttacctccgccgctgtggccgccactgccttgttggatgggcgatagggatgcgtcgctaaggatgccaacaccaacgccaactcctaggcggctgtgggtgtgctggtgcaactggtgggcgtgaccgtgaccgtgggcgtggccggacagcgagagctcgttggacgtgataacgctcgttgtggcggtggatgtggacattatacgtggtagatacggcttattgaactaatttgaactggattccggattgcactaggacttggtcgtggactgatcatcgatgccgtgatcccctatggttgttgctattgctgttgctgcctcggctgctggcaagtataaacataataaatatcacttatcaacggattgatggaaggcactttgtggtttctttcgttcgcaattagctccctccggttctggatggtcgatcttcgtcttagtcgttgtttcattaactgctttctatggcactaaggaacttccttcgtttcgttctcagctcaactggaattggtcaaaaaacaatggttcataattagtaaaaaaggtgaaattgataaagacctagtcaagtttccagtgtgaagtgtaatgaaaacaattgtgttgtgtttatgggtgcaagttgtagaaagaaagtatagcaaaaatataaagaatttataacgaatattctgaaacaaaacttttctacatcattgcaagtcttaaaaacattgttgcttttttaaatgcctaactaacaagctgagaaagccatattattttaatagttttgttagaaataattaaaatattttcacgctagtctaagccaacacttttacggtgtgagtcatatgctataaggtgtttcccatttggcaataacagccctgcagcaacacctcccttcctcctcccccgttaccactctcaattaacgatgaggccgctgaagcaacaacaaaagtggcactgtctggcggcagtctgcttggcgcccgcccccgccccctcctcgacccactggcgatgcagtcacacacccccattgaaaatgaggtgaaaaaaaaaaaatgaaaaagaaggcacacataaacggaagagccagcggaacgggttcaaacgacaagcgatttgcaagcacacaaaacagacgaccagccagccaacaaaccaacaaacaaacaaaaaggggcaaacacaaaaaatcggaaaacggaaagaaaaaaaaaaatacaaataaataagccgagttggcctgcacacacgtggccgtcgaactagtttgactccttcgcaaatgtcaaacgtgtaactgcataactcagtgcggttcatcacatcggcaaaacaacaaaacaaccaaacagcagagcaacaaaacaacaaaacagccaaacaggtggaagaagcgtcgctgccaacgtcgctctgtcgacgccaacagagaagccaacttctcagccatatttgtgttttgtttacaacggtgctttgtgtgaaattaaacacagagtgtacactataacgttgcacgtctcaaaaaaccagtcagtccatcagctgttaatagtccagaatctgcgagttagcaaaacatgtttatgagggattttgaaaccgaaaccgaaactgaaactgaactgaactgaactgaacagagctgagctgagctgagctgagctgaactgaaccgaaaccaaacaaaacaaaacaacatcgacatcgacaacaagttgagaacaggtactactctccagtttgcggcacacaccaaaaccatacacaccggtagcagcagcggcatctcaatccttgacctaatccagaaggctgactttctggttccacgccttgccgcagcctcggaaacagccacagcgtgcccaggttcaggtccaggttcagattcaggtccaggcccaggttcagttccacgttccagtccccctgcacaaacccccccccccccccccccccaccatatattgttgtttgatgataaagccaaaaaattactggtgccgccgccgcagagttcactgctgggatgtggatgtggataaacccgtttttttttttttttcggtgtgtctggcagcccatgccggtgagttcacgacgatctcgacgggctcctcggacccggtctgtgggtattccgttagtaggtgaggtcagtgtcatgctgtttatagactagtttttggcacaaacaatcagaaacgattgcccgatgaaagtcgatgtggaaaggcaattaggaaacaattaaaccaacatcaacaccccggctcgcaagtgatcccaacgcatccatcgaactgggtcagatgtattaccagccaggcgaagaccctcggggctacgtacaaaactttccaacttgccgcttgaatggcggagatcggagaatggcaatgaagctggcacctccagccggagatagatggattctgggcaagatccatcactcatgcggtgggtgcgaaagaaatcagcaacaagaaaagtagctgctggcttagattatgaccagaaaagggaagcgatgtggagaagataatccaaattaatctcaatagcgatatttctggagagaaactttctcaaagaaattattcctattgaaatgtccacccgggggcgccacaaaaattataggaacaattataagtgcggaagaccatagagcatatgtagcaagatatatttttttacaagtattagcaagaaaattattaaatattgcttattactgtgtaaggtgtaagttttaaatctatttgatcatcaaaacaagtcgtcgaacacaagtgtaatacaaggtaattaatgagcaattactgttattgattggcttaacaataaactgtaaatcacgttaaaacgtatatgcaaaaattgttcaacaacgtatagacatatttgcttcaatactggatcaccataaggaaatctttcgcggcgaaagcaatttgcatatttataactatagaaccttgataaattaacagtcggttttccttgagcagtgtgtttgcaatataagtgtcgaaacaaataaatctagtctaatacatctacctacgttggcttcctggggtttatgcaggtatgatcactatatgagtaaatcaaccttctcacaaaacaatcattactaattttcttcgattttatcgactggaagtcaccacatgtgaaaataagccctccatctaacctttgcatacagacaacgcctacaacgagatctatggtcattcgttctttattatcccccaaaccacgatcaccattccccccgataccaccgatttcagatacacagtgaataccgaaagcaattccatttcaaatcccattaagatttgacataatttgaaatttggattttacgtatctttaccttacttcgcgtgaatgtaggggggggatggagaggggtagatgggagaggtggagaaaagacaagagaagaaatgcgcagcgtaaccctaagacatcaacggtcagagttgttgggcatcaataaccaatgactgagactggagagttggtagatggtacacggcaagaaatgccatgtcgattcaaaactttgagttatattattaatctgatgatatagaaactcattgaaacgattttattttagcttttgacttcttagcctctttaagaataattatatgcataaataaatcctcataatatcaccatcaatgcatccccttttctctccgtgtatttgggaatgttcagggaaataaaggcgtgcatggatggggcaggggtggcgagcgcgaaggggaacgggaacggctgcaagacggagtcaagaagtcccgaagaaacgaagaaaggctaaagaaaagaaaaacaataaacgttaacacgaacacgaaaataaaataactctctcacgaagttcccccttttttttgtgtgtgggttacatgtgcctgtttcgctgtgtgcgtgtgtatctcacggctgaatgtatctgtgtgtctggcggtgtgagtgctgcgtagatgttcattttactgtaccataatcgcagccccaaattgatcaccatcatcaagaagggaaaaaatcaaaaaaaaaaaaaaaagaaagaaaataaaaatcataataaaaagaagctgagaacataagaggcaaaaggcagcacaaaagtccaggggaaaacgtaatcacaaacactgggcaacatcatcgattttcgaacaagaaggctgcgcagtagacgtcgacgcagaggcagaggccgagaccgagacagaggcgtcttgatcccttctcgctaccgctctttatggccaactctcccgctctagcaaggtattgttgggagcacaacggcaatatgacagcaataccaatacctgtgcgacttacctgccgctgccgctgcgcagcggccacttcgaaatacgaaatacaaaataaaaccaaacaaagaggaatgtgtgcgcgaaagataccaccaacaacacaacggcaacagcaacagcaacaatgacaacaacaacaacaacaacacgagttgaggctgggaccaagagacttaggctacgtctgcacaacatacagggtgtccactgtgaacgaaggctttcaaaagcaacactggccagcagggtaatgaaatcgtttagtttcaatacatttgaaatcatttaaaatgcctagccgtatagatataataaaacttattaaaaaaacatgcagaatgcattttaatttaaaaccgcacgaactaaatggattttatgcctacatctccagcaaaattgtttaaaaatatttctatgagattgtcgttgtcaaataatatcgaaataatatccaattaccatttttctattaactccatcgaatcaacttgacgtactatgtataaatctagctaaaatatatcttatagtttggtaataccatatgttttttaaaaatatcaagttttgaaaaatatttatttttgaaaagtttctacaccctagtagtgcccaaaaaatgcccgcttttattgctctctttattgggaataccagctattgtgatggaatctcccgaaaaaagggatctataagccgaaaaccaaatggtcaatagggtgctatatttctgacggtgtaatccctccatgaaccgaccagggctacatagcctgatgcgtttataattacttcttggtaggctaagtactactcacttttgggccggggtgccttgagctcttgggatcaggatgcggattttggcacttggtgaggatctatggcactcgagcacgctggagcagtggatcggatcggtggaactggagctggatcgtggactggagtctgtttgctttgggagtctgcaacctgggagtctggagctgtaactgaaatgtggctgctgctgctgctgctgctgttgttggttgctccgttgttgctgttttgctggtgggtgcacctttcgccactctttgtgctgttttagttgttgttgttgttgttgtgcgtctgggggcttttagcctggctctctgggcctttggcttacacaatgctctcggctggctgcttttggccgcttctaatgtgccactctttgtggtatgtggagctgttgttgtttcgttcgcttggtgctgcctttgttgctggcggtttgtgcattttggcctaacatttgatgttgctgctgctcatattgctgctattgctactggagggcgcaatgaggggaaagttgagggggcgggtcggttcgggggcgttgcgcctggcatttgcgttttcaagccaatttgttgttgttttttctatttttctatgagtattttcactattttttacgcgctttccgcactagcatttgttattgctgctggttctggctgctgttattaatcactatttttattttgcattttattattcgctgctcagctttgatggcgtctcattccagctcgcaagcgcacacacacaggcacactttaagctcacgctctccgagagacatgcacacgtacacacacacagatactctcgcactcaacacacacgcacacacacacgaggttttttttcgctttttcagccttctcttcctcttcgtggctgaaattcgtgtgtgtgttttatttaatttcgaaaaagtttaagcgcgactttttgctgtttgtttggcgtagaaacttttggatttttcgcaaatatcgcgacacacacgcgcactcacaggtaatttcgatttgaaacgattagtcggatttgaaactatatattttcggtgtattaacttgctgactttccgtgtgcgcggaaaacttgtcgtcgctgtcgctggatctcggctcttggctataatgcccaaagagtcaattggagattgttcaactgttgaatgtgctgctgccgccgctgctgccacctctgccgacgtcgtcgtgcagttgtattggtggcaaggtgatgtctgtgttcgcggcgctggttagagagcgctcgattattattgctttttatggtttcatctctttcgtaactgatattgagcgaacgcggcagcgacgccggcagcgcagcgccactcaaattcattcgaatcgatgatgttgtctctacactcccaaacacccatacaagtgcgatctaaaacacaggtagcccagtgcttccatctgtgtgtgtgtgtgtgggtgcacctgcagaggccgaaacgcaggcaggtacaaaagacttaggcaacgaaccttccacttcagcatgcacttgcggcgaagggagatggcagatcaaaagagagagaaagagagagggcaaga

SEQ ID NO: 27896 - DNA, 4858 bp, DROSOPHILA
aaaaatagaaaaaacaacaacaaattggcttgaaaacgcaaatgccaggcgcaacgcccccgaaccgacccgccccctcaactttcccctcattgcgccctccagtagcaatagcagcaatatgagcagcagcaacatcaaatgttaggccaaaatgcacaaaccgccagcaacaaaggcagcaccaagcgaacgaaacaacaacagctccacataccacaaagagtggcacattagaagcggccaaaagcagccagccgagagcattgtgtaagccaaaggcccagagagccaggctaaaagcccccagacgcacaacaacaacaacaacaactaaaacagcacaaagagtggcgaaaggtgcacccaccagcaaaacagcaacaacggagcaaccaacaacagcagcagcagcagcagcagccacatttcagttacagctccagactcccaggttgcagactcccaaagcaaacagactccagtccacgatccagctccagttccaccgatccgatccactgctccagcgtgctcgagtgccatagatcctcaccaagtgccaaaatccgcatcctgatcccaagagctcaaggcaccccggcccaaaattgagctgagaacgaaacgaaggaagttccttagtgccatagaaagcagttaatgaaacaacgactaagacgaagatcgaccatccagaaccggagggagctaattgcgaacgaaagaaaccacaaagtgccttccatcaatccgttgataagtgatatttattatgtttatacttgccagcagccgaggcagcaacagcaatagcaacaaccataggggatcacggcatcgatgatcagtccacgaccaagtcctagtgcaatccggaatccagttcaaattagttcaataagccgtatctaccacgtataatgtccacatccaccgccacaacgagcgttatcacgtccaacgagctctcgctgtccggccacgcccacggtcacggtcacgcccaccagttgcaccagcacacccacagccgcctaggagttggcgttggtgttggcatccttagcgacgcatccctatcgcccatccaacaaggcagtggcggccacagcggcggaggtaacacaaacagttcaccactggcgcccaacggagtgccacttctcacaacaatgcaccgatcaccggactcaccgcagccagaattggccaccatgacgaacgtcaacgtgctggatctgcacacggataactccaagctgtacgacaaggaggctgtatttatatacgaaacgcccaaggtggtgatgccagcggatggcgggggtggcaataattccgatgaaggtcatgccatcgatgcgcggattgcggcccaaatgggcaaccaagcccagcaacagcagcagcagcaacagcagacggaacaccagccgctggccaagatcgagttcgatgagaaccagataatccgggtggtgggaccaaatggcgagcaacagcaaatcatctcgcgggagatcatcaatggggagcatcatatcctgtcgcgaaacgaggctggtgagcacattctcacacggatcgtcagtgatccctccaagttgatgcccaatgacaatgcagtggccacggccatgtacaaccaggcccaaaagatgaacaatgatcacgggcaggcggtatatcagacatcaccattgccgctagacgcgtctgtattgcattatagtggcggcaatgattcgaatgtaattaagacggaggccgatatctacgaggatcacaagaaacatgcggctgcagcagcagctgctgccggcggaggatccatcatatacaccacatccgatccgaacggagtgaatgtgaaacaactgccccatttgacggtaccccaaaaacttgatcccgacctctatcaagccgataagcatatagatttgatctacaacgatggcagcaagacggtgatttactccactacggatcagaagagtttggaaatatactcgggcggcgacatcggcagcctggtgtccgacggccaagtggtggtccaggcgggactgccgtatgccaccaccaccggagccggcggccagcccgtctatatcgtggccgacggtgccttgccagcgggagtcgaggagcatctgcagagcagtggaaagctcaatggccagaccacacctatcgatgtctctggcctatcgcaaaatgagattcaaggctttttgctcggctcacacccctcgtcatcggcgacggtaagcacaaccggcgttgtctccacgacaacgatctcgcatcaccagcaacagcagcagcagcagcaacagcaacagcagcagcagcagcagcaacaccagcagcagcagcaacatcccggcgacattgttagtgccgctggcgtggggagcacgggctccattgtctcctctgcggcgcaacagcagcagcagcagcaactaattagcatcaaacgagagcccgaagacttgcgcaaggatcccaagaatggcaacattgccggtgcagcaacagcaaatggacccggttcggtcataacccaaaagtcctttgattatacggaattgtgccagccgggcacgctgatcgatgccaatggcagcatacccgtcagcgtgaacagcatccagcagagaacggcggtccatggcagccagaacagtcccaccacatcgctggtggacaccagcaccaatggatccacgcgatcgcggccctggcacgactttggacgtcagaatgatgccgacaaaatacaaataccaaaaatcttcacaaacgtgggcttccgatatcacctggagagccccatcagttcatcgcagaggcgcgaggacgatcgcatcacctacatcaacaagggtcaattctatggaataacgctggagtatgtgcacgatgcggaaaagcccattaagaacaccaccgtcaagagtgtgatcatgctaatgttccgcgaggagaagagtcccgaggatgagatcaaggcctggcaattctggcacagtcgtcagcattccgtgaagcagagaatcttggatgcagatacgaagaactcggttggcctcgttggctgcatcgaggaagtgtcgcacaatgccatcgccgtctactggaatccgctggagagctccgccaagatcaacattgcggttcagtgcttgagcacggatttcagcagtcaaaagggagttaagggcctgccgctgcacgtacaaatcgacacatttgaggaccccagagatacggcggtcttccaccgcggctactgtcagataaaggtcttctgcgataagggcgccgaacgaaagacgcgcgatgaagagcggcgggccgccaaacgaaagatgacagccacgggcagaaagaagctggacgagctttaccatccggtaacggatcggtccgagttctatggcatgcaggacttcgccaagccgccggtgctattctcgcccgccgaggacatggagaaggtaggtcagctgggcattggcgctgccaccggcatgacattcaaccccctgagcaacggcaactccaactccaactcgcactcgtccttgcagagcttctacggccatgagactgactcgccggacctgaagggggcctcaccgttcctgctccacggccagaaggtggccacgccgacgctcaagttccacaaccattttccgcccgacatgcagaccgataagaaggatcacatactggaccagaacatgttgaccagcacacccctgaccgactttggtccgccgatgaagcgcggcaggatgacgccgccgacctcggaacgcgtgatgctgtacgtgcggcaggagaacgaggaggtgtatacaccgttgcacgtggtgccgcccaccacgatcggcctgctaaatgcgattgaaaacaaatacaaaatctcaacaacgagcataaataacatttatcgcacaaacaagaaggggattactgcgaaaattgacgatgacatgatatcgttctactgcaacgaggacatctttctgctggaggtgcaacagatcgaggacgacctgtacgatgtgacgctcacggagctgcccaatcagtagcgctggcagtacgggtagcacccgctaaccgcactcaaaaaaaaaagcaaacaaacacacaaattacggacacaacaagttgtttcaataagccattttccatagagcctaagtctaaatatcgtagttataataatgggatccgcaacaaatcgagttgcaacgaatgttaagaacggctaacacaatacgcatgtaaaatgatactttaaaattgatttagttattttagcaacaatgagattatctaaaattgtttgatcaaattttacattctcgctatgtctatagataattctaagcccgtaagcccataagcgtaatcgtaatcgtaatcgtaccgtgtatttatgctcatatataaacaactatatatatatatatatatatatatatgtgcggagtgcaacagtgtctgtccagtaggagataagtctcgtttccgctcccctgcttatgctatgaccttaggtccagggcaagtatgagttaccgaatctatctattaggtgcatctaacgaaaggaatcattagctctgcacgaactctagccgtagcctattgtaatccatttgtatgtttggcttaagcgttttacttgttgaatataaagtgtaaaattatttttgaaaaaaaaaaacccacacaaaacacaaatcgtttgttctatatttctgtttcaaaactaactcgttacccacaatcccctctgttatgtataattaggatctctgtacac

SEQ ID NO: 27897 - protein, 1064 aa, DROSOPHILA
MSTSTATTSVITSNELSLSGHAHGHGHAHQLHQHTHSRLGVGVGVGILSDASLSPIQQGSGGHSGGGNTNSSPLAPNGVPLLTTMHRSPDSPQPELATMTNVNVLDLHTDNSKLYDKEAVFIYETPKVVMPADGGGGNNSDEGHAIDARIAAQMGNQAQQQQQQQQQTEHQPLAKIEFDENQIIRVVGPNGEQQQIISREIINGEHHILSRNEAGEHILTRIVSDPSKLMPNDNAVATAMYNQAQKMNNDHGQAVYQTSPLPLDASVLHYSGGNDSNVIKTEADIYEDHKKHAAAAAAAAGGGSIIYTTSDPNGVNVKQLPHLTVPQKLDPDLYQADKHIDLIYNDGSKTVIYSTTDQKSLEIYSGGDIGSLVSDGQVVVQAGLPYATTTGAGGQPVYIVADGALPAGVEEHLQSSGKLNGQTTPIDVSGLSQNEIQGFLLGSHPSSSATVSTTGVVSTTTISHHQQQQQQQQQQQQQQQQQHQQQQQHPGDIVSAAGVGSTGSIVSSAAQQQQQQQLISIKREPEDLRKDPKNGNIAGAATANGPGSVITQKSFDYTELCQPGTLIDANGSIPVSVNSIQQRTAVHGSQNSPTTSLVDTSTNGSTRSRPWHDFGRQNDADKIQIPKIFTNVGFRYHLESPISSSQRREDDRITYINKGQFYGITLEYVHDAEKPIKNTTVKSVIMLMFREEKSPEDEIKAWQFWHSRQHSVKQRILDADTKNSVGLVGCIEEVSHNAIAVYWNPLESSAKINIAVQCLSTDFSSQKGVKGLPLHVQIDTFEDPRDTAVFHRGYCQIKVFCDKGAERKTRDEERRAAKRKMTATGRKKLDELYHPVTDRSEFYGMQDFAKPPVLFSPAEDMEKVGQLGIGAATGMTFNPLSNGNSNSNSHSSLQSFYGHETDSPDLKGASPFLLHGQKVATPTLKFHNHFPPDMQTDKKDHILDQNMLTSTPLTDFGPPMKRGRMTPPTSERVMLYVRQENEEVYTPLHVVPPTTIGLLNAIENKYKISTTSINNIYRTNKKGITAKIDDDMISFYCNEDIFLLEVQQIEDDLYDVTLTELPNQ

SEQ ID NO: 27898 - DNA, 11010 bp, DROSOPHILA
tttccaacagtaacaaaaaataaattattggcttttaaaatatatgtgtatgttttgtgtatacaatatatagaaagagcgcgtagaacttaagtatacgataactaaacgtatagaattataacatgccggcaagattttcgattcatcatcatcatcatttcatatcctctgatatcttagctcttctcatctcatatcataatattgtataatcttgaatagtacatttagaactaagggctaaaattaaaaacaaattgtgatgtacaacaccggaaatgtcaagttgaaaacgattttggccctcctcaaaagagttaagtggcagaaggagtgagtgaaaatagagcatttttagggcgtaagggggggcgtaaaagttaagagagattacaattaataaacaattaataataatattgagcattgaactcgtactgttcaaaattgtagaaatcgatgcggagtattcgtaattccaagcaaatctcgcgttgaagtctctgcttgaattcaaataacattgtacacaaaacatttcgttaattaaattaaactgttaattatggcaaacaaagattgtaaacgcattcgagctatgcgacttgtgttatccctatacatatcatatatatctgtatctatattcatccgattgttgcgattatttgtggcgctactgttcatcttgaattaattgtttttagttttgaatcaactttctcggctgattattgttcgttaggtattttttttttgtttttcaacaaatgcacaaaaatgttttttttttaaagttgtttttttttcgattttgtttttgccttagcttggacttaagtacgatttttatcaacatgttttattgcagatggttcttatctctaggtgtatatatctagatttagggataattacttcgcgagaattttaccaattatttgatcgtcaaagttttcatctatatgctttatgctttatgctttcttttttttttgtgtacagagatcctaattatacataacagaggggattgtgggtaacgagttagttttgaaacagaaatatagaacaaacgatttgtgttttgtgtgggtttttttttttcaaaaataattttacactttatattcaacaagtaaaacgcttaagccaaacatacaaatggattacaataggctacggctagagttcgtgcagagctaatgattcctttcgttagatgcacctaatagatagattcggtaactcatacttgccctggacctaaggtcatagcataagcaggggagcggaaacgagacttatctcctactggacagacactgttgcactccgcacatatatatatatatatatatatatatagttgtttatatatgagcataaatacacggtacgattacgattacgattacgcttatgggcttacgggcttagaattatctatagacatagcgagaatgtaaaatttgatcaaacaattttagataatctcattgttgctaaaataactaaatcaattttaaagtatcattttacatgcgtattgtgttagccgttcttaacattcgttgcaactcgatttgttgcggatcccattattataactacgatatttagacttaggctctatggaaaatggcttattgaaacaacttgttgtgtccgtaatttgtgtgtttgtttgcttttttttttgagtgcggttagcgggtgctacccgtactgccagcgctactgattgggcagctccgtgagcgtcacatcgtacaggtcgtcctcgatctgttgcacctccagcagaaagatgtcctcgttgcagtagaacgatatcatgtcatcgtcaattttcgcagtaatcctgcaatgagaatgtgaaatagtgaaatgttagctagtacagttagtttgcttatataatttatattagtacacccatgcaaaaagttagcacacgatttgagttatatattggttttgattaagccatgctataatgatgtgagaggtgggaaaggatgcatcctggtgtatatctctctgtgtgggtgtatatctgtgtttttttttttttctatctcacggatcgtttagaactggcttacttaccccttcttgtttgtgcgataaatgttatttatgctcgttgttgagattttgtatttgttttcaatctgcaattgagaaacgagagaaatatgatgttttgtctgttttgtttttgtttctgtttcggctaaaatatttctcttataactcgctggtttttctttttgtgtaattttgttcattttctatggtcagccaatttttatttattcagatttcagtgtatatattgcattcatagctttatgtgctttagtgtgtggtttgtgtacgtagaacatatcgtgggactgcttgggttttaacgtataaatatatacatataagtatatataatacactttggatgagatttgattatgaaatgattcgtaattagttccaactacaggttacaaattatcgaatttcttcgtgtgagtaacgatttatatatatatttagagtttgagatgtggctgaattttagtcgatttatgctttagtctttagtcgattaacgattttagagattgaacattttggcgcttcatttgtttgaattcttttcagcggttccaattagaccaaaatgaacaaaattacagaaaaggtggttaaccattagcacgagtttggtttgattgtttttagattttgggactgggattgattggttggttggttggttggttggctgggtttcgggttgagcttgccacttcgcttaccgcatttagcaggccgatcgtggtgggcggcaccacgtgcaacggtgtatacacctcctcgttctcctgccgcacgtacagcatcacgcgttccgaggtcggcggcgtcatcctgccgcgcttcatcggcggaccaaagtcggtcaggggtgtgctggtcaacatgttctggtccagtatgtgatccttcttatcgctgcatgggaatgcgcaaggttaccgaatgaagagaagaaaatttgaattttagcatgtggatttccttttgaggtgcatacgctcaaaaaaacggaattgtttctgagcgtaggctgtaggctttctacaatggatggacgatttttactcacgtctgcatgtcgggcggaaaatggttgtggaacttgagcgtcggcgtggccaccttctggccgtggagcaggaacggtgaggcccccttcaggtccggcgagtcagtctcatggccgtagaagctctgcaaggacgagtgcgagttggagttggagttgccgttgctcagggggttgaatgtcatgccggtggcagcgccaatgcccagctgacctaccttctccatgtcctcggcgggcgagaatagcaccggcggcttggcgaagtcctgcatgccatagaactcggaccgatccgttaccggatggtaaagctcgtccagcttctttctgcccgtggctgtcatctttcgtttggcggcccgccgctcttcatcgcgcgtctttcgttcggcgccctgaaaatttgaaaaaaaggatataatcagattgggcagtaaaaacgtttggataattcgatgtgaaaatggagggtcgaatttggttttaggatatcgtgtgtgtgtgactaagaccaggcttgggaattttcgagtgcattcaaaatgcatccaggtggattgcgaaagtaccgctccctgacgaattcccactgcgctggcgcacaggtgcacggggccagcgtgtaattagcaatcaatcaaatgcacggatgccaccttttttgatatttctttacttattaattaaattcgtgtatggctggcagtgccataagctgcctcgttgcagtagttgcacaaaatcgcagctaaaaacgaggcaaaaaaaaaaaaaaggaaaaagatggaaaaatatcaaaatagcgaaagagagaaacgagtttctcgcctggggagctgcgatgtcgcacagagacaaagccgccaccgcagtggatttctcagctggagtctgcaatctgcgactgcgcgtcggccacttttggcaaaatggtctacaccgttagggtcagagccaaaaaaaaaaaaaatgaaaaaaaaaaaccagcaaaaaaatggggaaaaaattattataaaatacttagagatgcagcataaatatgcatacataataaataatctggcggcgcctcgaaccatgcaagaaaaagactttgtctgggccagctgcccacctgcttgttgcctgattgcacacacacacacacacactcacacacagatcgcacggatacccatataatatatatagtctgttggctactttgtccgccggtgattgctagtttgcgtgtgcaggcagatgcagcatgcattgctgttgttgctgctgctgctgctgttgcactttgcatttgtaattaaaaatcagcaattgagcgatggaagctgctgcaggaaggcagctgaccaagggggtggcacaaaaggtggagggggggaaagaaggaggttgaggtggtacatcggcggcacaggaagtgatatgttgcagcaatctacttggcctgatgttgctgctgctgctgctgcttctggagcttcatatatgatgcaaggatgtctgcgcatgcccccagcccgctcaaatgaaacccatgctccttagctgcccgctgtagccccctccctttccccacacattaagccaggttcttgcgcttatcacaaagcattttagcctagagccatgcattcgatgtacatcacggcttttcgttgcgttgcgtttgtgtgtggcatgtaaataactgtattttattacttttattttatcttggcaaaaatatcgccaaactggccacttgcaacaagctaaggcgacggcgtctcgaatcgcccaatgcggtcaatgctcgccacagtccagacccctcattttgtgtgtgtgccccatctgggccccttcaccactcccccctcgttgttgccaccactcctttggacgctgtgttaatcgacttcaaagtatgacgaagacggaggacatccgaccaagtgggctgccaacatttcgcagaggcggctggcacataaccattagcattaacgttagctaaattctataatgattcaacattgatgtgcgtagaaaattctcaaatgctcaacttgattgaattgtggaaaatgttgtcaaatgaatatgagcaatataaaatgattgatattaaagatcctgttcgaaaggtgtaataattaactgagatgattccaagtcagatacacaatgatgtgagttgaagatgtattttccaaacattccattaaaagttatttgctgctctaattttctcctttctgggcgaaagtatctctctatataccaaattgcacaatccaaaatgacagttatatggcaagacaaaggcttcccaaggttttttttgaacgtgcggcagaatttctcgtaattttgtatctttttggtcctgccccccaccgaacggggctaacttaaagattcataattggcgactgtggccccagaggtgccaaacgacggaattgcaactgaaactgcaattgcagtgaaatcaaaatttcaaaaaatcccccaaaaaacatacagtgaaaataaaataaaaggaagaacgggacaaaggaaaataacgtggtacgcgaaatttaattgatacatttaccgataaacacacgctggccagcgaaaaagggccggccccaaatgtgaaatataagcccgtcgcgatagcgatatggccatggctacggatcgctggatcgctggatcgctggaattggtggaacggggatgcgagatggtgagatcggagatcgggacaggaggatcgtgtacaataaaagccatgtccaaacggaggcccagggacgtggatgtgtaatgatatgagaaaattaaattggaaatccacgaaatgatttattaataaaccccatcaagcgaaaaagtgaagggttcgcataaaggcgaaggtacagatacgaaacaagggcatggaaaggatgtgcggtgtgtgcgaatgtgtgtgtgtgtgcttgttggccatttacttttggacgcgttacgctttccactaaaggccaacaggctgactgacggacaggcactgccggtgcccccaattcgataaaagttgcagtcgcaacgtagggagaagctgcagcaacaagtggcaggcacacacacacacacacacacacagatgcacactgcaatgtgaaactaacttaacataaggaaagttctgtattttataataatatcgcaagctatgttgaaatttaaatatttaaaaaacttcaaattcgtgtagcatacttttagatacatatatctaaaaatcaaaacaagaattaatttttcttgattcagttgattttgtagtaataagatatgcataaaagtggtaaatatacatagatgttgctttagttagttttacgctttttccaattgttactttttcttcccgtgtaatgcaaaggaagcagcacgtagtcgcttttagttagctcatcaacctgttgcacgtggcagagggagcacagcggctcctgctgcttctgtgtgcgtaattgccagcataggggagctctgcttgtggactcggtggcatcgggtttagggatcaggcgtgagggacgagggaaaataaaatcacttaccttatcgcagaagacctttatctgacagtagccgcggtggaagaccgccgtatctctggggtcctcaaatgtgtcgatttgtacgtgcagcggcaggccctggaaacagaaaacagaatccgtattaatatcacaatggtcgtatcattcaaattgcccgcagggcaaataaaagttgctgctgcagcagcaactgcaacaccaacggcatcaactgcaaaagcaaaagcgacttgcaacagctgcaattagccgttgtcatttgggctgaggggggcgtggccgaagacgaaggggcgtggcaggagtgatgttaaactgccaacatccgttgggcgaatgtgtgtgcaacatgtcgtggcaagtgcataatttcatttgcctattgtccacactcaatgccgcacgttaaaaaaaaaaaaacgtattataatatgttctaaatgcgattaaaatggtaatttgagtaatacaagtaatttataaaattttattattataaattgtatattattataaaatgaaatatttggatttttgtcatacattctgctctcgaaacgagaacaattaatttttttgctgtgcaagctccactgtacctgcagcgatctcttttaatgaaaagcaacgagttctgcctgtgtttctgtcaatgaaatatcagacttaatgtacgcattacaactctggccaggaggatgtgcaatccgctttagattgctggtgcgcaggggcagcgcggtgggggggggaggggggtgtagctcaggtgagagggcgcaggcaggtggcagagaagaaatcccctgcctacgttgcatcagcatcagtctgaccgttgtcaagacgactgctctgaatgctgatcgctttgtgaggggagaggggcgagtggtgtggggaggggggtgatgtgaaaaggaagaagagctctttgcccgcattgattcgccattaacaagttggcattaaattggttattacttaacccatcaaaggcaatgtggctgagttgaatttcatttccagaaaagtgggcagtttatctattagtttaattgaaagtaaaacaaagtgctacaaaaaaaaaaaactatgcaatgatgcaaatgcaaataagcattgacttaaaatataaatttaaatataatattctaaaatagtagtaaactcaccttaactcccttttgactgctgaaatccgtgctcaagcactgaaccgcaatgttgatctgtttaaaagtaaagaagaaaaaaaatgaaattatatgaaaaacagaaacaaaagagaaacagcacggcgcatgtgagaaatgccataaaatatacaaatgtaaacaattatgagcataaaaagaaattatatcggatgacaaaaactgaaatgcgtctgctattagaaggcaattgttttctctctattaagtcgatgtcctctttatgcccacgacagtttaaaacattccaacgcactcggaaagagcaaaaatgaagacaaaaaaaaaaggaaaagaaaaaaaactgaaggagagacaataacaaggcaatacacagaggaccatggatcgaccatggaccacggaccatggaccgggccaataagatggcctgaactggaaccgagcaacctaaagccaagtaacgagccaagtgaagccgcgactttgtatcgcagccaattcatttttcgttcgacttcgattcagtgcaaggtgtgtgcatttcgcatttcgcatctgtatatgtatctgtatctgtatctatatacagatatatgcgtatctgtgtgccgcggcattttaagcatgccaagtccgagtttgagtcaaagtcgtagtttcagacagtcgttggacagtacgaaatggagaaaaaaaaaagaaataaaataaaaagaaaatccatcaacgcaaaaataccaaaggaaacaatcttaatggtaaaagtgcagcagtcacagccgcacagccgcacatccaacatccactaccaccatcccagctccgcagcatcccaagatcgggcggccatccagagaccgagatgtgtggacgagcagtatttaatgtgaataattagcgggcgcgtaccatataagcgaaaagcgaggggcgaagcacctgcgtgtcggtgcgtacgaaagttttgccgctgggaaaggcagtatctcacagatacacacacacgcctgcaaagatggagatacagatgcagctaacggcacaaaacgaaatcgacattatgcgagccaagtcgggccaagatacaaaatgaataaaaaataaaaataaggcgactcgactctctctcctcgaagacgatgatgtcgctgggattaacatctcagcgcgtaaacaatttgtaaataaaaagctccatcaaatgcgagtgggcggggtggtggagaggaggggggtgagcggcgggaaaatgcggcggggggaaatgcacttatggccagccagttaataactgctgaccaatttggcagcctgcacacacagaagtcactgaacttgaatgaaaatcaatacgattttggcatttgtttttcacaatattttttcacatttttttcgaatggcatttcagttggattaagtggacacttgaagaaaatgtttccgcaagttaaatgttttaatcaaaactctatcaattaatgcctcaaataaaatattgggatttttaaaatgaatgctgacgttaatgaaagcagttgctaatcaaaattgatagcaattgaagttttatgtaactcacaaaatatggaaaaagatttgcaaaaatcttggttggtttaatttggcaaaagtaaaattgcaaaatgcattatagttataataataaaagtatgaatataaatatgagcattgctaagcagtcttaaacttaattgaaaaagcagaaaagcacagattgagtcacttaaatttgtgatttttagctcccaaaattgtattgaagtattaaatagtagcatatatcaatgtcttttactacctttaagaaaatgtcattctttgcctaatatggcccactttttcactgtgcaaatgggcggagcatcgcaaaggataaaccgaacccatggcgtatacgtaatatgagggctgtctcgcttactggtcttactactggcgcttgatgcaatagaattgcaaatattttccaccgattaaaatgcttgataattgctaaattaaaacgcggtgggagcctgctcgatctgctgcggttagcagccaaagccatagccaacggacaccaaagcgaactcgacttaaactcagacttagttccaagcatttgcgagtaagtgattaaaactaagtgtcataaataaataaatgcataaattattcttttgaggcaaaaagatactgacactcgctgcgagtgcgatcgagatggaaaatgcgcggacagcgggcgccagaaagggatggccacagtcggctggggcaatggcgacactgtttgaataatttgcgttttactcgcaattgaaaataaatcagaaattaattcttggctcacacacatacatgcatacatatatacgaacgatatagagaggactttgctggtatctgctatctcattttgcttcataaaagtgtcgcgcttaatttttttcgctttttttccatttttaattgaggcggcgctcgaagtaaacaaaatggttggtagggaaaaacacataaaagcacaaagaatttctatgatgatgaagaactagggataccctggaattgctcttgaattctttaaattcgtagtttttaaatttgtgtgtctcttgtctctttctcaaaagctagcttagatacaattctaaactattttactatttagtatattgatttaatatgctgttacttggatatatctttcaatatgaagataaatcttttctttaaaatgttatatgttacaaagttgagaagctttaagatgtcgtacttagtagtccaagtttataacaaaatcagcatacccttgcagataaagggtaaacgaaaattccataactacgattgccgtagaaatgagatctagaatgagcagaacttaccttggcggagctctccagcggattccagtagacggcgatggcattgtgcgacacttcctcgatgcagccaacgaggccaaccgagttcttcgtatctgtagaagaagagcagtccaagcagataatcagtgggggatttcgaggggtaaagatcgcgggat

SEQ ID NO: 27899 - DNA, 1828 bp, DROSOPHILA
ctaaccgcagcagatcgagcaggctcccaccgcgttttaatttagcaattatcaagcattttaatcggtggaaaatatttgcaattctattgcatcaagcgccagtagtaagaccagtaagcgagacagccctcatattacgtatacgccatgggttcggtttatcctttgcgatgctccgcccatttgcacagtgaaaaagtgggccatattaggcaaagaatgacattttcttaaagatcaacattgcggttcagtgcttgagcacggatttcagcagtcaaaagggagttaagggcctgccgctgcacgtacaaatcgacacatttgaggaccccagagatacggcggtcttccaccgcggctactgtcagataaaggtcttctgcgataagggcgccgaacgaaagacgcgcgatgaagagcggcgggccgccaaacgaaagatgacagccacgggcagaaagaagctggacgagctttaccatccggtaacggatcggtccgagttctatggcatgcaggacttcgccaagccgccggtgctattctcgcccgccgaggacatggagaagagcttctacggccatgagactgactcgccggacctgaagggggcctcaccgttcctgctccacggccagaaggtggccacgccgacgctcaagttccacaaccattttccgcccgacatgcagaccgataagaaggatcacatactggaccagaacatgttgaccagcacacccctgaccgactttggtccgccgatgaagcgcggcaggatgacgccgccgacctcggaacgcgtgatgctgtacgtgcggcaggagaacgaggaggtgtatacaccgttgcacgtggtgccgcccaccacgatcggcctgctaaatgcgattgaaaacaaatacaaaatctcaacaacgagcataaataacatttatcgcacaaacaagaaggggattactgcgaaaattgacgatgacatgatatcgttctactgcaacgaggacatctttctgctggaggtgcaacagatcgaggacgacctgtacgatgtgacgctcacggagctgcccaatcagtagcgctggcagtacgggtagcacccgctaaccgcactcaaaaaaaaaagcaaacaaacacacaaattacggacacaacaagttgtttcaataagccattttccatagagcctaagtctaaatatcgtagttataataatgggatccgcaacaaatcgagttgcaacgaatgttaagaacggctaacacaatacgcatgtaaaatgatactttaaaattgatttagttattttagcaacaatgagattatctaaaattgtttgatcaaattttacattctcgctatgtctatagataattctaagcccgtaagcccataagcgtaatcgtaatcgtaatcgtaccgtgtatttatgctcatatataaacaactatatatatatatatatatatatatatgtgcggagtgcaacagtgtctgtccagtaggagataagtctcgtttccgctcccctgcttatgctatgaccttaggtccagggcaagtatgagttaccgaatctatctattaggtgcatctaacgaaaggaatcattagctctgcacgaactctagccgtagcctattgtaatccatttgtatgtttggcttaagcgttttacttgttgaatataaagtgtaaaattatttttgaaaaaaaaaaacccacacaaaacacaaatcgtttgttctatatttctgtttcaaaactaactcgttacccacaatcccctctgttatgtataattaggatctctgtacac

SEQ ID NO: 27900 - protein, 213 aa, DROSOPHILA
MTATGRKKLDELYHPVTDRSEFYGMQDFAKPPVLFSPAEDMEKSFYGHETDSPDLKGASPFLLHGQKVATPTLKFHNHFPPDMQTDKKDHILDQNMLTSTPLTDFGPPMKRGRMTPPTSERVMLYVRQENEEVYTPLHVVPPTTIGLLNAIENKYKISTTSINNIYRTNKKGITAKIDDDMISFYCNEDIFLLEVQQIEDDLYDVTLTELPNQ

SEQ ID NO: 27901 - DNA, 4059 bp, DROSOPHILA
aacacctgtcctggtcacagtgcctccatcggaggtaactgccacgccggagtatcgtcgagcgcagtacaactaccaattgcgggagcgcccgagggatttagaggctgcaccagctggtgtccagggaaatttgcgcaaaagttccgattccacgttggaagctagacagccgcaggcccccatgccccacaaacggagaacctcgcgtcagcggcagatcaaggagccagagcaaccgttggccactagattcgacgatgtggtcggcaatgcggccaaaaagccagcgcgctacggacgacgtgcatctgtgctccagaacgcagccagttgtcgggagaactcgtcaatcatcgagggtaatcccaaatacgccgtgggatgtcgtcgctccaagcagccagtcggaaatcagacgcagccacccggtgcctttgtggtgctcgacgagcactgcaagccttccaactggatgaagaagacctggtacgactcctaggacaacgcatctacacctaccgttggtattctgttttaaatcgaactaatgtaaagcaaataaaaaatgtttaattcgaaaaaaactgtcaaaataacaattaatcattgagtttttaaaattatttttaattattatttatcaacgtatgtgcatgaatctatcatctagagaaaaacttgctcattaattgagttatttatttcaggaattgaattgacttgcattgggttttactgtaagtatctttaagaacgtttatctggcccaccctgaaaatgtatctttctcattcatggcgaaaaaacgtaaacaaacggttgactgctcacctgaaaaatgtttgggtgactttaatcttatcttgtggctggattgataatagttttgagagagcggttactcatagttgttcagtatcaccgtggatttcgcaagctgcagatgtgagcaacgcaattacaataccagattcaaaggggaactcccatcggaatcatgacagacacggtggtccatgcggccactcctccgcctcacatacttggttacaccgttcgtagccgcacgcgcatctgggtttcctacatagtgcccacctgtcttggactgttggtgtacatcgttcaaacagcctcggatttggccctgagctaccagcacttcaggcaaaaggagccgacactgggagctggcaccctggtcctggttatcctaccccccgtgatcactttcatcctggtcgcggcttcaaaggaacaaagggaatgcgcctgctcggaacgtaataaatgcgtcgcccttggcattggactgctcaagctgttcctgttccccttctttgtgatcttcaggtgagtcaatggattgccatgtgggtcactgccatatttattaactttcaaacgatgaggttctgtacgcgcttgttttgggccatcgagggactctttcacgacgacgacgatgtggagcgcatgaaatgcttggccaaggccacgcaaacctccaacatcgagttgttactttttgttcaggcctatgcccaggcagctccacaaatcattctccagctgtatcacatgctcgtccaggatatgttccgcaattacgagacctgtaagatatatcctcatggcattagcaatgtattaacttcttgcttttagctgctgttcaatccttatcgctggtattctcagccattgatctggctgccataaccaccagttatcataggatcgaaagccagcggcgggtgggtcgccattatccttgggccactccgcaacaggtggacagccatcgatgtcagctggagcagaatgaacgcctatgctgtgaggctgagcggaaaaagcgcgagtccgagcgcaccatcaccagtttcccggaatccgacaagataatggagaactttcgagcccgcaagtcattgccgaactcaggtgaggccacccatgagctgcatattcagggagaagatgaggtggacaacgatgcactggagcaagtggaaacgcgagcattactgcattccgggccgatagataatgctaccgatgaggagaagatacagggaacaaggcccaggctgaaagtgcgatacgaggacttgggggacttggacaccatcgaggtgttggacagcatacccgagacgccagctcctccaccgccgccaaaaacggcgccaccagaattgcccgttctgaagccaaccgaggaggatcctccaacgcccgacttgcgacgaaccttgtccgacaatgagcatcgaaagagccgtcgggtcacacgacctctgtcccagctggaaacctttaaggatatgctgctggttaatgcccagctgtacatcaaagagaatgtcccacatccgcccaagcttctcattggcaggctcaaggacgaggatcccgaggagcacactgttctgattccccaatcacccaaaccatcacctctaacgcccaaggatgtggtggacttttatttcccgcgacccacgaaaatagtgaatggtatccaacaggatgatttcgctggcaggacggtgtccttcttcggatggattgccttcatcaccatgagaatgctttcgttgtccactttctgtgtcttctatccgaaggcattctttatcctggtgggcgtacactatgcgctgatgctgggttgcctggcattggaaacccgttgtcgtggtagttggagtcgcagcctgttcctccttcttcttgcctacatctatatatttgtgttaatggaattccgcgtgtccttcaagaacattcgattgtggtatggtggatacctggtgctcacgctcgtcgagaacattaccatatcgtccatttggtatgcaaacgaggagtttgagtcctggtggttcggtttcatctgggagtggatcgtttacagtggaatactatttctggctactttaatcgtttactactgtatactccgacccaaggaagtatccctcatcgtggaggacgatttcccgcaaggggatcaacaggaaagtcctgaggaccaggccgttgcctagcagtttccggctagtttgttatatcgaagtaggtagagtgtaagccgtcagtctgtcactggcaaacgaataaattatttaccttagtattagatcgaaaaaatatataaattttgttctgcaatggttgatcgtggaaataatttggtactcccagtgggcccatgttcaacggaactaacggaatctcaagcgagttttgctccacccaaaattaagaaagtgctccgtaagttaagactgcagtattctagaacttttctaatccgaatggtcatgcagccactagagcaaatcgcatggaacagtttctatggcaggaactctttgccgaatacaaccgacaggcctccgcccaagtggatttgggtgaggatcgcacggagtactacgaccagttctgcaaggatgtgccaccgaaaaacgaagagaccgaggaagttctggtcaacaagtatccactttactgcactactgccgtaacagtatggaatcacgagggagatttcaccaagactttcaaaagaaaatattctattaccagacctatagatctgtgtcctgataagtttgcactttagatgtggaaattgtatgagagtagtgcccacagaatattatttaattttgatctttcattgtaaatgttacataaaaattaaacttgcagtttgagaaattctatgcaattagtttaaattaacattttatttaaattcaatctaaacgtaatgttttataacggttgagtttacagtagagcatgcatacggtcactcttgcagcgggcatcgatggttcttcgtttacgcatcgatgtttgttgatccagaaacatatcgatagttgtctcggccgctgacgtgtataaaatatcgagggacaggcggtgatttttgagcgatttaattttattttcctatagaatataagcggcgtgtgaaagcgcaaccacaatataggaaaatgttaaagctaggtgcgtagcctgctcggtgtt

SEQ ID NO: 27902 - DNA, 1950 bp, DROSOPHILA
atgacagacacggtggtccatgcggccactcctccgcctcacatacttggttacaccgttcgtagccgcacgcgcatctgggtttcctacatagtgcccacctgtcttggactgttggtgtacatcgttcaaacagcctcggatttggccctgagctaccagcacttcaggcaaaaggagccgacactgggagctggcaccctggtcctggttatcctaccccccgtgatcactttcatcctggtcgcggcttcaaaggaacaaagggaatgcgcctgctcggaacgtaataaatgcgtcgcccttggcattggactgctcaagctgttcctgttccccttctttgtgatcttcaggttctgtacgcgcttgttttgggccatcgagggactctttcacgacgacgacgatgtggagcgcatgaaatgcttggccaaggccacgcaaacctccaacatcgagttgttactttttgttcaggcctatgcccaggcagctccacaaatcattctccagctgtatcacatgctcgtccaggatatgttccgcaattacgagacctctgctgttcaatccttatcgctggtattctcagccattgatctggctgccataaccaccagttatcataggatcgaaagccagcggcgggtgggtcgccattatccttgggccactccgcaacaggtggacagccatcgatgtcagctggagcagaatgaacgcctatgctgtgaggctgagcggaaaaagcgcgagtccgagcgcaccatcaccagtttcccggaatccgacaagataatggagaactttcgagcccgcaagtcattgccgaactcaggtgaggccacccatgagctgcatattcagggagaagatgaggtggacaacgatgcactggagcaagtggaaacgcgagcattactgcattccgggccgatagataatgctaccgatgaggagaagatacagggaacaaggcccaggctgaaagtgcgatacgaggacttgggggacttggacaccatcgaggtgttggacagcatacccgagacgccagctcctccaccgccgccaaaaacggcgccaccagaattgcccgttctgaagccaaccgaggaggatcctccaacgcccgacttgcgacgaaccttgtccgacaatgagcatcgaaagagccgtcgggtcacacgacctctgtcccagctggaaacctttaaggatatgctgctggttaatgcccagctgtacatcaaagagaatgtcccacatccgcccaagcttctcattggcaggctcaaggacgaggatcccgaggagcacactgttctgattccccaatcacccaaaccatcacctctaacgcccaaggatgtggtggacttttatttcccgcgacccacgaaaatagtgaatggtatccaacaggatgatttcgctggcaggacggtgtccttcttcggatggattgccttcatcaccatgagaatgctttcgttgtccactttctgtgtcttctatccgaaggcattctttatcctggtgggcgtacactatgcgctgatgctgggttgcctggcattggaaacccgttgtcgtggtagttggagtcgcagcctgttcctccttcttcttgcctacatctatatatttgtgttaatggaattccgcgtgtccttcaagaacattcgattgtggtatggtggatacctggtgctcacgctcgtcgagaacattaccatatcgtccatttggtatgcaaacgaggagtttgagtcctggtggttcggtttcatctgggagtggatcgtttacagtggaatactatttctggctactttaatcgtttactactgtatactccgacccaaggaagtatccctcatcgtggaggacgatttcccgcaaggggatcaacaggaaagtcctgaggaccaggccgttgcctag

SEQ ID NO: 27903 - protein, 649 aa, DROSOPHILA
MTDTVVHAATPPPHILGYTVRSRTRIWVSYIVPTCLGLLVYIVQTASDLALSYQHFRQKEPTLGAGTLVLVILPPVITFILVAASKEQRECACSERNKCVALGIGLLKLFLFPFFVIFRFCTRLFWAIEGLFHDDDDVERMKCLAKATQTSNIELLLFVQAYAQAAPQIILQLYHMLVQDMFRNYETSAVQSLSLVFSAIDLAAITTSYHRIESQRRVGRHYPWATPQQVDSHRCQLEQNERLCCEAERKKRESERTITSFPESDKIMENFRARKSLPNSGEATHELHIQGEDEVDNDALEQVETRALLHSGPIDNATDEEKIQGTRPRLKVRYEDLGDLDTIEVLDSIPETPAPPPPPKTAPPELPVLKPTEEDPPTPDLRRTLSDNEHRKSRRVTRPLSQLETFKDMLLVNAQLYIKENVPHPPKLLIGRLKDEDPEEHTVLIPQSPKPSPLTPKDVVDFYFPRPTKIVNGIQQDDFAGRTVSFFGWIAFITMRMLSLSTFCVFYPKAFFILVGVHYALMLGCLALETRCRGSWSRSLFLLLLAYIYIFVLMEFRVSFKNIRLWYGGYLVLTLVENITISSIWYANEEFESWWFGFIWEWIVYSGILFLATLIVYYCILRPKEVSLIVEDDFPQGDQQESPEDQAVA

SEQ ID NO: 27904 - DNA, 8557 bp, DROSOPHILA
cgtgggtatctcgccgcagttggagatcaccacgggttccacggggaagtcatccgtatcggtttttacctggaacgaaaaatgtgtcagaaaaagtttcttacatttctgtgtggtggctatgcgtttaagccacgattgtggttccggtttgcttgaatactcacatcctcaatggcatagatggtgtccattccctccagcaccttgccgaaaacggtgtgctttccgtccagccacttggcgcccacggtggtcacataaaactggcagccattggtgtccgggccccgattggccatgcccaagtaaccgggtctgttgtgctccaccgccagagccttatcctcgtccggaaagtagtccccatagatgctaatggagccagttccgtcgccgttcacaatgtcgccgccttggacgagaaagcggtccaccacgcgatggaatcgcgagcccacgtagctggtcccgttgatgccgcgcaagcaaatgtgccggaagttggccaccgtcttgggagccagcttcccgaacagtccaaacgtgatcctgcccaccggcttcttgttgtgcttcacatccatgtagatccgagacgtgaccgtgaagctcagaccactggccacggccagaaaggcgctgcacaggattatccgattgagcaatgacttcatgattttacggacctaacgcgctgatgaaatacacgtaactgaaacgaagactggactgtggaaactatacgagtagaaagtcaattctgggtcgcgggcctggaaacggaagccacaaaagtttcaggttaagtgcaagcaccgcatgatgatggcataccctctgcagacatcgatttcagcacccggcagcaaacatcttgttcggtttaatggcaaacgtaatgtttggctcaactatgttaataactaaaacttcaaaagtatcgtttctaaaagtgcattcaattcgtttcactaaataaatcaactgcattggctttgcatcatatgacttgatatttaattgtgtaaatttaaacttataaatatttaaccttatggtaatcagcataataataaagttagcggggcagggaattgaacccagatcttaggctaaaaacttagggatagactgcgtctacacaaaaatataccgaatacatatatacacttagattaacttgcggcggctaacctggatacagtcttcatgtggggactcgatttcggaaatcttggcctccgttgcgcgtctgagatctatgcagctgaatcttccgcagaagattcgggtaggtcctacaagcgcttcttctgcggatgcacatacttgcagttcttgcccatgttgcagtgtcctcgcatgaactgcttgcagacgccggtgttgccattgcctcctccacctcctcgattggggccagatcctgctgagcgccagttgccgccggagttctcctggaagttgttgcccccgctgcgccagatgccgccgccgttgtttttgttcctgttgttgttgttgttgttattcctaggtccgcccatcatcagtcctggccccattccattgggcggcccgttcatcatgggtccattgggtgggccgttcatcatggggccgttgggtcccatcactggaccattgggtcccattaccggtcccggacctggtccattcatcatcatgggcgggtactgattgaatccaggtggtgggccgcttccgaatggagacactggacttccaaactgattgcccataaagttttgcggtggcatgttgttcatgttcatattgctcatatccattccggggccaccgggtccgttcatcatgggcggtacaccgggcggcccacctaccggacccatttggttctgccagatttgcggcgttccgttgggcacttgatttggcatcatgtttggtccgggtggcattcccgtgggagcaggcatgcctcccatgaacggatcgaatggattttgcattaggttcggtccagctcccagtccggtcaacatattgtcattgaagcccatgtccgatccgctgatatttgctccgactcccgagctaggcgcgtatttcttgggctccggccacgccaaggcactgtagtcgttgacagcatccggattccccgtcaggtcatccatgggtatcacgggaatgtcatgagcaaaatgcggttccagttccgcctccgcaggactgtcgggaatcatgtcgggcgagaagtacagggctcttagagtggtggcctccctgtccatctgcacctggcgctgcttggagaggtttccgttcgggtggtcgggcacattatcgacttcgagtagtggccgccactccatttgcggctccatggtatcgtcgaatccacgccgagcaatggtcagcgcgtcccgctcgctgaatcgctccatgttcttcatttccaggaaggtctgcttcatcacatttacgcgctctgagcgatcgacctcgaagtatcgtatctgggtgagcttttcctctgactgccaggttagcttctttttcgggcccttgcggcggtgcagcgtgagcactcccggtggtccatcgggtccacagccaggtccaggcttcttgggctcctcgggaagatcttcagcgttgtcagaggtgttacccgcttctccgccttctccgcctgccgcagccttcgccttctgcaccttttgctcgatgtcctccttgaccctcttaaggggaatgtcgtcgtcatcggcatccgtgtccttgccaggtgacgaggagcgcgcatcatcgttttccttgctgctgtcgtccgacttctcctcgctcttcgactcgtccagagtatcctggtagaacttaagcggcgccagtggcgcgtccttgtccgtgggcgatgttgcagacgtacgcttgcgcttcaccacctttttgggttcgatggaggcggccagggcgtccgagaacaggttggtctccaccagggtttgaactggaaaaatgagggtaaagtaagtaatcgctccagtaattggtttagttaagaaaatgtttaagtggccttcgttgaatggcccattggctttggtggattttgcttttgctggaaattgctagaagtaaaaaagttatggaaagaaacaatctgatctggacacacacatttgttgtgtttatgattgattgattaagtttacccacatttcgataattaatgaaatgggagtctctctactggaataagcaccgaatatataccaaaacctagaactactaaacaattcatgaattttccccaaaagttctttaaaagttttggcttgctcgactttattcggtataatttcatatataaatgtcaaaatgtaattattcgacttttttttatttaactagtttttcaacacaaatagtgtttaatcatcataattaaaatagttataagctctcattgcgattgaaacttgagaagtacgcttattaaaagtgtattgctaagactactagttatacgcaatagttaaacctctttaaactttgatgcttttagtatatttatgtcagcacatcgataagtgtcattgggtttcctcagcactaatctacccaaggaacccgacactgcgatcagattacgcgcaccgtgcagcttactgccaaggtgacgcatccgctgatgacgcactacgacgaggatgtgggtaaactagggttgcctgctctagcgaggcgaacaattgtggagaccctcggtgacgcacgacagcaaaatcgaggccaaagcaaagcagctgggactcaagcccacggtggtgatcgaaccacctaccaacttatagaaccgccagcttaagtcaatattttcgttttcgtttcttttgcgctcaatgcatttttttattcaatagaaaaatcgtatttttctagaggaaaccgtattttatttgtaagtctttaaggtgggctgctcgccaagtgaatctacataccttatagctaagctaagctaaatacgttcaagatttgaggtttgaatacttaacatcaggcagcgacaacgacgacgacgacggcggcggcggcatcgtctgtgcctcagatttcgttttcgttcggtctcagcgcatgcgcagtgcccagatttcgggattcaactccattcaacttcatccgccgtcatccggaattgaggtcatagactcacactcgggcagcttgcagttcaaactcgatccggggataacaccgccacgattgatacattataatgcaaagtacccacactaaaaggccccacttctgctctacaatttaagacccgccccaagcaaaattaaacaccttgagaatggaatggagatcaacaaataatacggcggagttcgacattcgactccgatcgaaaacaaaagcaaaagccaccaaagttcttgggctgtggaataaaatagagaagagcattaatagtgattctagcatctgttgcttactctttttgggcgctatcagcttggcggctccgggcctctccacatgtcccgcgacgttgttgatgtcgatcttggccttcttgtcggtggacaaatccctgggtggcggcgatggtcgcttcagtgaagacgggactgccattaaagcgggtgaagcggcaaccgccgacgatgtgggcttctttaggcccttgcgagatgggggaggcggagcctcttccgtcaggccatgcgatctgaatttggactggtacgtctttacagtggccgtcttttcggtgtcccggcgaatttctatcgaaatggaggccttgcgggacatgataggaatcgatctgggcttctgtgcgtcgctctcctttgccgaagctgtaggagatgtacctgcagcatttgatgctgccacagctggcggaggcattagcttgttgtccttgtccttgtcctgcctcgaggatgaggatgatgacgaagttgacgacgacgacttgcgatctttggacgaactagaaccagagctgctcgacgacgacgacgacgacgacgaggaggactttgaggacttgtgtttattcgaggaagaagaagacgaaccgctgctgcgctcccggtccttgctcgagctggaggagccggaacttgagcgagccttgtctttatcgcggtatttatcgctagaactgcgatgggaagaggaagaagatgaggagctcttggaagaactgctcttcgaagaggaggatgacgaggaagaggacgacttatggctagatgaggaggacctatgacttgaactttccttctttctatccttctcgcgctccttctcggaccgtttacttttgtcgctctttgagctcttatgcttcttattatccacgtcctccccagacttaacctccgccgcggagctactatcatctaacccggactttttccccagactagcatctgctaataagtgggttgcggaggagcccttttccagatgttccacctcgttgtctttcgattgtgtgccagaatccgtttcgtcgccaccatctgggttgtccaacaaaggcttccacttgatggtaatgctgttggaattgctactgttggccgccgaggtgatggtatacgtcacaggtgctccggcgctatcagtgctgtctgaagaagaggcagagtccggaactgaagcggagccagctccagaaacggatgcaggaacctgagaggcagtagtggctgcaatatgtggcgcagcaccttggatcgtcatgcttgtgttttccgtcacaatcttcagccactgctctaccaaacgcttggctagaatgcgtacacctggaaaacggggtcgagaaaagccaattagtaatccctaggtaattaaaagcataaaggacagcccaaaacatgacccaaaaacactaatctacgactagagtaagacttatcaaagaaaacttaccttcgttgccgccatccttgcacagccccttgaccagaataggtgctgagtttatcttgaggcgattgacatccacgggagaaaggagcagcagttccaggatctcctgtaccagcggccagttcatggccctgatggcatcatttaaccaggtgtagaccagcgaccaaccgcccaccgccataaagtcgcccaatagttccgtctttgtggatttcagaatttgtacatacacacatttcgagacgagtttttttgaatacttggccatcaaactgtgggcgaaaaacttgatattagcaaacgccgataggtgtcgctgctgacaagtggtgaacttaccccgaaatgcgtttcacctccactgcacttaaaattccaccattattgtccaaaagcacccgcaggcacctcagcaattgcagtggaactatacgaggctgtcgaataaaaacattaaataaagcacaactgttgttgcatttcctagccaatataactcaccattttctttgttagtcgtgcgaaagaagaaaatttatctggcaacgctaactccctatagccgtctctcttccacacttgtaggtgtgaccatacgcaacgtgtgcgcgtgtgttggatcgtgcgtgtgtgcaccgacactcgcttttgttggtatgggtgtcttaatagatactaaatttccactgattacgtaattccataagaattcgctttttcaaggactgcaatagtatctaaaataggagaaaacaccagtctgagaacaaatttagcaggataaaattttgctatatccctacaattcacttttaagacgagtattaaataaattccagcagcagcgccaaaatatgataaatgctgttattttattgtctcaactggcagtaaaccaataatccctccgcttgaatgttttgttttttgttttggagctgcagaaaacgtgttttacgcgttgcgattttttcaggcactgatgaaattcggacgtgtgctcgcggctatcggtaatcgataagccagtgcagccctgaaggctgtccactctcagaaaaccgaaaattatatattacgacgtattggtattgatacgaaaacatgcgttcgtctgaacgtttgtagcacaaatgtctctctacctcgtttttggttacaacccaaatttgactttaggtacaagcaaaatgtgaaagttacttagtttttctgttaaagcaggttggcagcgccttgccacgcacacaacaatgacgccattttgattttcacaatttttcacaaaggcgtaattaaatccgcagccaagggaaatgctagaaaattgtcttttaatagcaacttcaacaatatcggccactttatattgatttttctttgtttaatcctaattatcggctttcgttcacgtccacgccccaaaattggacatgcggttaggtccgcacacttaggtcgagcaaatcggtaataagccttccagaaaatatatattaaatgtacaattgtttatcggccttacaatttgttaaatatttaattggcgacgatttttctatctctccgaaaactcctgcgtgcgctttgcttaggctcacaaaatcgtgtgacctttccttgcttgaaaataaaagtttgtttagaaaataccaaaacgcatagtcggaatatggtaatctaattaatacccctattttgaaagtacaaacaataattatttacttaaaaacacttttaatataaatggatttagtttcccgttaacagtttcaaaaactatccacggtggataatagcgaatgctataaaaagaaatttattgaattaagattttaattcatcttaattattctaacacatataatggcataagttatagataccctgagctctttttcaattaaataaaatttgtgaaggtgtcagggctaaatcatgtattgtttgacttatttcttatattttagatattcagaattgcatattttattagtattgatgtacccaatatccttaatatttgagttacattggaatcgcaattttgttaaggcatttatctggcacacgatcaaatataattgtatttgaatatatattttaaaacattctcaatcgaaaaatttattttataatcaagataaaaataaacctttaaataggtaatctatcaataatattaaccaaccagttttccctgatatggtcacacgcatttaccgctgatctggcagcctggccaaaacaagcgtgcaagaatcttacctgtagaattagcttctgaaaactcgagtaacgatgagcgaaagtgaagcggaggagaccaaaatcagcaccgagccggtggacaatgcgtggtccatgaagatccctgccttcaggcaggaggacaacccgcatgggatggtggaggagagctccttcgccacgctgtttcccaaatatcgggagcgctatcttaaggaggtttggcctctggtggagcagtgcttggcggagcaccacctgaaggcggagctagatttgatggaggggagcatggtggtgaagaccagtcgcaagacctgggatccctacatcatcatcaaggcgc

SEQ ID NO: 27905 - DNA, 4013 bp, DROSOPHILA
cctaagcaaagcgcacgcaggagttttcggagagatagaaaaatcgtcgccaattaaatatttaacaaattatactattgcagtccttgaaaaagcgaattcttatggaattacgtaatcagtggaaatttagtatctattaagacacccataccaacaaaagcgagtgtcggtgcacacacgcacgatccaacacacgcgcacacgttgcgtatggtcacacctacaagtgtggaagagagacggctatagggagttagcgttgccagataaattttcttctttcgcacgactaacaaagaaaatgcctcgtatagttccactgcaattgctgaggtgcctgcgggtgcttttggacaataatggtggaattttaagtgcagtggaggtgaaacgcatttcgggtttgatggccaagtattcaaaaaaactcgtctcgaaatgtgtgtatgtacaaattctgaaatccacaaagacggaactattgggcgactttatggcggtgggcggttggtcgctggtctacacctggttaaatgatgccatcagggccatgaactggccgctggtacaggagatcctggaactgctgctcctttctcccgtggatgtcaatcgcctcaagataaactcagcacctattctggtcaaggggctgtgcaaggatggcggcaacgaaggtgtacgcattctagccaagcgtttggtagagcagtggctgaagattgtgacggaaaacacaagcatgacgatccaaggtgctgcgccacatattgcagccactactgcctctcaggttcctgcatccgtttctggagctggctccgcttcagttccggactctgcctcttcttcagacagcactgatagcgccggagcacctgtgacgtataccatcacctcggcggccaacagtagcaattccaacagcattaccatcaagtggaagcctttgttggacaacccagatggtggcgacgaaacggattctggcacacaatcgaaagacaacgaggtggaacatctggaaaagggctcctccgcaacccacttattagcagatgctagtctggggaaaaagtccgggttagatgatagtagctccgcggcggaggttaagtctggggaggacgtggataataagaagcataagagctcaaagagcgacaaaagtaaacggtccgagaaggagcgcgagaaggatagaaagaaggaaagttcaagtcataggtcctcctcatctagccataagtcgtcctcttcctcgtcatcctcctcttcgaagagcagttcttccaagagctcctcatcttcttcctcttcccatcgcagttctagcgataaataccgcgataaagacaaggctcgctcaagttccggctcctccagctcgagcaaggaccgggagcgcagcagcggttcgtcttcttcttcctcgaataaacacaagtcctcaaagtcctcctcgtcgtcgtcgtcgtcgtcgtcgagcagctctggttctagttcgtccaaagatcgcaagtcgtcgtcgtcaacttcgtcatcatcctcatcctcgaggcaggacaaggacaaggacaacaagctaatgcctccgccagctgtggcagcatcaaatgctgcaggtacatctcctacagcttcggcaaaggagagcgacgcacagaagcccagatcgattcctatcatgtcccgcaaggcctccatttcgatagaaattcgccgggacaccgaaaagacggccactgtaaagacgtaccagtccaaattcagatcgcatggcctgacggaagaggctccgcctcccccatctcgcaagggcctaaagaagcccacatcgtcggcggttgccgcttcacccgctttaatggcagtcccgtcttcactgaagcgaccatcgccgccacccagggatttgtccaccgacaagaaggccaagatcgacatcaacaacgtcgcgggacatgtggagaggcccggagccgccaagctgatagcgcccaaaaagattcaaaccctggtggagaccaacctgttctcggacgccctggccgcctccatcgaacccaaaaaggtggtgaagcgcaagcgtacgtctgcaacatcgcccacggacaaggacgcgccactggcgccgcttaagttctaccaggatactctggacgagtcgaagagcgaggagaagtcggacgacagcagcaaggaaaacgatgatgcgcgctcctcgtcacctggcaaggacacggatgccgatgacgacgacattccccttaagagggtcaaggaggacatcgagcaaaaggtgcagaaggcgaaggctgcggcaggcggagaaggcggagaagcgggtaacacctctgacaacgctgaagatcttcccgaggagcccaagaagcctggacctggctgtggacccgatggaccaccgggagtgctcacgctgcaccgccgcaagggcccgaaaaagaagctaacctggcagtcagaggaaaagctcacccagatacgatacttcgaggtcgatcgctcagagcgcgtaaatgtgatgaagcagaccttcctggaaatgaagaacatggagcgattcagcgagcgggacgcgctgaccattgctcggcgtggattcgacgataccatggagccgcaaatggagtggcggccactactcgaagtcgataatgtgcccgaccacccgaacggaaacctctccaagcagcgccaggtgcagatggacagggaggccaccactctaagagccctgtacttctcgcccgacatgattcccgacagtcctgcggaggcggaactggaaccgcattttgctcatgacattcccgtgatacccatggatgacctgacggggaatccggatgctgtcaacgactacagtgccttggcgtggccggagcccaagaaatacgcgcctagctcgggagtcggagcaaatatcagcggatcggacatgggcttcaatgacaatatgttgaccggactgggagctggaccgaacctaatgcaaaatccattcgatccgttcatgggaggcatgcctgctcccacgggaatgccacccggaccaaacatgatgccaaatcaagtgcccaacggaacgccgcaaatctggcagaaccaaatgggtccggtaggtgggccgcccggtgtaccgcccatgatgaacggacccggtggccccggaatggatatgagcaatatgaacatgaacaacatgccaccgcaaaactttatgggcaatcagtttggaagtccagtgtctccattcggaagcggcccaccacctggattcaatcagtacccgcccatgatgatgaatggaccaggtccgggaccggtaatgggacccaatggtccagtgatgggacccaacggccccatgatgaacggcccacccaatggacccatgatgaacgggccgcccaatggaatggggccaggactgatgatgggcggacctaggaataacaacaacaacaacaacaggaacaaaaacaacggcggcggcatctggcgcagcgggggcaacaacttccaggagaactccggcggcaactggcgctcagcaggatctggccccaatcgaggaggtggaggaggcaatggcaacaccggcgtctgcaagcagttcatgcgaggacactgcaacatgggcaagaactgcaagtatgtgcatccgcagaagaagcgcttgtaggacctacccgaatcttctgcggaagattcagctgcatagatctcagacgcgcaacggaggccaagatttccgaaatcgagtccccacatgaagactgtatccaggttagccgccgcaagttaatctaagtgtatatatgtattcggtatatttttgtgtagacgcagtctatccctaagtttttagcctaagatctgggttcaattccctgccccgctaactttattattatgctgattaccataaggttaaatatttataagtttaaatttacacaattaaatatcaagtcatatgatgc

SEQ ID NO: 27906 - protein, 1071 aa, DROSOPHILA; identical to SEQ ID NO: 25266

SEQ ID NO: 27907 - DNA, 11029 bp, DROSOPHILA
actggtaatttcagttatcccatttataattaataacaagccaataatgacaaagtgtagataaaccagacttttagtttaaagttcagagccttttgaacattcattcaatataaaatatcacacgaatgactgctccacggaaagcgctagaattgtatgatcaatagccctatgatatggaaacttgcgattattcatgctgtaagtattcgacgatcaaatctatagttagtcggttgcaggtttccaattagtcagtgtccactgtgtttggaaatgtgcgcgtttcaatggccaggctttgtgtctcgatcccgtcgccttcgctttttcgccttgtgtgtcacttgcggtttgaaattcaaacccggtggcgttgtatttttagctctggatgagcctccacttggctggctaagcatgagcttgctcgaaccactgtagtcccgagacaaagattgactttcagtgtaattccagggacgccacccacaaaacggcgactcggctgcacttacacatactgtgtacggctgattcatcgatggcacttctttatcttgaggtcaataccaatgccaatcaatctcaactcagctgcgcctcacgaaacttccccaagagggaacaaagagcccactcagcttaatttctcgcgtaattaggaagttgagatccaataaaggaggaacacactcgggcgatcatgatcaagtgaggttcttgagcagttatttgtttcattatttcggatgctttggagggaggaactctagtgctgcattgattggggcgtgtgttaatgatattcccagttcgcatggcgagcatcgattcctggtacgtatgtgggccccttgactcccacttatcgcacttgtcgttcgcaatttgcatgaattccgcttcgtctgaaacgcacttgcgccagacttctccggctggtctgatctggtctgtgatccggtctggtggggcgccagttgcgtttcgagctcatcaccagtcactccgcagtcgcattctgccagaggtctccgatcaagagcgcttctccattcgagattcaaacgcagtaagttggcctaagaccaaatcgaaggcaaaggaattttattcaatatttaattaagtgaagatttgctattaaatatataaatcattgagagttcaaaataaatggtcgaaattgtttcaataaatttccgtttcctggcggcattaaagtgatttaaaccgtgaagtccaataaattgataagaatgaaatgataaattgtcttgttttccatttcggaatggagctcgtaataattgattttaacgtgtattgatggctatggtgatattgatttaattggccatccattttgggctatttcgtaagcggcatttgggccattaaggcccgaaactggaccacgccacattggcgtagctagaaagtgtttgttggcctaaagagtgaggctctaaaaatcaaattagctccgtggagtggtcataactaactgtaatagctgctccactggccccagagtcattcttctgcatctccccgagatcatcaccacaccgctttcggttgccaagcaacgagtcatgtcttggggcttggggcaaggtcttcccgtctccggggttctttggaaattgactaattgcttttttcagccccacagtgaatgtgcccgcctgcacagagagaaaaatgacggctattctagtgcataatcaggcagtttaagatttcaacgacgattgtgatcgcatactatatatgtgtggtatatgtatcatattaatgttccattttaaatatgccagctacgaagtatttctctgtgtgtaaaccaacatatacatatacttgcgtatattttgctgaattggcaccgctcttgaacccccgactgtctgggatccgtgactcatgggaatgaaaaagaaatggtatttatactcgagaaattgcgtagatgcttttgtttttgctcggtatctgttttttgtttcgcatttatatttgcataccctcgacggggggaaatgagtggcaatgctaaacttgttgtgcatttaatttaatggacgtgttgtttgctttggcgaatttattcaaatctgaatcgaaatggaaatatatacaatgaagtaaacaaatatttcttctataattcagcccggtgcaactaaatgaacttagtaaatatagtaatgctcttattcagaccaaaaattaccattaacacagttgtcgtcgaatgtagccgaccagacgtcagtaaaaataatcagtgattgttgcttgtttaatattcgcgtttcttataatcgtcgaaatggcgttgtccatatgtgtgtccccttccgaatatatatatatatatatatatatcccctctagattgatggttcgggtgtttcccacttctaggcttacacgaactcaaaggttcgtacttaagttaatacatatttattttcatatttcggcctgcagttgtttactttttgattttctcgatttccgctgaatattccagtggtatatagtatatatagagtacatatagcatgtggtaggtccgattccgaattcgattttgagtttgatttgatttgctttgtatttcgtgggttgttcgacgtactcgacgcggtgctcattgtatttattttctatgcatatcaccgtttggctttttgtattttctgccgcaacgagttttacttttgtttttgtttgagagcgcgaagctcagctggttggttttttcacgctgagtgcgcaaaacgcgcaaaaacgggttttgcacttttgaagccagcgcaaaatgccagagtgtgagtgattgtaagctaagctttttgtttatctgcactacagtcgctcgtctcagtctctaaattgtctctgtgtttgttttaattttcgttgtatccacttgtgccaagcacgaagcgaaactgaaaccgccgagattcgagattcgagattcaagatccgagatctctgatcgcgggtcccgggtctcatccggcggagacggtgactatgtggaaactgtgaggtggggtgtcgtcgtatgtacatacatgtatgtacatatatatgccggtggtaaccttcctcgaaatggtccataaaatctcaaacaattctcagcctattagcttaaatgcatccttaaagaaattcccattacagtcgaagcaagtaagtaagttatttgctagcttgcaagttaatgtgcataaatgtatttcaaatatcgtactatgtttgcttccctttcaacagaaatccattttagtatcgcctttgttgaaattgtactctccaagtcgattactaattttgtgaattggtttattgtatcagggggataaatcccttttcagtcatgtcagtcccctttgcctgtaccctttgccctttgccctttgaactgccatgacctgcgaggtgtgacacagttttccgattccagttgcgagttccagcgctgctttgttgactctcaattagcatggcactctgccattctcgagctctcgccatgcagatgtggctggatgagaattcctccgctgatgacgacgagtgtgtgccaatgcgaatgtgtttactgcctgggttcgtataacaattagcattgcaatgctaatattgaacacagcgcaaagaggcttagagtttgcattggaaaactggcaactgagacctagttgaatgctttcgtgcatccatcctgtttactggcgcgaaatcgggtctcgaaattctcgatcattcttgaagcagtaaatatatatatacttgtacgtccttaacccgcatgacatgtgtagtttcctgagaactatttccagcggaagtttagcatttattggcgcacttactacgtgatttatttcccagaaccgcttttaaagaggctattggatttttttttcgcattaaccgaagactcagctgcatggaaatttgcagtcattacggctgtgattgtcaattatctgctgccgcctccctcttgactgagcgtttcaaatgcacgccttaaacggtgggcgtggccgaatgagtgcctctaatgccgccactgcttttacattccgtgtagaggcaactttcactttctccgccgcggctggatttcaaaaatagccactgccacatggcgcattattctgccacggtctttgtttttgccacttgcagctgccactgccactgccactgcagctacatctgcatacacatccacaaccccagccccatctactcctcctcctcatccgatgccctaacgaactgcctgtgcgtgctctcgtggatgtggccactcggaaaactgggcaccacttgagtggtgtttgccgcacacaaaaaaaaaacatcacgtactgtgctcgccttagtccggcaaatgccatgttgatattttaataggattaaaacggaataaatttaaaaggtaaatcttattcgaaaattatcctcgttcagtggttattggctttacagctactagcttttcctgcgtcttaaacttctcttagctttgtatgtcgaaatggaaattaaagtgtcattggataagtagaacaccgtaaattgagtttatttaatgatttaatcaagtgtctattaaggagtggggtgtttcgagggtttcaagcacactgccactctttcaagtgcctttaatgtggtcaccattgttagaattaggtatttaaggttaactgatttaagatacttactaatagtaatagttcaagagcggactgataagataagatagcaatagagccttctatacaaactatttgttacttccccagacctttaaaacagatagcaagttgcgaattgtttatttatttcaactaaagtgagcaagtgagctctatttctccttgtgcagcgatggccattctgtattgagacggcttacaagccgtgtaaggtcagacaacctcctgttgatttccgctgcggaatcgcagcttcacagatcatttagccgccggcggaagtcgtcctctgctgttcagctgttcagctgtgctccgttggtcacgggtcagccgtggaggagttgctctaatccaatccccttcgatccgctcggctgcgagccctacttaagtgagagttgattgttttctggtgagcactcaaagacatccgctttcctcctcctcctccttctatttctatctctagcagggacttccattttccgtcctcaaattgagtcacaattgcataagaagcatgggaatggacgggatgcaatggcaaaggacgtcattcccttggctcagatggctgtaatggcattagccagcaatcagcagcttctagaattttcactgcatgttccacatcagcttgccggttttgatacccagtacgagaaggggaatatgggttgcattcattcatcaggattttcagcagacgaaaaacaaaagttcttgaggacaaaaggattaaaagttttgcattgcctcgtgttgagttggtactattaagctgcagggtatcttctagtcgttagacccatacctcttgttctatctgtttccatgcggcaaccagttaaccagctaccaacaacctacaaccaactggagccagcgaagcgttcatgtgaaacgtccagtttctgtttcccccagcaatgcatatttggccctcttctaccacttttgccacttttggtgctgtttttctgcggttgctgttgttgttactgttactgttgccgttgccgttgctgttgctgttgccatgttgtggccaagttgttgctgccacccgtgtgtactcgtttcgttcgggaaattcgtgaaaaaccgaaattagccatcgttgcggggcgaaatttgctggaaaactctccaccggccagggcgcctcttcggtttgtttatgggtttcatttttcatggcgttctgggcactccaaagtgctccaattgctttctgccccaaggccagcgcaattaatttgcgcaattaactgaaattgaacgcctatttgacgggtcattctggtgggtacaagtgggtcaagcaaccaccaccatcttcgccacctgactgcaaatgggcgacaaattgggctaatcttgagcaatttccgaaatagaatagagaactactttggagaactagagccgatggttgttgattattaactagagaagatgaacatacgcacattgaatggtttttccttaatagaaaatgggttttcattacaatatctttctgtttgcctcttttccaggcgcggtctgacgccgccacatcgagtgaaatccatatcgatggccacattcacacaggacgagatcgacttcctgcgcagccatggcaacgagctgtgtgccaagacctggctgggattgtgggatccgaagcgggctgtgcaccagcaggagcagcgcgaactgatgatggacaagtatgagcggaagcgatactacctggagccggccagtcctcttaagtcgctggccaatgcggtcaacctgaagtcgtctgctccggcgacgaaccacactcagaatggccaccaaaatgggtatgccagcatccatttgacgcctcctgctgcccagcggacctcggccaatggattgcagaaggtggccaactcgtcgagtaactcttctggaaagacctcatcctcgatcagtaggccacactataatcaccagaacaacagccaaaacaacaatcacgatgcctttggcctgggtggcggattgagcagcctgaacagcgccggttccacatccactggagctctttccgacaccagcagttgtgctagcaatggcttcggtgcggactgcgactttgtggctgactttggctcggccaacattttcgacgccacatcggcgcgttccacaggatcgccggcggtgtcgtccgtgtcctcagtgggttccagcaatggctacgccaaggtgcagcccatccgggcagctcatctccagcagcaacagcagttgcagcagcagctgcatcagcagcagctcctcaatggcaatggtcatcagggcactgagaactttgccgacttcgatcacgctcccatctacaatgcagtgggtaagtttccatctctcagcccggctttctttatttttcattcaattagtttgctttctttatcaaaagaggctatattcagcacaacatttgtgaaatatgatttatcattcagagtgtatttaatcctttcgaatgaatcattcatccatcgaagcaaaccaaattgtacatgtattgaacgctaagtgaaatgcagtagttttcaaatatgagttgttcaaacacatcctttcgctcctgcacctgcggcttggcatcctgaaagaccctgcagcttgcttgcgcgcccttcgctcgccttccacttggagcaccccacaccaagagttcgcatccactttctaattatctcaatatttggctgaatccagctccaccgacttttaacgattggatcagcgactggagcaggcggggcttccacgatcccttcgacgattgcgatgactcgccaccaggtgcccgccctccagcacctgcgccagctcctgctcaagttcccgcagtatcatcaccattgccaaccgtccgagaagaaccagagcttgcgtggaatttttgggaggacgagatgcgaatagaggcgcaggaaaaggagtcccaaactaaacagccggagttgggctactccttttcgattagtactactacgcccctttccccttcgaatcccttcctgccctaccttgtcagtgaggagcagcatcgaaatcatccagagaagccctccttttcgtattcgttgttcagctccatatcaaatagttcgcaagaagatcaggcggatgatcatgagatgaatgttttaaatgccaatttccatgatttctttacgtggagtaagttcttgattgccttgagttgagttttctgttatggtttctgttgcatttggctcgctcttttgatcgattgaccttgtttagttcatgttcggtttttactgcgaagacatatcccggaagagtgtattaactagtcttcccatgttgcaggtgctcccttgcagaacggccatacgaccagtccgcccaagggcggaaatgcagcgatggcgcccagtgaggatcgatatgccgctcttaaggatctcgacgagcagctgcgagaactgaaggccagcgaaagcgccacagagacgcccacgcccaccagtggcaatgttcaggccacagatgcctttggtggaggtgagtccttttaaccgagctttttttcgtgcggcccccactaattggactcttgttttcagccctcaacaacaatccaaatcccttcaagggccagcaacagcagcagctcagcagccatgtggtgaatccattccagcagcagcaacagcagcagcaccagcagaatctctatggccagttgacgctcataccaaatgcctacggcagcagttcccagcagcagatggggcaccatctcctccagcagcagcagcagcaacagcagagcttcttcaacttcaacaacaacgggttcgccatctcgcagggtctgcccaacggctgcggcttcggcagcatgcaacccgctcctgtgatggccaacaatccctttgcagtgagtatgagaaccgaccctctggattaaatcgacaaattagaaagtggtggcaaggaggcaatctgttgcaagtggagaagtgaaataaaatacttaagaattctagatacgtgcagtttcccttttggtggacctcaccagtcacacactaccttagatacattcatgatacttactattcctctaattagcaattgtaaaactttgtgtgccgtccatagtgataaacaataacacagagctgagtaattcttctcttcaataaatattaatcaagcaaacattctgtttcccacgttcctttgccacattaaatccagacaggattggctgcgtccagatcatcaatatttgctaaagacacaattcctcctttataccccacaggccagcggcgccatgaacaccaacaatccattcttatgagactcaacccgggagaatccgcctcgcgccacctggcagaggcgctgagccagcgaacaaagagcagacgcggaggaaccgaaccgaaattagtccattttactaacaatagcgttaatctatgtatacataatgcacgccggagagcactctttgtgtacatagcccaaatatgtacacccgaaaggctccacgctgacgctagtcctcgcggatggcggaggcggactggggcgttgatatattcttttacatggtaactctactctaacgtttacggatacggatatttgtatttgccgtttgccctagaactctatacttgtactaagcgcccatgaacacttcatccactaacatagctactaatcctcatcctagtggaggatgcagttggtccagacactctgttatttgttttatccatcctcgtacttgtctttgtcccatttagcactttcgttgcggataagaactttgtcagttattgattgtgtggccttaataagattataaaactaaatattataacgtacgactatacatatacggatacagatacagattcagacacagttagtacagatacagatatacatatacgcttttgtacctaatgaattgcttcttgtttccattgctaatcatctgcttttcgtgtgctaattttatacactagtacgtgcgatatcggccgtgcagatagattgctcagctcgcgagtcaagcctcttttggttgcacccacggcagacatttgtacatatactgtctgattgtaagcctcgtgtaatacctccattaacaccactcccccaccacccatccatcgaaccccgaatccatgactcaattcactgctcacatgtccatgcccatgccttaacgtgtcaaacattatcgaagccttaaagttatttaaaactacgaaatttcaataaaaacaaataagaacgctatcatttaatattgttttcttttgattcctgatgtagtccaaccatgagatcgttgtagaattccttggtttttgtctgcaactatgcccaattaaaaacaaatagttttaatgaattggcatacttttaggaagtctcttgacaaaaaaaaaaatactgagtaaaagtactgcgcttcatttcttcaatggcaatgtagcaatctaacatgttaggagattggggtgcaggactgccgtgtttctaaccagaagcatctccaaactccagaatggaatcacagactccgaaaagtatgctactgatggtaatttcaatgggtaagtaacaaaagcaggccgtttggtttatttgaatgtatttttattcatttccgtttcggtataatttctagtttgttctcttcgtctttagtactagttggtttagcaattgtttaaattaccataaattatttaagttttatgttacgtagtcgtataatgtagatttataatttaaaaattcgcatgggaaagaaagtcgaaagtcatttaactggcagccactcctttctatcgttccgttccttcgctaattactttcctagagctaaataaaaacaaaataataatcgcaattgtaataatgaaccgtaaacttagaaaaacaaataatagcaataattcaaaacaaaagttaaagctggaatcgctgcgttctactcgtaatcgtaatcgtatcgtaaataagagtacacgtatatctagagatgaaagagtgcctaggttagcattgcatcaactgtacagtatggcttatacgcgtataagtcgccgccctcctccacgccagcaaacgattagattatgtttataataatgcggggagcagactccgcgcggagatatcaagtgtatttgttttgttttgcgtggttatgt

SEQ ID NO: 27908 - DNA, 2339 bp, DROSOPHILA
catcaccagtcactccgcagtcgcattctgccagaggtctccgatcaagagcgcttctccattcgagattcaaacgcagcgcggtctgacgccgccacatcgagtgaaatccatatcgatggccacattcacacaggacgagatcgacttcctgcgcagccatggcaacgagctgtgtgccaagacctggctgggattgtgggatccgaagcgggctgtgcaccagcaggagcagcgcgaactgatgatggacaagtatgagcggaagcgatactacctggagccggccagtcctcttaagtcgctggccaatgcggtcaacctgaagtcgtctgctccggcgacgaaccacactcagaatggccaccaaaatgggtatgccagcatccatttgacgcctcctgctgcccagcggacctcggccaatggattgcagaaggtggccaactcgtcgagtaactcttctggaaagacctcatcctcgatcagtaggccacactataatcaccagaacaacagccaaaacaacaatcacgatgcctttggcctgggtggcggattgagcagcctgaacagcgccggttccacatccactggagctctttccgacaccagcagttgtgctagcaatggcttcggtgcggactgcgactttgtggctgactttggctcggccaacattttcgacgccacatcggcgcgttccacaggatcgccggcggtgtcgtccgtgtcctcagtgggttccagcaatggctacgccaaggtgcagcccatccgggcagctcatctccagcagcaacagcagttgcagcagcagctgcatcagcagcagctcctcaatggcaatggtcatcagggcactgagaactttgccgacttcgatcacgctcccatctacaatgcagtgggtgctcccttgcagaacggccatacgaccagtccgcccaagggcggaaatgcagcgatggcgcccagtgaggatcgatatgccgctcttaaggatctcgacgagcagctgcgagaactgaaggccagcgaaagcgccacagagacgcccacgcccaccagtggcaatgttcaggccacagatgcctttggtggagccctcaacaacaatccaaatcccttcaagggccagcaacagcagcagctcagcagccatgtggtgaatccattccagcagcagcaacagcagcagcaccagcagaatctctatggccagttgacgctcataccaaatgcctacggcagcagttcccagcagcagatggggcaccatctcctccagcagcagcagcagcaacagcagagcttcttcaacttcaacaacaacgggttcgccatctcgcagggtctgcccaacggctgcggcttcggcagcatgcaacccgctcctgtgatggccaacaatccctttgcacggcgccatgaacaccaacaatccattcttatgagactcaacccgggagaatccgcctcgcgccacctggcagaggcgctgagccagcgaacaaagagcagacgcggaggaaccgaaccgaaattagtccattttactaacaatagcgttaatctatgtatacataatgcacgccggagagcactctttgtgtacatagcccaaatatgtacacccgaaaggctccacgctgacgctagtcctcgcggatggcggaggcggactggggcgttgatatattcttttacatggtaactctactctaacgtttacggatacggatatttgtatttgccgtttgccctagaactctatacttgtactaagcgcccatgaacacttcatccactaacatagctactaatcctcatcctagtggaggatgcagttggtccagacactctgttatttgttttatccatcctcgtacttgtctttgtcccatttagcactttcgttgcggataagaactttgtcagttattgattgtgtggccttaataagattataaaactaaatattataacgtacgactatacatatacggatacagatacagattcagacacagttagtacagatacagatatacatatacgcttttgtacctaatgaattgcttcttgtttccattgctaatcatctgcttttcgtgtgctaattttatacactagtacgtgcgatatcggccgtgcagatagattgctcagctcgcgagtcaagcctcttttggttgcacccacggcagacatttgtacatatactgtctgattgtaagcctcgtgtaatacctccattaacaccactcccccaccacccatccatcgaaccccgaatccatgactcaattcactgctcacatgtccatgcccatgcc

SEQ ID NO: 27909 - protein, 532 aa, DROSOPHILA
MATFTQDEIDFLRSHGNELCAKTWLGLWDPKRAVHQQEQRELMMDKYERKRYYLEPASPLKSLANAVNLKSSAPATNHTQNGHQNGYASIHLTPPAAQRTSANGLQKVANSSSNSSGKTSSSISRPHYNHQNNSQNNNHDAFGLGGGLSSLNSAGSTSTGALSDTSSCASNGFGADCDFVADFGSANIFDATSARSTGSPAVSSVSSVGSSNGYAKVQPIRAAHLQQQQQLQQQLHQQQLLNGNGHQGTENFADFDHAPIYNAVGAPLQNGHTTSPPKGGNAAMAPSEDRYAALKDLDEQLRELKASESATETPTPTSGNVQATDAFGGALNNNPNPFKGQQQQQLSSHVVNPFQQQQQQQHQQNLYGQLTLIPNAYGSSSQQQMGHHLLQQQQQQQQSFFNFNNNGFAISQGLPNGCGFGSMQPAPVMANNPFARRHEHQQSILMRLNPGESASRHLAEALSQRTKSRRGGTEPKLVHFTNNSVNLCIHNARRRALFVYIAQICTPERLHADASPRGWRRRTGALIYSFTW

SEQ ID NO: 27910 - DNA, 13075 bp, DROSOPHILA
aatcaatgaccctattgattggcctccctggcgaataggtgcggtaaatgtgtcaatggggacgcaaatgtagggactaaattggcaccaatctgaagcaatcaactgtgtaactatatatcgcaagcccactccaagcatttagactcggaaaaaaatcctatactttatatacatgtatacacattaagaaaaccacacccattgtatgcgaattaaggtttttttttggtgttttattccagtgataggcaggaataacgaaaactcactgctctaagaacacaaaaacacaatgcttaacacagagtaaacaacatttacgatgatatgcgttctttaggacgaaccggaatgtctgaatgcacttttccaaattttgccttaacataatagtattttgaggtagtttttgatacgacacgttttaaaagataatatataacagaccgtacatatttaggccacacacaatggttattcttgtgttagtttcatttttggagatttatttgttgagctctagagaaaataaaagttagttaaacctcgggagacgaggaacgcatatatttaaatctggcgccatccggttgtcaacaacaaccttctggcaactcctctaagtcgcatctggcaatgtcatctgatcgcagccgagtggcaacagtggtcgctgctgcgttcgcgtactttcgtgacttcatttgcgattttatttatattctccgtgttgcgaataaaatgtatgtatcatggcagttgtttaagaagcgaatatacgctgattcatcctaggctggcgagaagatcattgcgaaaaaagtgtacgaaaagaaagtgcaataactgcagctctattgtgcgcgcatctgggtgtgcgtagatctttgcatcggtgtgtcggtgtttttttacgtttgtgtgcgtggcgtgcccacatttgtggcacaagtttaaaaattggcactaagaaagttcaagaaagtggttctggggaaaatagttcattcattcagcatccactttctgttgaaagtggcgcgcctgcgttttgtgtcttaatcatcgcattgctgcctgcctacgtgtacagaaactgcgagcgctccgggagagtccccgagaatccccaaaatgttgtttttctgcctagccttgatcatcggctgcgcagtcggagaatacagcgaagtccgggtcatccaggaagaggacaacttcctggagagtcctcactacctaaaaaacgaggaaataggagatcttttcagccagctagccaaggattaccccgacttggcgcagacctatacaataggcaaatccctggaggatcgacccatctacgccctagccttaagtgcacctaccggggagtccaagaatggagatctcctaaggccaatggttaaactggtggccaacatacaaggcgatgaagccgtgggtcgtcagatggttctctatatggccgaatacctggccacccactacgatggggacccgaaggtccaggcgctactaaatctcaccgaaatccacttcctgcccacctgtaaccccgatggattcgccaaagccaaggtgagtcacctcctgtttctagcttatcaagaatccacggaaagcaagttttggaacggaaaaatgattgtaaagtgagtgtcgaatcgcccggccaactgtttatacaacacactagaccgagagaaaaatacgctttgcgttttttttcccaacttgtacattatattcagtcattagctatacacttgaacaaatgtttgccgtttttactgtgggatttcccaaacttttggacctattgctgttgcaaaagcgagcttacaatattgaaaagcagaattgctctttggcattttgtttctatgtacatgtctttccctctctccatcccatttttctttattccctgtttcgagcttttgtgtgaatgagctggtcttttttgattaccgcaaataaaaaagcatcgagatcaatctgaaatcattcccaatcaaaatggaatgtgtgaacgaaaggttttgacccacttttggcctctgcgtttgtgatcccttaattagcaggcaagaactgcatcttaacttatcgctttcaaaataaaaatctttaaaataaaatttagcacagtccttagaaattttgtgccccataatgtttatttgattccccctgcatttcgtggtattgactgttccataatgttttgagtacattttaattaattattttgtttaaaattgcacggttgtatagttttcataattttatttttagattcatgcaatgatgctacaaatttgtataggtaatgacaattaaacggccatcgttctttagcctaggaatcgttatttgtggctcttgtctggttttttatgtgacccaatggcatctgaacattccacttgtgctccagcgggtaactgacacaatttaatgagctgtttaattctagttaggcctgaaaatcgcatatattatggccttggtacgtgatgtggcgatgctgaccccacatcctttgccatttttcgctgagtgcgggtgtgcgattcttggtgacggttttatggcctctccaaaactgtgctgataaagtaaacaaagttggtattcggtgcgctgacgttatgatttcgcaactgcaacggcggccccaacaataactgagaaagagttacaggcgtcaggggtgcgaacgacgtttgctgtgttttacaagaaactggttagatgtcacaacaaaaacagtaggagcaagcaaaattgcccgcctttgaggttcgtgtttgatttacaccccttattttcctgcaatgtggatttgttcgcaaccagtttgtcgttgtagttgatggggtttgctgctgtgagttaagtgtgctataaagatagctaatatccgctgcgaacgcgcgtttgcagtcttttttgaatgcccgactgcagtcggcaataagtagcgtggcttagattgtatgaatcaagtatctgcaaaagacgtgtacatttaagacatattctttgagctgctaaatacacgtaaattacatttgcgttctcgaatgccaatcacaattaaaatgaatggcaaggagcttaaattttagttttctttagacatttcaataatcattgttccttggagggcacatacaattcgtgtacgcctcgccgcctcctgaggtgcatcccaattccaatttttggcccactgatcatcttcggatcggagcttatcattttgtttttatgtagttgcaaccgtcgcttatcaagaaaagcggtcgttagctcgattgaaatgcgggtgtggatggtgaagagggggatgagggtctgactggaaggtgacggccatatgctcgcattctggaatagcactgataagagcgatttgacgctctcaattggttgaatgtgccaattcgtttgtttgtcggagtccggacgggttgcttctgacgtcacggcgtgggagtggagctatcgatttttgcgtaaaaatatcctgttgacgtccgttctttcagctctctccgctctcttctgtctctcactcacacacacaggcgcaggcgccacacatattgagtctggcaacttccctctccggtaacaataatacaattaaaagcgcctgaataaactataatctattaacttgtgtctgtcgaaagcagcggtgaggtaaagttactccatgagcgggctttaatggatttcgcgctcgctgctgcgtgtaatttccctacaattagcgcctctcttttgggtccgcttttggagagaacagtgggatgaagcacccatatgctgatcaaaatagtaccatatgctgtactaaatagtagtgtttttcattgtatttcctatgaagcgctgtgttaatcattagataaacaggcatttacctttggaaatcccattgatattttattgtaaacagtggctgaacaaatttagacttgaaacgtgagtgacgtttttcagtttgtcttcgccatatttaggggacgatactcttcaatttccccactgtgcgcggcgactgaggcagcggcagcggcggcggcagaggcgggcgaatgggcgcttaaggccaatcaacgcagcaaattttcaaacagttgacttttcgagcctgagctgcaacgacgacccacgacgaacggaggcccgacggacatataagaagagagcgagttgtgtgcgggagagagctgagaagaagcggaggaaaaataactgtttctcgctcaattcgcacgccagtgataaaaacaacataatctcgacaagattgcaaatcgcaagatgccaactctgggtctcctgttcgcctccatcggcattgccgtgctggcgatgggtgtgccgcattgcaggggctacaccatcaaggaggacgaatccttcctgcagcaaccgcactatgctagccaagagcagctggaggacctgtttgctggcctggagaaggcgtaccccaatcaggccaaagtccacttccttggtcgatctctagaaggacgaaatctgctcgccctgcaaatctcgcggaacacccggtcgcggaatctccttacacctccagtaaagtacatagccaatatgcatggagacgaaacggtgggcaggcagctccttgtttatatggcacaatatctgctcggtaatcacgaaagaatcagcgacctgggccagctggtcaacagcaccgatatctacttggtgcccacgatgaatccagatggctatgcgttgtcccaggtaaagaacgcaccgtcgcttcacctgttgtgttgttttgtccaactttcgggtaaaatcaataagtggaggagccgaagtgggagggccagtggatgggaacgaggctataagcctgagagaagacaatattgcagcagatgagagtggaaagcagttacaggatagagtttgctttattcccagccatttctgaaacccgataactaagctcatgcatatcaaacgtcagagttcataagtgttatctatacccaaacccgttcacacctccaacccttttttaaactttatacatacgcatgaaaaaggttgataaaatgttgggaagtaattaaaaagaatgctcaaatgaacacttgtttggtaagtcgcaaaaatgaccaaataggtatacatcttaccccaaactttgcaccttttaagccgtttcgttactccaaaacaaactctgctccccgaatgtttgcatattgcacacatacgcaccttttttaaactctgctcgttgtttgtttatcattttcatcttcaacgatgaaaatcgagcagtaagcatacgtacgtaattaatatattacttccccattcattttcattgtgctttatacatcacatggcatattcatctgtacagaaatggcccaaaaggaaaaaaaaactaagagtatgttgtaaaggatttttaaaaacgcgctatattctcttacacttggggaacttaagttattcttatgaacaattataaagttttaaatcacattttataaagaaacgaaaaacgtcaaactttatctgtagtacaagtaatctgtattctgtagaattcaaaaattcccattattcattccgtttaaagtgctaatgcaaatggcgatttctttgcggtacttaggcttccatttctgcacggattgtactttttatctgctttatcccacgtctatttgctagatttgttgcacattatggtgtgcggattttcattgattgattgttacgttgttctttacggagaaattgggtaaaaccattgcacaacattttttagcgaacttcgacgaacccttttcttcaccgcgattgtgttgtaatcattcagttgacacctgactgccatgctaaatggacaattccggtcagaactgacctgcatatcaatcagcccataacagagtgaaagagaaacttttaagtttagcgtaaaatcgtcattgatcaaaatcatcagcaaacgctttctgctgaaaatgaaatgatgatccaaataggtgcatatagcagcatttgagtatctgtaagctaattatctaaatgtatattgaatcttttaaagcttgctggccattaaaggtattatatgattttctgtgcaggaaggcaactgcgagtcgctgcccaactatgtgggtcgtggcaatgcggccaacatcgatttgaatcgcgatttccccgatcgcctggagcagagccatgtccaccagttgcgcgcccagtctcgtcagccggaaacagcagccctggtaaattggatcgttagcaaaccgtttgtgctctccgccaatttccatggcggagctgttgtggccagctatccctatgacaactccttgtaagtcctgcaaagggatgtttatccctgacttggagaaaaactaacaacttttcaactttgcagggctcacaatgagtgctgcgaggagagtttgactccggatgatcgggtcttcaagcagctggcccacacctattctgacaaccatccgattatgagaaagggcaacaattgcaacgatagcttctcgggaggtatcaccaacggagcccactggtatgagttgtccggtggaatgcaggactttaactatgcgtttagcaactgtttcgagctgaccatcgagttgtcgtgctgcaagtatccggcagcaagcactttgccccaggaatggcagcggaacaaggcatccctgctgcagctgctgcgccaggcacatatcggcatcaagggcctggtgaccgatgccagtggctttccaatagccgatgccaatgtctacgtggctggactagaggagaaacccatgcgcacttccaaacgtggcgaatactggaggcttttgaccccgggactctatagcgtgcacgcctccgcttttgggttggtcatctgcttatttctatcctggcatgcttgctaatgttgtaattattctataccccaatgcagttaccagaccagtgccccgcaacaggtccgggtgaccaacgataaccaggaggccttgcgcctggactttaagcttgcgcccgtcgagacgaactttgatggtattagcagtttttacagtccctattatttctagagagggatgcaacggaaatacctatatatatgcgcatatatattatattgggcagttccaaaatgctatacatatatccacatttagcgatgcatagtattctctgctctcctgccctctccgcactatccttgtactatatatgttatctccgccattcccgaatccagatatacaaccattttgcatgttcatttgctccctctcatttagaacctttatttgtttaccgcgagagctagcagaaaataaacaatgttggctgtcgtgtggatgaattggtttggttttgtctcgaatcttttgtacatacacttttttaatttatcttttaaaaacttctgtttcatttttatgtttttttcgcattttcatacgcttatatgccagcctatgttccttccacgccattacttcagacgcgcacatatttagtggatgcttgatttgtatatagagaacgtattaagaacaaacacgaagaaatagcaaaccaaataacgaaatgaaataaattaaggaaataagcgaattgtacttaggcaatatgcagaaattggcccacttatggtcatcgaatgacacattcccaatacgaatcggttatagctttatcaatattccccttatcttccgcacaccctaaaacatattgtcaagtattttagcaacgatgcaaaaaaactatgataaatccaaagcccactacatgaacctactgctaaatatactgtatactaaatagactgtatgcgcactctatggttagtcctatctggaatgattgttgagcatttatccaaaaacaaaagaacctacatttgatagtgaggcgaaattattatcaattccggtccgacgcgtgctcacgcatggcttttgatatatactatagacgagaacaggttacaatcaaatgaagaatattgcaatggcgagaaccttgcgaagtataaataaaatattaatgttcgcttgctgcgttttattttcattcattgctctttaattcggtctctaaatgaattttttgttttcgagcacattattggtgttttcaaaatctggtgcagtgttttattaatcactcgtttttgaaaaaaatgagattttatttgagatcattttcaattcattaatcatcgaattcaggacatattttttctttattctgatctttagcaattttactttctttttggtttcgcagtacgacttagtttttccatttttcttttgtttcaaaggccttatatgtagcctaacggtggagtcatggttagggacgttcaagaaactcccagtcacatctaaatgaaatttaaaatgtatctttcactaagtacctaaaaaaaaaaaaacaacaatttaaagcgtctgtgccaaatgtgaagatttcggaatggatttgtttatatatatatgtatgaccagcatacaaaagtcaagcagtttctttggtattttatcttaaataaatgtgaactatgaaattatggcaaaataaacgaacaaaattatgaatttgcttgtgcttctgattctgttgctaactctatctgctcccgtcgctagacgcttagacgcactgcatcatattctcaccggaacccgcatgatgcaccccattacaaaaactggcattgcactaaagacaaccttacccatttccgtttccgctcttcctatcccgcaggcaacttccggaaagtaaaggtcgagcgctctgagcctccacagaagctcaagaagcagttcaatgggttcttgaccccgactaaatacgaacaccacaactttacggcaatggagaggtgagagtttttcctaaaatgtacaaatatatttcaacggatcaaattgttcatctgcggaatgtgtcactcatgatcttcagaagttctaatttttcccttttattcgtaaattctttttcatttccagctatctgagggcgattagcagcagctatccttcccttacacgcctctacagcatcggtaaaagcgtccagggtcgtgatctttgggtgcttgagatttttgccacgccgggttctcatgtcccgggggttccggagttcaaatatgtggcaaacatgcatggcaacgaggtggtgggcaaggaattgcttctaatcctcaccaaatatatgctggaacgctatggcaatgatgacaggattaccaagctggtgaatggcacccgtatgcattttttgtacagcatgaaccccgatgggtatgagatctccatcgagggcgacagaaccggcggagttggaagagcgaatgcccatggaattgatttgaacagaaacttccccgatcaatatggcacggaccggttcaataaggtgacagagccagaggtggctgccgtcatgaactggacactgtcgctgccgtttgttttgtccgccaatctccatgggggctccttggtggccaactaccccttcgacgataacgaaaatgattttaatgatccgtttatgagactccgcaattctagtatcaatggccgcaagccaaatcccaccgaggataatgctcttttcaaacacctcgccgggatttattcaaacgcacaccccactatgtacctgggccagccatgtgagctcttccagaatgaattcttccctgatggcattacgaatggtgctcaatggtatagtgttactgggggaatgcaggactggaactatgtgcgggctggatgcctggagctaaccatcgaaatgggttgcgataagtttcccaaggccgccgagctttcgcgatactgggaggatcatcgcgagcctctgctacagtttatcgagcaagtgcattgcggcattcatggatttgtgcatagcaccattggtacgccgattgcgggagctgttgttcgtttggatggagccaatcattcgacctacagtcaagtcttcggtgactattggaagctagcgctgcctggtcgacacaatctcactgtgttgggggacaactatgcgccactacgaatggaagttgaagtacccgacgtccaccccttcgaaatgcgaatggatatcaccctcatgccagacgatccccagcattgggcatccgccaatgactttaggattattgaaaacgtagtcaacacaaggtatcacactaaccctcaagttcgcgcacgcctggcggagctggagaaccaaaatggacagattgccagctttggatatgccgattctgaatttggcacaatcttcaattacctcaaaatgacatctgatgtgagtgtgtgattatgtcgggaactcgtattagcttagctcccactcatttgattcttttgcagattggcgagcccgaggaacacaagtacaagctgttggtggtcagttccctatacgatacaacggctcctctgggaagggaaattttgctcaacctgatacgacacttggtcgaaggatttaagctgcaggacacgtctgtagtcgagttgcttaaacgaagtgttatctacttcctgccgcagactagcaagttccaaaatgtctttgacatgtacaacagcaagtgagtttgggtggactcgaaacattagtgcttagaatcttatttgttctctgttaatccacaacagcacctccatttgcgacccagtcctgggggatgagttagcagagcgcattcttggcccggagacagaccaggccaaggacgtattcctgcaatttttgcgtagcgaacgctttgatttgatgcttacctttggagcaggcaactccgacttgaactatccgaaaggggactcggtgctagtgaagtttgcccacagaatgcagcgaacggagttcaactactcgcccctgcagtgccctccatcggccacgagacagctccaccgggagaccaccgagagattgaccaatatgatgtaccgcatatacaatttgcccgtttacaccttgggcatttcctgctgccgcatgccgcaccaaaagaaaatcgcttccgtttggcgcaaaaacatcgataagattaagaactttttggctctagtgaaaaccggagtaagtggcttggtgcagaacgataaaggacaaccattgagggaggcctatgtccgattgttggagcacgatagaatcattaatgttaccaagaatgtggcgagattccagttgatgctgccccatggtctttatggcttggaggtaactgctcccaactacgagtcgcaaatgattaaggtggacgtagaagatggtcgagtcacggaattgggcattatacgcatgcatccattcacgttgattcgtggcgttgtcctggagctgccaaataacgataacagagccaccactagcattgcaggagtggtgctggatgagagcaaccacccagtgcggaacgccaaggtctcggtggtggggcagactcaattgagaaactttacaggcagcatgggacagtatcgtatatcggcggtacccttaggcaccatcactctaaaagtagaggcaccgcggcatctggaggccacccgacaaatgcacctgattcagggcggcttggccacagagaacgtggtctttcacctaaaagttaacgagcatgtctttggattgcctcgctttttgttcattttgtgcgccagcgttctgatcattgttggtgtcatcgtctgtgtgctatgtgcccagttttggttctatcgacgccatcggggggataagccttattataacttctcactgctgccgcagaggggtaaggagcagtttggccttgaggacgatgatgggggtgatgatggggaaacggagctctttcgatctcccatcaaacgtgagttgagccaaagggcacacttagtaaacaatcaaactaattattccttcattattcaggcggcatgaccatacagccgtactttgatgaggagcagctggagcggatcctgcacacggatgacgatgacgacgacggaccgcacatggagccagaacttgatgtggctgacgatagcgaagacgacatagtgatgttgcataacaacgggaacaagagacggcactagatgttctgatagatgttcccaatcaaacacaatctcgagtgacacaaccaccagggatcacctaatccccgatcgactttaaccacacacaacataactgtgattcaaaacgttttcaagagaaaccaacgctctccttttttgttatttttgtgtaatatctacccttaaaaggtgaaacactttatttttgagttttagtgttactgagcttgcacctagaatgcatcacaatcgtcagctttaaatagaaaatcctactacccactcggcaaatctctcgttcatgaccgtttatatagagatatacatttttatgttcagccaaaagaactgtatgcgtaaatgtaacttaaactaaagactgagagcctcataattctagcaaaaaaaaaaccataacaatttgtgaaaaaatattaaatctaatctagctaaaaagaaaccgaaaatcacagccaacaacagcagaagattgagtttgttttaatgaaaaaattaactaacaatgaatcaaaaacaatgtcaatattaaattatactaatttattaagcattgtcttcagaaagctaaattacttagcagctcattatacagaaaattgattcttaaagattaattttaagcttactgttttacaatttattaaaccatatttagtagcttttatcggaaattgaatggttactcccatgaactctaaccctctgtatgctgaaatcaggctttctaaaaatgattttaaatgctggaaaaaaatgtgcaagatcataacaaaaacagttaacagcttttgtaatattttgaatatgcccaacatataaaattcaaacgtaaa

SEQ ID NO: 27911 - DNA, 4352 bp, DROSOPHILA
aaatagttcattcattcagcatccactttctgttgaaagtggcgcgcctgcgttttgtgtcttaatcatcgcattgctgcctgcctacgtgtacagaaactgcgagcgctccgggagagtccccgagaatccccaaaatgttgtttttctgcctagccttgatcatcggctgcgcagtcggagaatacagcgaagtccgggtcatccaggaagaggacaacttcctggagagtcctcactacctaaaaaacgaggaaataggagatcttttcagccagctagccaaggattaccccgacttggcgcagacctatacaataggcaaatccctggaggatcgacccatctacgccctagccttaagtgcacctaccggggagtccaagaatggagatctcctaaggccaatggttaaactggtggccaacatacaaggcgatgaagccgtgggtcgtcagatggttctctatatggccgaatacctggccacccactacgatggggacccgaaggtccaggcgctactaaatctcaccgaaatccacttcctgcccacctgtaaccccgatggattcgccaaagccaaggaaggcaactgcgagtcgctgcccaactatgtgggtcgtggcaatgcggccaacatcgatttgaatcgcgatttccccgatcgcctggagcagagccatgtccaccagttgcgcgcccagtctcgtcagccggaaacagcagccctggtaaattggatcgttagcaaaccgtttgtgctctccgccaatttccatggcggagctgttgtggccagctatccctatgacaactccttggctcacaatgagtgctgcgaggagagtttgactccggatgatcgggtcttcaagcagctggcccacacctattctgacaaccatccgattatgagaaagggcaacaattgcaacgatagcttctcgggaggtatcaccaacggagcccactggtatgagttgtccggtggaatgcaggactttaactatgcgtttagcaactgtttcgagctgaccatcgagttgtcgtgctgcaagtatccggcagcaagcactttgccccaggaatggcagcggaacaaggcatccctgctgcagctgctgcgccaggcacatatcggcatcaagggcctggtgaccgatgccagtggctttccaatagccgatgccaatgtctacgtggctggactagaggagaaacccatgcgcacttccaaacgtggcgaatactggaggcttttgaccccgggactctatagcgtgcacgcctccgcttttggttaccagaccagtgccccgcaacaggtccgggtgaccaacgataaccaggaggccttgcgcctggactttaagcttgcgcccgtcgagacgaactttgatggcaacttccggaaagtaaaggtcgagcgctctgagcctccacagaagctcaagaagcagttcaatgggttcttgaccccgactaaatacgaacaccacaactttacggcaatggagagctatctgagggcgattagcagcagctatccttcccttacacgcctctacagcatcggtaaaagcgtccagggtcgtgatctttgggtgcttgagatttttgccacgccgggttctcatgtcccgggggttccggagttcaaatatgtggcaaacatgcatggcaacgaggtggtgggcaaggaattgcttctaatcctcaccaaatatatgctggaacgctatggcaatgatgacaggattaccaagctggtgaatggcacccgtatgcattttttgtacagcatgaaccccgatgggtatgagatctccatcgagggcgacagaaccggcggagttggaagagcgaatgcccatggaattgatttgaacagaaacttccccgatcaatatggcacggaccggttcaataaggtgacagagccagaggtggctgccgtcatgaactggacactgtcgctgccgtttgttttgtccgccaatctccatgggggctccttggtggccaactaccccttcgacgataacgaaaatgattttaatgatccgtttatgagactccgcaattctagtatcaatggccgcaagccaaatcccaccgaggataatgctcttttcaaacacctcgccgggatttattcaaacgcacaccccactatgtacctgggccagccatgtgagctcttccagaatgaattcttccctgatggcattacgaatggtgctcaatggtatagtgttactgggggaatgcaggactggaactatgtgcgggctggatgcctggagctaaccatcgaaatgggttgcgataagtttcccaaggccgccgagctttcgcgatactgggaggatcatcgcgagcctctgctacagtttatcgagcaagtgcattgcggcattcatggatttgtgcatagcaccattggtacgccgattgcgggagctgttgttcgtttggatggagccaatcattcgacctacagtcaagtcttcggtgactattggaagctagcgctgcctggtcgacacaatctcactgtgttgggggacaactatgcgccactacgaatggaagttgaagtacccgacgtccaccccttcgaaatgcgaatggatatcaccctcatgccagacgatccccagcattgggcatccgccaatgactttaggattattgaaaacgtagtcaacacaaggtatcacactaaccctcaagttcgcgcacgcctggcggagctggagaaccaaaatggacagattgccagctttggatatgccgattctgaatttggcacaatcttcaattacctcaaaatgacatctgatattggcgagcccgaggaacacaagtacaagctgttggtggtcagttccctatacgatacaacggctcctctgggaagggaaattttgctcaacctgatacgacacttggtcgaaggatttaagctgcaggacacgtctgtagtcgagttgcttaaacgaagtgttatctacttcctgccgcagactagcaagttccaaaatgtctttgacatgtacaacagcaacacctccatttgcgacccagtcctgggggatgagttagcagagcgcattcttggcccggagacagaccaggccaaggacgtattcctgcaatttttgcgtagcgaacgctttgatttgatgcttacctttggagcaggcaactccgacttgaactatccgaaaggggactcggtgctagtgaagtttgcccacagaatgcagcgaacggagttcaactactcgcccctgcagtgccctccatcggccacgagacagctccaccgggagaccaccgagagattgaccaatatgatgtaccgcatatacaatttgcccgtttacaccttgggcatttcctgctgccgcatgccgcaccaaaagaaaatcgcttccgtttggcgcaaaaacatcgataagattaagaactttttggctctagtgaaaaccggagtaagtggcttggtgcagaacgataaaggacaaccattgagggaggcctatgtccgattgttggagcacgatagaatcattaatgttaccaagaatgtggcgagattccagttgatgctgccccatggtctttatggcttggaggtaactgctcccaactacgagtcgcaaatgattaaggtggacgtagaagatggtcgagtcacggaattgggcattatacgcatgcatccattcacgttgattcgtggcgttgtcctggagctgccaaataacgataacagagccaccactagcattgcaggagtggtgctggatgagagcaaccacccagtgcggaacgccaaggtctcggtggtggggcagactcaattgagaaactttacaggcagcatgggacagtatcgtatatcggcggtacccttaggcaccatcactctaaaagtagaggcaccgcggcatctggaggccacccgacaaatgcacctgattcagggcggcttggccacagagaacgtggtctttcacctaaaagttaacgagcatgtctttggattgcctcgctttttgttcattttgtgcgccagcgttctgatcattgttggtgtcatcgtctgtgtgctatgtgcccagttttggttctatcgacgccatcggggggataagccttattataacttctcactgctgccgcagaggggtaaggagcagtttggccttgaggacgatgatgggggtgatgatggggaaacggagctctttcgatctcccatcaaacgtgagttgagccaaagggcacacttagtaaacaatcaaactaattattccttcattattcaggcggcatga

SEQ ID NO: 27912 - protein, 1404 aa, DROSOPHILA
MLFFCLALIIGCAVGEYSEVRVIQEEDNFLESPHYLKNEEIGDLFSQLAKDYPDLAQTYTIGKSLEDRPIYALALSAPTGESKNGDLLRPMVKLVANIQGDEAVGRQMVLYMAEYLATHYDGDPKVQALLNLTEIHFLPTCNPDGFAKAKEGNCESLPNYVGRGNAANIDLNRDFPDRLEQSHVHQLRAQSRQPETAALVNWIVSKPFVLSANFHGGAVVASYPYDNSLAHNECCEESLTPDDRVFKQLAHTYSDNHPIMRKGNNCNDSFSGGITNGAHWYELSGGMQDFNYAFSNCFELTIELSCCKYPAASTLPQEWQRNKASLLQLLRQAHIGIKGLVTDASGFPIADANVYVAGLEEKPMRTSKRGEYWRLLTPGLYSVHASAFGYQTSAPQQVRVTNDNQEALRLDFKLAPVETNFDGNFRKVKVERSEPPQKLKKQFNGFLTPTKYEHHNFTAMESYLRAISSSYPSLTRLYSIGKSVQGRDLWVLEIFATPGSHVPGVPEFKYVANMHGNEVVGKELLLILTKYMLERYGNDDRITKLVNGTRMHFLYSMNPDGYEISIEGDRTGGVGRANAHGIDLNRNFPDQYGTDRFNKVTEPEVAAVMNWTLSLPFVLSANLHGGSLVANYPFDDNENDFNDPFMRLRNSSINGRKPNPTEDNALFKHLAGIYSNAHPTMYLGQPCELFQNEFFPDGITNGAQWYSVTGGMQDWNYVRAGCLELTIEMGCDKFPKAAELSRYWEDHREPLLQFIEQVHCGIHGFVHSTIGTPIAGAVVRLDGANHSTYSQVFGDYWKLALPGRHNLTVLGDNYAPLRMEVEVPDVHPFEMRMDITLMPDDPQHWASANDFRIIENVVNTRYHTNPQVRARLAELENQNGQIASFGYADSEFGTIFNYLKMTSDIGEPEEHKYKLLVVSSLYDTTAPLGREILLNLIRHLVEGFKLQDTSVVELLKRSVIYFLPQTSKFQNVFDMYNSNTSICDPVLGDELAERILGPETDQAKDVFLQFLRSERFDLMLTFGAGNSDLNYPKGDSVLVKFAHRMQRTEFNYSPLQCPPSATRQLHRETTERLTNMMYRIYNLPVYTLGISCCRMPHQKKIASVWRKNIDKIKNFLALVKTGVSGLVQNDKGQPLREAYVRLLEHDRIINVTKNVARFQLMLPHGLYGLEVTAPNYESQMIKVDVEDGRVTELGIIRMHPFTLIRGVVLELPNNDNRATTSIAGVVLDESNHPVRNAKVSVVGQTQLRNFTGSMGQYRISAVPLGTITLKVEAPRHLEATRQMHLIQGGLATENVVFHLKVNEHVFGLPRFLFILCASVLIIVGVIVCVLCAQFWFYRRHRGDKPYYNFSLLPQRGKEQFGLEDDDGGDDGETELFRSPIKRELSQRAHLVNNQTNYSFIIQAA

SEQ ID NO: 27913 - DNA, 9232 bp, DROSOPHILA
aactctatacttgtactaagcgcccatgaacacttcatccactaacatagctactaatcctcatcctagtggaggatgcagttggtccagacactctgttatttgttttatccatcctcgtacttgtctttgtcccatttagcactttcgttgcggataagaactttgtcagttattgattgtgtggccttaataagattataaaactaaatattataacgtacgactatacatatacggatacagatacagattcagacacagttagtacagatacagatatacatatacgcttttgtacctaatgaattgcttcttgtttccattgctaatcatctgcttttcgtgtgctaattttatacactagtacgtgcgatatcggccgtgcagatagattgctcagctcgcgagtcaagcctcttttggttgcacccacggcagacatttgtacatatactgtctgattgtaagcctcgtgtaatacctccattaacaccactcccccaccacccatccatcgaaccccgaatccatgactcaattcactgctcacatgtccatgcccatgccttaacgtgtcaaacattatcgaagccttaaagttatttaaaactacgaaatttcaataaaaacaaataagaacgctatcatttaatattgttttcttttgattcctgatgtagtccaaccatgagatcgttgtagaattccttggtttttgtctgcaactatgcccaattaaaaacaaatagttttaatgaattggcatacttttaggaagtctcttgacaaaaaaaaaaatactgagtaaaagtactgcgcttcatttcttcaatggcaatgtagcaatctaacatgttaggagattggggtgcaggactgccgtgtttctaaccagaagcatctccaaactccagaatggaatcacagactccgaaaagtatgctactgatggtaatttcaatgggtaagtaacaaaagcaggccgtttggtttatttgaatgtatttttattcatttccgtttcggtataatttctagtttgttctcttcgtctttagtactagttggtttagcaattgtttaaattaccataaattatttaagttttatgttacgtagtcgtataatgtagatttataatttaaaaattcgcatgggaaagaaagtcgaaagtcatttaactggcagccactcctttctatcgttccgttccttcgctaattactttcctagagctaaataaaaacaaaataataatcgcaattgtaataatgaaccgtaaacttagaaaaacaaataatagcaataattcaaaacaaaagttaaagctggaatcgctgcgttctactcgtaatcgtaatcgtatcgtaaataagagtacacgtatatctagagatgaaagagtgcctaggttagcattgcatcaactgtacagtatggcttatacgcgtataagtcgccgccctcctccacgccagcaaacgattagattatgtttataataatgcggggagcagactccgcgcggagatatcaagtgtatttgttttgttttgcgtggttatgtcgtagtcgataattaaatggataaataacaaaaatgactgtaggagcgttttcctcactctggctttgtgggttgagtggcctggatccaggatcaggatgtctcacctatgtatgtacatacacgaaatcgatatctatgcgaattggttacgatcgtacacattttgcttatggttaacgcgtggataatagacatcatatcatatcatatcatatcatatatctcatattacatgttcgagtgttctgattaaaagcggcctcttttctctgtgtacatagggaagctacaactttgctttagaatatagtataatatgtgcacatgtacggtatgtaaatatgtaatgtattgcatgttgacatctagatttgctcaaattgaatcgaatgcaatgatgagttcttgagtttctcgttcctcgttaacatagccaatgcggtaattaagcgttaatttagttaattcaattatataaaagtacaaaaaggtcctttggccgtggctatacgtacgggtcgcgttgaaccaaccgatctatatacacacgctggtctgatctaatccaaaactgagtccataattaaatatccaaaccgaactatattgaactacacgtcgcgctgagctgagctgcctacaagttagccttggtatatctttgtgttgcatatgtgtgttgttgaatacgggtaatatgaatgctgagatttctctgctccagtcctggacctgcttacgtgccattggccttcggcagcgatcgcaccagatacagcttttcgccctgcttattcgtgtagatgggcgctctttggtagtgatcgaccagttggtccagcgagtggaacttcctctgcccaatgcagtacatgttctgctccacgtgcacgcggaagtgcttgttgcgccctggggcctttaacgaaaccgaatagtctcccatctgcaagaaaggatgaattcgtttatacactctcaaagaattcgggcggaactatgttatggcacttcaattgcgaattccacttacgttagtctcactgtctctgatgaggaagtcgccatcgtgcccgtggccgttgagcaccgtgtcgcactggctgcgggtgatggctccataataccacgacttgcccgccagatttggccgctcgattggctggccggaagattgcgccgccggcttattaccctcattgcgccgctccatggagtcgtttcctccgccaccacctgcgccgccattacttcctcctccatttccgtttcctgcactggcactcgcattacgatagggcgtggccaggtagtcgttcaactcttggagataattgcgtggaactaaaccgacttggccctgattgttgcgagctttgtaccagtccggatcggaggcgggccgatccacgatctccaagcgatcgcccttctcgaacgagagctcctggtcgttgtttgacgtgaagctgtacagcgcgacctatatatttgaaaatagttgttattagccaataatgacaacctctcatagatgatgtgaatgtttattttgagaacacgtccagttactcaccacaatatcaagcacgttctcggccattgcgtaggtgtggatctcgccgtcgttatcacaatcctccgttgtgtagttgctggggaaccagccgacggaattgccgctctgtccacgccaccatccatcgttggacttctccaggatgaggattcgtgtgcccttggtcagcgaaagttcatcgggctgctgggcctgatagttatacttgaccacagccgttccgatggcctctgcgggatctgggggaagtcggcgcgacatggttggactctcgacctgtcgcgaaggcgaacaattaggcagtgtcttcgatccggagccctttttcaccttcttcttaatgctgcacagaaatcgtaaatcaaaatattcacgatcagtattgggatgaagttttatggttagatttcattggcggtttaaagtgggttagactagccctagttggtttgggtgttagtggatctttagtttttaggggcaagtggggctcgacagacaacgaaatcaaaacgaatttgttgttttgaaatacaaaatacaaaagccgaaagcagttataagttaaattacgatagccaaagcaaaaggtggaggcgggtatttgaacgcgatagagatacagatacatctacggatacggatacagatacaggtatagagggcttaattctgctgaaatcagagcaagaagaacgcttaggtttagtcgggccaggaatctgacgcacctgtcgaagagcgagggcttctccttcttcacatagttgcttggcacgtagccggactggttgcgactgttctggacgcgccaccagtgcttggagtcgtccagcagcaggtagcgctcgttcttgcgcagatccagctcctgggcaccctgcgccgcatagtcgtacttggctaccacgtagcagacgtcgtcctgagatttgcctgcggagtgattaacaggaacaggttagaagagtaccaagtgcacacacagttagaaaagcaaaatgggccagtatgatagaaccacaaattcattagcatacaaatcctagatccttttactacacccaatgctcttctcgctgtgaggttattgtgttgcagttgctcaccgtgcttcatgttgcccgccattgattgggttccagcgttgccggcggcactgccactggaggagttgccgctaccgcttccgttggcgcttccgctgccgttgccgccgcagtcgagcgctggctggccgaaggtcacacttttgtgctgggcgctgcaggaggaggcggtggacagggtgcggtggtggtgcaactgctgttgctgggagagcgaagagtgccgctggtgatgggcaggtgagccgggaacgggcacgggcacctggggacggtactggtagatctgattctggttcaggttctgattctggttgagattcagattctggtgctgcggcagctgtggcggatgctgctgctgctgcggatactgctgcgaactggctgaggagtcggggatgttgcgcacaaaccgctgggggtgttccaacattccagactggctgctcctccgccgcggggggattcctgctcctccagctgggactgccctgatgctcctggtgatgctcctggaggcaagaggcggtggctcagtgttggtggacttggagttggggttggagttgatgaacaacaagtctttgatggtttggttatgtgttgcagttgctcgctggcactctaagcttgctgcaaatcgcctctagccaatgcataattgctgtgggcgtggtttcagggggcgaatgggcgtgagcgtgggcggaagcgtaggcgtggcaaagtaaacataagcaacgcaataacataagcaacgaacgaagaaagaaagaaaaagagagcaaatgatatatgcaaattaggcttaattgtttcgcactgaagaagctaaagagcgtaaaaatgattagcttaaaaaatacaatgcaagtactcaaactcgaaataccaaataggaaatcaactcaaaattagccgagagatgaatgtttgtttttggggtcagcgagccggcgatgaagatgaatgagtgaagtgtttgtgttgtgatgatcatgatgatgataatatgagcgggagatggatatgggggctgagggatctggccattccagttgtggggcaattaaaatctgtgcaagtgaaagttgcctccgactgactccactcaattgaatccaattgccaggcgagcgaataagtggccatcgggtattgatttgttcaacggggcagcctcaccgaggctggagaaccagagactcaaaatccgggccatttcaggccaagaaagacacagaaatcaactgagacattcgaccgcaatgagtcacgaacgtgaatggtcgggggtattgggaaattggtttcttaaccgagatttaccgagtgacataaggcagttagcgggcggcacagaaggttatttcggccagagatctctagagaggcttcccgagttcgttggccaggttggcgagccaacaaaatcaaagtcaatgtcatagccgagggccatctttggataattaaaaatcaataagtgtgggccacgttgagaaaacgctctactcggtctttgactctaggccaatcttggtttcgcttttcaatgactgttaggtcatacacgagaggctgagtcagctgaaagtgttttcgagagctctaatgccattcaattctggcatttcggtgcaatatctattagcaactgacccatacgtatataataagaaatgcaggcaatgcataaatttgttttgccggtaaacttctaatcgtgcttcctgttcgaattttggccataataatctccatgtgataacgagtgtttttgtttactttaccatcgattagtcaaaggtttttgcgttagctagagatacggagaagtacctgtttaaccgaagcattggtcgcaaagtgattcactgttgtgcgaattgtctgtgtgttttccctattttttgagaggagaaagcgggagtgaaaccgtaaccgaacccagatagaaacggagaaagaacccgaaaaagattatatttatgcaaatgctggagtgataagggggcggttcagttcggttcgcttggggacttggtaaacatgaaacgcctggctggctggctggctgccaatgaactgaaatgcaccaccgttggattcggatcggtgtttggatttctttggcttggtgattgttttgttattgtttgcgcttgcataagcccaacagccgagacattgacattacactgctgataaaatccgaagaaatcggaaggaacttgctgataagttcgttagcgcggagaaattgtcaaaaaatatattatgaactatgatttgataagattccctactgctactgcaataaatgaatatatatttttaaagaattctttgtggtatgatttcttagcttcccgtatgacaaacatttatgtttttttccggtgcactcgttcattgttttcctgacagcagttcgtcttttcgctgagagaaagaaagagttgcacgtgcttgggggacaagcccacaagtttatgaggcggaaagtttgtttccccgtgctgtgtctgtgtattggttgaagatcggttccagacgagggagtatagtcattggtccccaagaaaagccatcacgaacgaattggtggccccgaaacgggagcatttgggtctataacattgagttacgacttcggtggatggatggggcagccatggaggaactgaaagtggggcactcttatctggatctcggggcgtgggaggcaaagggcagcctgtttacataagatcactcattcagggagctgggagtccactcccgcccgggttgattaagtagatgcttttgctggggaatgggattcgaatggggtttcggtttcggttttgttttttgtattttgtattttttttttggcttttgttgccgagggagtttgcgacatttgccggccgtttcgtttagagatgctgcgcaaaatctctgcgaggtggtggctttttggcagcgagagggtggacttctcgtcctgcaaaggatggcaggactcgttcccagtgttgttaagagtacaagcttttgtacctggcacaggcttttgaaaaacacaagtacctactatagtagtatttgagcaatgaacatattatagatttatggtaagtgaagcatcttcacgatttatctgtttcatctatctagacaagggaaagggtacatatgtacacacatatatatcggtggcacagtttgccgtaaacacgaccatggttacccaaaaaaaggtgatggaaagcggagggctaagggttgcagcaccgcccactgggcgggtggtggaccgagccaaaggactacgcaccaccaggtgacgagggcgagataaagagagagagcgcaggtcaagagagagagagagagagccgagagagagagccgtgagagattcgaacaggagctaaaaaggagcagccgaatattttgtgtgtacctaccggagacgaagcggttggactggcaactcctatattcctcctggatctccttatcctggcactccttatccgtatccgtatccttatccggaaagtcggagtccgtatttctcggtcttaacccttggcaatcctcaggatttgggagtggaagacatgggataagacactgctcctggaactcctggaacgcactctatatcacttccactttccactgggctattgcactttacacacacttaaaacacaactttaattataatacacctaggcgtgagtgtgtgtgtgtgagtggggcgggggtgagcctgtgtgtgtgtacatatgctgctgccgcgattgaaaaacacacaaatcctgacaaataaacgcttttccacgcttctgattaccgcacacgttaactgcgttaagtggcaaattgtttgcacaattttgcagcgctctcttgcggttaactaattaaattttaatgattttgccggagccgtttctttcacgtcgcccatccgatttcgatgtgcggaaggcgatagcgattgaccacgaccagggctgtcaggtggcgtatcagcggtttttcttagcgaactatcgataagcacgttgcgcgctgtgcagcacttgtccggtcatcgggtctatcgatatcgggtggcgtttttgttatgattttggattacatggttggtttaacccgaaataccatgctgaaaactcggggtattgtgcttggcatcagcaggtcgtacaccgccaaggcgaagaggggtgtgctggcgcaggacaagtcgaagatcaaggagtactcaccgaagacgacggacagccatgagcaccgagtttacgtgtggggctttcaggaaaccggcgctctcggtctccagaccaacgtgaagaaggccaaggaacgctacacggagatggtgcaccatcccacccgcttgcagttctccaacaacaacgaaatcacggatgtggccgccggctacgggttcacggtctacgccgtgaatagagatgacggagagacgctctttggcagcggtttgaacaccgactcccaactgggtttccaggtgaagggaaatcccaatgatccggccaaccttgacgtgatcatttatcctacagccattaaactgccgagagttcagggagaaacagacgaggacatgcgtgtgaagagcatgtcggcgggtagagctcacctggtggttctgacccaaaacggaaccattttcaccctgggaaacaattcgtacggccaatgtggccgctccatcatagaggaggagcggtacagcaagagtgccctgatccacaggatatcgcaggaagatatatgcggcaaggaggatgaggtggtccaggtggagtgcggccaggaccacagcatgtttcttaccaaaaagggacgcatttacacatgtggctggggtgcggatggtcaaacaggtcagggaaactaccacaccgccgggcagataaccctgattggagg

SEQ ID NO: 27914 - DNA, 3487 bp, DROSOPHILA
cgacgtgaaagaaacggctccggcaaaatcattaaaatttaattagttaaccgcaagagagcgctgcaaaattgtgcaaacaatttgccacttaacgcagttaacgtgtgcggtaatcagaagcgtggaaaagcgtttatttgtcaggatttgtgtgtttttcaatcgcggcagcagcatatgtgtattataattaaagttgtgttttaagtgtgtgtaaagtgcaatagcccagtggaaagtggaagtgatatagagtgcgttccaggagttccaggagcagtgtcttatcccatgtcttccactcccaaatcctgaggattgccaagggttaagaccgagaaatacggactccgactttccggataaggatacggatacggataaggagtgccaggataaggagatccaggaggaatataggagttgccagtccaaccgcttcgtctccggagcatcaccaggagcatcagggcagtcccagctggaggagcaggaatccccccgcggcggaggagcagccagtctggaatgttggaacacccccagcggtttgtgcgcaacatccccgactcctcagccagttcgcagcagtatccgcagcagcagcagcatccgccacagctgccgcagcaccagaatctgaatctcaaccagaatcagaacctgaaccagaatcagatctaccagtaccgtccccaggtgcccgtgcccgttcccggctcacctgcccatcaccagcggcactcttcgctctcccagcaacagcagttgcaccaccaccgcaccctgtccaccgcctcctcctgcagcgcccagcacaaaagtgtgaccttcggccagccagcgctcgactgcggcggcaacggcagcggaagcgccaacggaagcggtagcggcaactcctccagtggcagtgccgccggcaacgctggaacccaatcaatggcgggcaacatgaagcacggcaaatctcaggacgacgtctgctacgtggtagccaagtacgactatgcggcgcagggtgcccaggagctggatctgcgcaagaacgagcgctacctgctgctggacgactccaagcactggtggcgcgtccagaacagtcgcaaccagtccggctacgtgccaagcaactatgtgaagaaggagaagccctcgctcttcgacagcattaagaagaaggtgaaaaagggctccggatcgaagacactgcctaattgttcgccttcgcgacaggtcgagagtccaaccatgtcgcgccgacttcccccagatcccgcagaggccatcggaacggctgtggtcaagtataactatcaggcccagcagcccgatgaactttcgctgaccaagggcacacgaatcctcatcctggagaagtccaacgatggatggtggcgtggacagagcggcaattccgtcggctggttccccagcaactacacaacggaggattgtgataacgacggcgagatccacacctacgcaatggccgagaacgtgcttgatattgtggtcgcgctgtacagcttcacgtcaaacaacgaccaggagctctcgttcgagaagggcgatcgcttggagatcgtggatcggcccgcctccgatccggactggtacaaagctcgcaacaatcagggccaagtcggtttagttccacgcaattatctccaagagttgaacgactacctggccacgccctatcgtaatgcgagtgccagtgcaggaaacggaaatggaggaggaagtaatggcggcgcaggtggtggcggaggaaacgactccatggagcggcgcaatgagggtaataagccggcggcgcaatcttccggccagccaatcgagcggccaaatctggcgggcaagtcgtggtattatggagccatcacccgcagccagtgcgacacggtgctcaacggccacgggcacgatggcgacttcctcatcagagacagtgagactaacatgggagactattcggtttcgttaaaggccccagggcgcaacaagcacttccgcgtgcacgtggagcagaacatgtactgcattgggcagaggaagttccactcgctggaccaactggtcgatcactaccaaagagcgcccatctacacgaataagcagggcgaaaagctgtatctggtgcgatcgctgccgaaggccaatggcacgtaagcaggtccaggactggagcagagaaatctcagcattcatattacccgtattcaacaacacacatatgcaacacaaagatataccaaggctaacttgtaggcagctcagctcagcgcgacgtgtagttcaatatagttcggtttggatatttaattatggactcagttttggattagatcagaccagcgtgtgtatatagatcggttggttcaacgcgacccgtacgtatagccacggccaaaggacctttttgtacttttatataattgaattaactaaattaacgcttaattaccgcattggctatgttaacgaggaacgagaaactcaagaactcatcattgcattcgattcaatttgagcaaatctagatgtcaacatgcaatacattacatatttacataccgtacatgtgcacatattatactatattctaaagcaaagttgtagcttccctatgtacacagagaaaagaggccgcttttaatcagaacactcgaacatgtaatatgagatatatgatatgatatgatatgatatgatgtctattatccacgcgttaaccataagcaaaatgtgtacgatcgtaaccaattcgcatagatatcgatttcgtgtatgtacatacataggtgagacatcctgatcctggatccaggccactcaacccacaaagccagagtgaggaaaacgctcctacagtcatttttgttatttatccatttaattatcgactacgacataaccacgcaaaacaaaacaaatacacttgatatctccgcgcggagtctgctccccgcattattataaacataatctaatcgtttgctggcgtggaggagggcggcgacttatacgcgtataagccatactgtacagttgatgcaatgctaacctaggcactctttcatctctagatatacgtgtactcttatttacgatacgattacgattacgagtagaacgcagcgattccagctttaacttttgttttgaattattgctattatttgtttttctaagtttacggttcattattacaattgcgattattattttgtttttatttagctctaggaaagtaattagcgaaggaacggaacgatagaaaggagtggctgccagttaaatgactttcgactttctttcccatgcgaatttttaaattataaatctacattatacgactacgtaacataaaacttaaataatttatggtaatttaaacaattgctaaaccaactagtactaaagacgaagagaacaaactagaaattataccgaaacggaaatgaataaaaatacattc

SEQ ID NO: 27915 - protein, 548 aa, DROSOPHILA; identical to SEQ ID NO: 7026

SEQ ID NO: 27916 - DNA, 2656 bp, DROSOPHILA
gctccttgtcgtaatgttgctcgcagtgggtgtactttttgttgatttccgtgtacttctggatgttctctgcgttcttctcctgctgctcgataagatcagttttcagttgggtcagctccagttccatatttgtcaacctgaaagaataagctcactgcaggcaggaactgtattgaagaaggaaggtcttacttttccttcaagctgatattttccgattttttcttcagcgagtccatggcgatggctctcattttcttgctgaccaccaagtctttcttcttgagattatttagcgattcgttgtactgctttatgaagctatgaattattattcccgtgtggggcgacagcttctgaatatctgcccataattctccctcgtttttgggagacttttttagactttttgttgaactgtctatggtggctgcaaaagtttggtcttcctgtgttttttccacagcctgagaagtttgcgcttcaatttttgattgctgaactctaggagccactagcggagttctttttttggatggcttttcgtttgatctttcgaaaagttgagtttttacatgatcctttttccaaacagttggaatttggctgtttttttcttgggcaactgtacctggttttggggctttcgagtgagctgcatccactaacggtgctcccgatcttttcttggcgcccgtcattttgccagctaagcagttgtattagcgcaactaatttataaaagaaataaatatatattgtacattacaaacgttttgtttagtttacctaaacttttaccaagtgcgtcctgcgttgaaaagcaacggtaaacattagctagagatgagcttgatgacctacagtatattgttgttcacaagaggtgtgtgtactgtctaaatactgacctcacggtattttctactgaacgcccctggttttgcgttgtcgccctggctacgataactatgttacaatttaataataattctattttggttgtcaacattcagtttttgctagctctatttagaaatttgagtgctgcaaggaatctaagtggcatcagaaatctgatcacgactacataatggcgggatctggagttgccaagcagatatttgccctcgatttcgagatctttggacgagtgcaaggtatgcaatgcatttttctgattcggcttgttaaacagcgtattaaattttgcaggtgtgttcttccgcaaagtaagtactgggaggcctatatatatatctggaaatcaacatttaacttatgtacatttttggcttagcacacgtcgcatgaggctaaaagattgggagttaggggctggtgcatgaatacccgggatgggaccgtcaagggacaactggaggctcctatgatgaatttaatggaaatgtaggtaccgctgcactccactaattcaatcatttaaccatcgcccactaatttgaaggaaacattggctggagaacaaccgaattcccaacgctaaggtctcaaaggctgaattttcgcaaatccaggaaatcgaggactatacgttcacttcctttgacataaaacattaaaaacgaattattagctctttcgttgtccatccaattccgaaacaaagtctaaataaattaccagggctgcaacttgcgtaagcaggcatatctgcattgctatcgactgagtcgataacattcgatagtatgaacataagaaatattacgtttcgcaaaactgaacccagtactgaagtacaacaataaataaataataaattatttaaaacaaggcggaaaattattccgagaatcgatagtcgctagtcgaaagtgcgcaccactccagtatctactcgatatattgctatcacagccgatagtttgcagctccctgccatagacactggtcatctcgctcgcacacacaacagtgggccgcgccaccgccataggcggcgcacgtgcaagagcgagacaaccagctgggcgacagcgcactttggtctggcacagaaacgagtacagcttcgatacacgtcgttttgccaaaagcgtagcagagcagtctaagcgatgaaaaaaataaatgaggaaaaaagtccgtgaagcgaaaaccgtaattcctacagtgcgagtcacgccattgtgtttgcaaaaaatatttgccaattgtgctacgggcaatttttcggaacggccgaattgtgcgtataatgaaaaaaaatactacttaatttttaagcaatttacaaattcttgcgtgctgcctgcctgctgtcggtgtgttcttgcttgcatgtgttagtgagtacgattactttcgcgctgaaaacctttttccactgccctttcgctggaatctgggcgaatatagataggacacaaagcacatataactgatttttactgcagaattgatcgagacatgtggaatacaataaatgagattgtgtaaataactgaatatagtggcgcatacagttgcacgtgtgtgtgtgctagcatgtgcgtgtgtgtgtgtaaaggcgcgagtttccgtttgcctaggctaattgtagtggaaaaactcaataaacggaattacataaaaacatggtggcatgatcggcagtttcccgccggcagaagatgcccaatcttggaaa

SEQ ID NO: 27917 - DNA, 475 bp, DROSOPHILA
tttggttgtcaacattcagtttttgctagctctatttagaaatttgagtgctgcaaggaatctaagtggcatcagaaatctgatcacgactacataatggcgggatctggagttgccaagcagatatttgccctcgatttcgagatctttggacgagtgcaaggtgtgttcttccgcaaacacacgtcgcatgaggctaaaagattgggagttaggggctggtgcatgaatacccgggatgggaccgtcaagggacaactggaggctcctatgatgaatttaatggaaatgaaacattggctggagaacaaccgaattcccaacgctaaggtctcaaaggctgaattttcgcaaatccaggaaatcgaggactatacgttcacttcctttgacataaaacattaaaaacgaattattagctctttcgttgtccatccaattccgaaacaaagtctaaataaattaccagggctgc

SEQ ID NO: 27918 - protein, 102 aa, DROSOPHILA
MAGSGVAKQIFALDFEIFGRVQGVFFRKHTSHEAKRLGVRGWCMNTRDGTVKGQLEAPMMNLMEMKHWLENNRIPNAKVSKAEFSQIQEIEDYTFTSFDIKH

SEQ ID NO: 27919 - DNA, 2820 bp, DROSOPHILA
ccaatccgtaaatccacccattccgaccttacttgtctcgccaaaattaatttgcgatgaacacgtgaatgcgccatttgatttagctttgattggttgcttgcccttatatagatcgttaagatagtttggctatctataagtattctcatttagtttaaatgtagcttaacaaacatgccacgaggtaattggaactctaagacaaaatcacataccaaatagatttcatcgccattgataatgatgtacagcttttttagcgttgaaagctttccctatttcttttgttatttcgtcaaaaaattgcagctatcgttgaaacgaaacaatcctcgacttttatatgtgaactgacctaaacctaacattctacatccagataaatgaaatttatgcttatgattgttactgttattccaactactaaactattactattattagcggtagcatttttgtggaagcgcctagagcaagtcgtcgccgaagcttttataatttctttttgcgtcatcaggatgctgtcgatgacagcttaacctcaccttcagtacatagaaaaagtaattattgacaagtgcctattcacccacccactttccattcgacctaacaacccaccaccaacaaccatcacttattagactattcacgactcttgcgctatttgtatataatcctgtacaaaggcaccgcccgaaaggcctgcacctcgaaccacatctgcaccactctctgaatctcagttagtatcaacctcactcttgtggcttatctccatccagatgcattccatcgaaaacagtattttgcatttctagttataagcttatgttcttgagtcatcaactgttactctctgcgatctctttatatctatatctatatttattcgtctatctgacctacctgtctgtccacacaaccttcgtacttgtgcgttgtgccaccacgattgcctgacactaatgcgtacatttcacccacgacagccgcaatgaacaacacgaccaacaccacctcaaactccgcctccacctccggcacggcctcctccaccgccaccgccccagccactgggtgtggcccagcagccacctccgcctccgacagcgaccgacaccaggcggtggggggtgggtcggctccatcacgtaagcgcgcctctagtttcattcgcaagaaaccgcccctagaaagaggtttgtcagcacaaagcgctttaagagtaaacaagaacgcttttgtctgtatgtgtgaattgtactttctatctttcgaccgatcagcccactaaagtccccgtttgccccctttcagctgaggcgtcagcccccgaggtgatcgtcaccaggccgtcgccagagcaacagacgcatccgcactcgctgagcctgcgtccggacaacgcaactctggtccacgtactggtacaccgcgagagcgaagagtataaggaggaggatgagagcagcccgtccgtgagcggcaacggaaatggttttggtgtcggcctggacatgcttagcaagcagccgccgcctcagatacgcatcacaacgggctcggtagagagctcaatggacacgtgcgcgatgcccacagttcagatcatggtggacagtccgaaggacccgccacgaggcgatttcagctcagcaccgattgatgatgtgggtgcgccaatcgatgtgaatgtccagggcgatacttcgcaggtgttttacgactataatcctgagaaagccaccgatgaccaagggaatggacaggacgagacagcgcagttcgaatcacttccagacagacagagatgacctccggtcaacactcctctgcgggattcggagaaacgctccagccgtggcagccgcagtagtagcagcagcaccagcagcatcaggagctgctcgtcctcatcatcgtcgtcggcggcatcggcagccgcaccctcggcgcggcgtacaagctgacaaccttcggtctgagtgcgtattccttgccgattcctgagtgcatttgtgtcagaactcgtagtttcttaggcttaggcatggggcccgcctctttgttatcatagtcgataacctatatagttatatattaatcgctttatacgatatacatatatacacatatacagatacgaagctattcaaatttatacatgcaatatcagtttaaggacgaaatcaatattaactatgttaacaagaacgtgcattaaaccgttgtagtactcgaatctaatcaaaaatccgaatgagtcggaatcgccatcatcatggttaatgtcacaatcagaattgaggaagagcaaatttgtcggtagtttactgcccgatttagttgtagtcagaatgcctgacccacaagtgaggcaatgaaggcaaggcacggccttctattctcctgccgtgggccaactttctgccacattttcgaaggttgtttttgaactatacaatacgtagaggtttgcatcacatgcatacattacatgtgtaactaactatcgcggttagatctaggctcataactgtagtgtttgtttcgtaattatcgacttgcatatacggaaggtatatgtgaatagtatctaaatacattttgtacatatgccaaaggaagtattttaaattaatgagctaatactatagttacagactatgacgttagttagatacaatttattgaagtaattataaaggtttttcgttacgatagcgcaaagattgccgattacaaatgcgattacgatagcgaatattatccattaccgattgttcgaagtacaaaagcgaagtattagtagat

SEQ ID NO: 27920 - DNA, 750 bp, DROSOPHILA
atgaacaacacgaccaacaccacctcaaactccgcctccacctccggcacggcctcctccaccgccaccgccccagccactgggtgtggcccagcagccacctccgcctccgacagcgaccgacaccaggcggtggggggtgggtcggctccatcacgtaagcgcgcctctagtttcattcgcaagaaaccgcccctagaaagaggtttgtcagcacaaagcgctttaagagtaaacaagaacgcttttgtctctgaggcgtcagcccccgaggtgatcgtcaccaggccgtcgccagagcaacagacgcatccgcactcgctgagcctgcgtccggacaacgcaactctggtccacgtactggtacaccgcgagagcgaagagtataaggaggaggatgagagcagcccgtccgtgagcggcaacggaaatggttttggtgtcggcctggacatgcttagcaagcagccgccgcctcagatacgcatcacaacgggctcggtagagagctcaatggacacgtgcgcgatgcccacagttcagatcatggtggacagtccgaaggacccgccacgaggcgatttcagctcagcaccgattgatgatgtgggtgcgccaatcgatgtgaatgtccagggcgatacttcgcaggtgttttacgactataatcctgagaaagccaccgatgaccaagggaatggacaggacgagacagcgcagttcgaatcacttccagacagacagagatga

SEQ ID NO: 27921 - protein, 249 aa, DROSOPHILA
MNNTTNTTSNSASTSGTASSTATAPATGCGPAATSASDSDRHQAVGGGSAPSRKRASSFIRKKPPLERGLSAQSALRVNKNAFVSEASAPEVIVTRPSPEQQTHPHSLSLRPDNATLVHVLVHRESEEYKEEDESSPSVSGNGNGFGVGLDMLSKQPPPQIRITTGSVESSMDTCAMPTVQIMVDSPKDPPRGDFSSAPIDDVGAPIDVNVQGDTSQVFYDYNPEKATDDQGNGQDETAQFESLPDRQR

SEQ ID NO: 27922 - DNA, 5356 bp, DROSOPHILA
tatgtttagggtcctgagcgcatcgctgtcggttccgttttcggtggtgccccaaccagttccggttagtatctgaatattgtcaatatacttcttccaattagaattcacgaaaatgcagatgggcctaatgttttctagtaaagcatacaaaaaggatgtagttggatttgccttttgtgtggtaaattgaagttatattataaaacccacctctgtaaaccactggcttttctagtcgcagaatggcgatgtcgttccataacatttggttgtgaaatagccgtggcttgaaaccctcgtccactttgtgctttactcgaacatggcagtaacttccaaagcacttggcatttttttcacttcttatgtactcccccagacgagcaaatctgaaaaaaagtatatattgtaaaatttctcattggatggatgtcacttataatgtctggttcggttgaaggcaatgcgctgcagtcagtaccagtcctgcaatgacattttataatataaacgtatatatacatataaaacaatttctgtacgaactgtttgtgatcaaagttccgccgcacacgaaatcaccatcagttgatttaagaaataccatccacggactggagttatatttagctattgtgccgttaacgacccttactgcactctttgatttagttataattccacaattcgggtcgagaaactgacaatatcctggaagtggtagaataaatagcatagccacaacggctaatgctatgtacttcataactgcggtcttaattgctcgaatgtcgggtgatcggtagaagatctctgctttataacgccgccaatgggcttatcaagaattgattcccggaaatttgtaagtataagtaaattttcataataggtcgagcaatacgcaagataattgtgattaagtaatcatttcttgtttattttaacttttaattaatatgtacatatgtatgtacttaaaatattctaataacttttaccatgttgaaatataaaagtatcctccaggataccactcgggactatagttccaatcccaatgcgatccatgattggtgtcataatcatagtcttggaaagtctgttttggaatccgagtagtatgccaccatgtaggaggacgggtggtcgttgggggtttctttgggatcggtagcgtttgacccttgccgtacatcctccacactcgaaggataaattcggcatggctcagaacgtcagtgaaaacacttgccttttgacaatttctgttcgtatagctggctataccgacttgcacaaagcgctgtgtgtttttatgcgtgatcactgctcccaatggaccaccggaatcgccattgcagagattactatcccagtttcctgcgcagaattggttaccagcgatggtctggccgatgaacttagcgcacacatctggtggttggcggcgaatgtccagtgtctgaagagcatcactgtcactttccatttgggtctttccccatccagtagcagtgagcaaatcgattttgtctaaatagtgcctccacctatggtcccacacaacgcaaatgggcctgatgttgtctacgaaaataatgttatataaaatgattttattcccaaaaaccgaagttgctacctctgtacacaacactcttggacagccgcaaaatggcaatgtcgttagcatgtgtatttggatcatacaatttgtgcttgaagcccgcatctaccatgtgctcctctcgaaaattgcagtaatatccggtgcattcttcactcctcgttctttcatactcccccagcctggctactctattagggtatgcattttagagttcttgaaagtctatctgtattgtttttaaagctacttacaaatgctgatttgcaatgaagcaatgagctgcagttagtactagttctattgaaatgtaccaagattaaatacagttcttagaaatttacaacaaacgccattaaagtctaatgaatacgcactgtccgtgattagagatccgccgcacacaaacatatctgtagttgagtgcagaaaaaccatccaggggctcgagttatatttagctgtatggccattgattatgcgatacgcagtcctcgattgtgttcgaattccgcaggctggatcgagaaattgactgcatccggagtgtagaagctggaacatcagaataattccaacgaatgttggaactccgattaatgcggtgtgcattgcgcgagtgcttgacgattgattctgaggctcggctttataatccagcttatcaggcgagtggtactcgtatctaaaataatattaaagttcttcaatcattttaggaaaagtgtaaagaagttccactttaagcagttataaattgcattaaaaactactatataaagtatacacacatttattattgatcttatcaacagtcatgtcgatatagccatgttcgtctgaccatccatccagtgctcttttttttatagcaggtacttggaaccacaaaaaaatatcgaagtttgttatatttcaatcagaccgttttcatattcggtatacatcggtgtttttttttctaatatataattagtgtaagggtatataatcttcgagttgccgaacttagttttctttcatgttattattgttcacattgcttaccatttacagcaaaataacattggtatctagctaaacacttttatgttcgaggttataattgaaaagcatgaaaggggaaaaacacaaaatacaaataaaaattttgctaactcgaaatggaaagcaggaaattcgttcacaaacggaaatgtgcatttaatgggatgcaatttctagctgaagttcgaagcaattcagaaattggcgtagattcgttttaactgcctcgttagcgaaggcagcgaaatatctacgaaagaatgaaaacgaaaccgctttccttcccaaacacagtcgcacctcccgcagtcatcatcatcatcggactacccatagatttatcgtttttattcgctgaaaatcacattaggtgagggtaaaaccaagaggagcgaataaaaattggccggcatcagagaacggagagtgcatagctccaccactcgaactctggccaaacaatccccaatacaagataccccagaatagagatggctcatactgggtgttcattaaaatagtttaacaaaaccccccttttaaagatgaaatagaaagtataaacaggaagtacaacgtaattgtaaataacattaatatttatttttgaatacttaatacttttgattatttaactggagtgccaattatattactaccctgtttttcagagagatgcactttgcgtctgccgtaaaatcatttggatagagagcagaggtaaaacgtgatgcagggggcggagttgaaagaaaaaggtggtatattgggtggaaaaggggggcgcttagcgaagacaacggctaaaataaaaagtgtttgaaattatagctttcaggcggcttacccgctcctttcatctggcgttcaattccatccaaccgcgcgaagaaagtgcaggactctgttgactaagtggggcaagtgggagaatttgtgggtgggttgcacatgaaatatgagttaagaaaattgatgacaaacatttcaacgtttattgcataaaattaccataaaatattgcatgcaagtagtttgtgtctctccctttctctgtatactttcacgaactgtgctcgttataaaaattttccctttgatttgaaaggaggtaaacgccagcatgattgcaatatgagttggcgtagtagttgagaattaagctaagattaaagtggatttttttttattacaattgagggcgaataactttaatttatatatatcgatactattatatataacaccaaggactttcccatcttatcggtatctctggatctgctagaaagctatctataaatactagttaatatataaataagtaaagcactttacactccaattttgtacttcccaaccatatcatcgctagaatgcggccattgttccgtcttgggcataattaaaattgatgaagagaacgttgggatggaatgcagcacttgctgccttccacaactacattcttcgcagctgcctttgggtctctgcgctggccatgtcaaatttatcactataccttcttcggtggccactataaattgttgccttttgatacttttgcctttgaagatgctggctttggcatcctttttgcgtcgctcctctgggcaacccgttcttctttgccatcgctttatgttttgagtcctggacagcgccgcaggcaacattatttgacgtaaccaaagtaattttaattttcaccgcagcactcgcaaaacatcagcgtcgggccgccccaggacgcaaaagagggcccaggaccaccaagtggcactacaatgcactctgtggagttgtgggtgggtcggcggtgggtgaagctggtgcagtggaactggatgccagtggattgggagtctggttacttaagcatattgcaaatagactgcataatgagctacgctttgcttttcaagacactcaggtggaaatcgagtgaacgaaggctaacgagaaatggctgaaaaagcattgaaccaaaagatggctggggctcgtttataaaagtgagttttttacgaaagttacctgagagggaaaatgagatgaaacgaaaattataaacgtgccctttttattttctttatcagttaatgtaatcgataatgttttatgtgtaatctaaatacttttacatcatacttttctcttagtagataaaatgtttagattttaggccgcttactattcaagaaaagtcctttaaaaaattaaaaaagtatgtttccgaaacgcatatccttaaattgacagcaaacgtaacttgaaaatataatcgaaatgctagtttcattacctcttttctgggcttctcctccaaataaacctcattcacttccagagatttctaacattttgtatactataaacacatttgaatgaacataaacttgcaccaaaatttacataaatttaaaatgtattctgtattcagtaacgccataatttaatttagtaccgcaatcaagtggttcaagctgaaatcgtttattttttgcgagaaatgtttggaaattcgaaatgacaagcgacgagaccaacaaacacacacacgtccggcggagtgagacggatagtccttcaatttgggtgatctgctcgtaaattggtagccaaggcaaactctttccctatattcagtcgtaaagccaacgtatgcaaatttcg

SEQ ID NO: 27923 - DNA, 1059 bp, DROSOPHILA
atgttgcctgcggcgctgtccaggactcaaaacataaagcgatggcaaagaagaacgggttgcccagaggagcgacgcaaaaaggatgccaaagccagcatcttcaaaggcaaaagtatcaaaaggcaacaatttatagtggccaccgaagaagcctgcggaattcgaacacaatcgaggactgcgtatcgcataatcaatggccatacagctaaatataactcgagcccctggatggtttttctgcactcaactacagatatgtttgtgtgcggcggatctctaatcacggacaccaggctgggggagtatgaaagaacgaggagtgaagaatgcaccggatattactgcaattttcgagaggagcacatggtagatgcgggcttcaagcacaaattgtatgatccaaatacacatgctaacgacattgccattttgcggctgtccaagagtgttgtgtacagagacaacatcaggcccatttgcgttgtgtgggaccataggtggaggcactatttagacaaaatcgatttgctcactgctactggatggggaaagacccaaatggaaagtgacagtgatgctcttcagacactggacattcgccgccaaccaccagatgtgtgcgctaagttcatcggccagaccatcgctggtaaccaattctgcgcaggaaactgggatagtaatctctgcaatggcgattccggtggtccattgggagcagtgatcacgcataaaaacacacagcgctttgtgcaagtcggtatagccagctatacgaacagaaattgtcaaaaggcaagtgttttcactgacgttctgagccatgccgaatttatccttcgagtgtggaggatgtacggcaagggtcaaacgctaccgatcccaaagaaacccccaacgaccacccgtcctcctacatggtggcatactactcggattccaaaacagactttccaagactatgattatgacaccaatcatggatcgcattgggattggaactatagtcccgagtggtatcctggaggatacttttatatttcaacatggtaa

SEQ ID NO: 27924 - protein, 352 aa, DROSOPHILA
MLPAALSRTQNIKRWQRRTGCPEERRKKDAKASIFKGKSIKRQQFIVATEEACGIRTQSRTAYRIINGHTAKYNSSPWMVFLHSTTDMFVCGGSLITDTRLGEYERTRSEECTGYYCNFREEHMVDAGFKHKLYDPNTHANDIAILRLSKSVVYRDNIRPICVVWDHRWRHYLDKIDLLTATGWGKTQMESDSDALQTLDIRRQPPDVCAKFIGQTIAGNQFCAGNWDSNLCNGDSGGPLGAVITHKNTQRFVQVGIASYTNRNCQKASVFTDVLSHAEFILRVWRMYGKGQTLPIPKKPPTTTRPPTWWHTTRIPKQTFQDYDYDTNHGSHWDWNYSPEWYPGGYFYISTW

SEQ ID NO: 27925 - DNA, 10149 bp, DROSOPHILA
aacaaaaaccagtaatttaaaaccaatttgtaaggacttatgctataattaaacaaagctttttaacgtttctagcgacatattaaaaaaaggttttataagtataaaaaacttatcggtttcaaaaacttaaatttgctatgttattaatgcgcaagctccaatttgcaatcttatgatcgaagctataatacctcgttcgcaacttcaaaatttaaaagtgggtggtgaaagtttttacgacgtgactccttcaaaacggctggcgaacaggcggggagaaagcttgcagcctgacattgaacttgggggcactctgaacagaattctattaatcacagggtgccgcagctttttggggcaactttcaccaaccatttttgcagctgccacactccaacagattgttgccagttgcagccatcgatttcgtcgcaaatacgtacatattcacacatttagagcgcgccatttcaaaactttagctcaaagcttgaactgcacagtgcactttcttccttgctcccccattagaataagacttcaattcatctcaacagctgtcttggcaacagagaagctttctccactgcctgttgcatccttgttgtcattacaagaatgcagatgatcattcacttggagcagtaacaaattaatgccacaattcatgaacaagtctgtagtggtccaccccagccacgtccaccgtccactttgcatggcccatttggtcgacttcctgcggtccaattaccattggctcctcccgccccattgtgattataagctttgggacggcaggcggctctccgatccgctgacatcagcaagcgcagcaaacagcagccgctgcagcagcagcaggagcagatgattttccggtttgccagggaccgaaaaactggtttcgaatggcgaaaaaaaaatgaaacaaacgacaggctgaccgaatcgaatcgagcgctgcccttttgcacagtcgggccaaaaagacaatacagtgcggagtgtttgttacatgttagagcgtatatatattttgaaaagtacgtgtgcggaattgaacaatacaattggcttagaaatcgacgggcttgatggtgatgaaccgggagagaatgaaggccaccagaatggtggcgcacacgaaacagaaggcgaacatgtagaagctctcctcggtgaagatgtcggagaatgcgggtatatcctggtagatcttctcgatcaccgccagtgttcctttgtgcttcctcaccatcctgatggttacttcttcttggttgccttctttccgccgccggcgcctcctgctagtttctgtttctccgccttggtcaggaccttgttggtgatctcctcgcgcggtgccaagctggacacgtgcttgttgcacagctgcagcagctctagtgtgtttaggttatcgctgttgaagcggatctccttgacttgggcttgttctgtgaatgatataatatcaataagtgtttgctctttgaatgttgcagtttcaaaagggttaacttagttgcccacgctaaaaggaaaccaatttttcaatacatatttcatatgtattttggttccttttagttagatatttcagctgtcccagtttaggtattcttaccttgcgctgaatcaatcagggcaaacttgatgttggccggctggcgatcgcagacgatttctggcttgaccacgcacttgggattcgtagctgccactttgggtgtggagagcaggaagaggaattccctgaaattagaattgaaatagatatctagattattgatttatcatcacgatttacttgatttttcaggagcagcgacgccgcctcaaactgacgccgacaccgactaaaatgtccacggagcgtgagctggctcccggtgggccagctcagctccatccgcacacgctgccgctgacttttccggatctccagatgacctccaccgtgggcatcattgggaaagtctacggtgagtgtggcacgcatttatttcattccccaaccccatcacctttttagccctcgaaggatcggtttttctggtgtgaatacttcactgcaccctttttggtttttctcagtttcttcttagtatgattttctttttcctttcggtttcgtgaaaattctatccaatttgagtggtgaatagggggtgtagtgcgcatgtcccgctatcgatatcggtgaaaagcgcttttccgactcaccgtgtggacttgacattttccgcgaatggatcgaactgcacggttatccgcttgacgcccttcaaattcacgctcttcagctgcttgccaatggcggacacaatgccgccggaacgccgcaatgcgccactgaaaggcacagacattatttatgtttttttcacggcggcaatgaaaactctgcggtttttccgcacaaaatttacgacgtaacaaacacgctacgtaacagctgagcgacgatagcgataacgggcccactcacgatgaccgccgatggttgtacaacactggcattagcaaccctgcctcgctatgcccagatgctgcttgtatagtcatctcgctcactcgcacggctgcgggcgagagtgctttgccctcatttaagtgtggttaagagtgtacagcatgcgtcacgctcacacgtcgcgagtacaatttttgtgtggacgtccagtgtgtggctgctgtgggaaaagctgaagaaaattgcattttttgcataatgcgcggcgtgaaaagctaacaaaagttgtgctaaatcaaaattcgatagtctggccacggtttgtgcataagagcgggcggcgcgaacgtgtttggtgcacaaaaaccacgtctcgaaaaattaagaattctacgtgcacacattttttgggctgccatatataaaaaaaaaacgcatacaaacgcattttcttgctgtatatgcggaggagcacacacacacacacagagcgacagacacgcatacaattgcactcacgagatatgcgagcataaagaagaattttttcttagttgtattacaagagcattagatacatatataagtatataaatatacatatatacacgcctaggtgtgtacataaaagatacatacatataaaattaaacgaaagctgtgcctacatttgtgttcttttccaatactaaaataacaacaacaaacaataataataataataataatcatacgagtaatataaataaaataatgcaagtcgagcgagagacagcgacaagatagcacacccacttgtctgctcataattccaatttatatataataagcctacgccacgcccacgcgcaactacaacaacaaaaaacaaaacaaatgcaaaatcaaccaaacgaataaaactttaaactactttaaagtgtgataagcaaaaggctgaaatcaaaaacaaaaaaaaaaacaaaataattagtagaaaaccaaaagcaaaggcaacaacaaatacaacaacaacaaagaaacaaacaatcaattacattttacaccaaaacacgaaaagcaaacacgagccaacattttttacattaattatttttcttaaaccaaaacctaacttagtgcaaaaacatgtatccagttggacaacgtaagtggctagcaaatgatgattgcgactaaaagaacagacagacaatttccagacagaacaaaaagaagaatacaaaaataggcgattgctgccacaagtttccctcacaccatgccacacagccccccagctccccttcgcccagccgcccactaatcaagttttcgatgttctacttgcacctttatgcatatacatatgtgatacatacacacgtgcaaatgccacacagacagacacgtgcgtcaaagtgcagagttgaaaatgcgcaaaaattgggtcaacaaccttcgtcgcgtcgcaatagtttccagcttttacgggggttaatctctggcgtcttttttggggcctgcgtctcgaatttattcgaattcggtttcgtatatggatctgggttttttttgaagagcagtcactcccaattgcgtcgcaatttgccaccaattgtgcgtatttcatttaaatatttatgcttcaatggggtgaaaacgtagaagtcgtcgaatatgaaaagagtttgctggggaaggaagggatcgtcgaaaaatatgattcttttgtttgaaatctgaatatatttaatgggatcttaccaacagcgattgttgtttatgccagagaacttcaaaataggtacccttttccaatatcatatgtcatattttttttatcacaataaacaacatcatgggattataatctataagcgctagaatctttgtattatatataccagtattgtgtagatttggtttaaagataatgatttaactatcagttaattaagcatacagtttagataggtggtcgaagcacttggtagaacatcaaaacttaaaccacctgcaaaggaacccagggaacaaggatgatataactgcaaaatattaacaaaatggtggctaacgcgggacttgcatacaaatcaaataaccaatcgacctactaagtaactggacaaaggggcaaacaacttgtggcagcaggtggcatacaaactctataaagatactatatacaaatataaacggaaatacacacacatatacatacatattatatatatatatatatctattgataacgacgatgaaagaaaactgtaactaaaatattattaacgcactttaatttcgttttctttttcgttcgttatcgccaactgttttcggttttccgacatcgttctccaccattgacattatcattatcattatcattttcgattccccatcatcgacaacaacaaaccatcgattggccatttgccctattgccattttaattggaatctcttcatttccacgttcatttgattaccttgcgttgatttgattaccttttctttttatagagtcacagtggaccccctcgcccactcggcctcagagtccctctcaggcgcagactagcttcgacacgctcacatgtaaattactctccaagaaccaaaaacgattactaaaattactaagatccttatgcaatttgattgattcgaaacgctataccgaactgtttgtgtttatgttctttagtttggtgttcccccactaatccaaccaacccaactaatccgtaatccgtaatcattctttttgccgtaatgttattaacaaaaaactaacgaaaaaaaaaaccagtaccaatacctttaaactaactttttgaacttttatttcgtgtaaatgtttgtttctttgtaccatgcaaagtgcacttgaagtattactctacacctgaactaaaacacctacaaacacctgttttgaatttcaatatgtaatagtttatgtcttatgctcgttgcatgatcattttttgtttgtagcaattaagtgggttttcattctcatacgctggataatctcattggaatatagggatttctagttgataaagatcttctattagttattgtaactttaaatgctctttagaaatgtatgcgtggtataacgaaacattctgatatcttaaagttcctgagatttatccaagcatgtgaggagaaccaatccaaaaagtacagttagatattgcgtttttttttttttgaaaaccttaaattatttggaaaacgaactttttcgaagaagagactaactggcaattgactttgcagcaccaccagcgcccggctcgtcggtcaatcccaccgccgtcaccagcccaagtgcccagaatgtggccgctggtggagcaactgtggccggtgcagcagcaactgccgcccaggtggcctccgccttgggtgccaccaccggcagcgtgacgccagcaattgccaccgcaacgccagccacgcagccggatatgcccgtctttacgtgtccacgacgcccgaatctcggacgagagggtcgcccgattgtgctgcgcgccaatcacttccaggtgacaatgccgcgtggctatgtgcatcactatgacatcaatatacagccggacaagtgtccgcgaaaggtgaaccgtgagattatcgagactatggtgcatgcctatagcaagatcttcggagtgctcaagccggtgttcgatggtcgcaacaatctgtatacccgcgatcccctgcccattggcaacgagcgtctagagctggaggttactctacccggcgagggcaaagatcgaatctttcgcgtgacgatcaagtggcaggctcaggtctcgctcttcaatttggaggaagctctcgaaggccgcacgcggcagataccctatgatgccattttggcgctcgatgtggtcatgcgccatctgcccagcatgacgtacacgccagtgggacgtagcttcttcagttccccggagggttactaccatcccctgggtggtggacgcgaggtttggttcggtttccatcagagcgtaaggccctcgcagtggaagatgatgctcaatatcgatggtgagttcgcaatgctctgtattatctatttgcccaactaatgattacatattcctcagtctcggccaccgctttctacaaggctcaaccagtcattgacttcatgtgcgaggtgctggacattcgcgacatcaacgagcagcgcaaaccgctcaccgattcgcagcgcgtcaagttcacgaaggagatcaagggtttgaagatcgagatcacccactgcggccagatgcgtcgcaagtatcgtgtgtgcaacgtcactcgccgccccgctcagatgcaatcgtatgtattcagcatttttaaacatttctgcttttgttaaccaagcttcatcatcatgttagattcccactgcagctggagaacggacagaccgtagagtgcaccgtggccaagtacttcctggacaagtaccgcatgaaattgcgctacccgcacttgccctgcctgcaggttggccaagagcacaagcacacttacctgcctctagaggtgtgcaacattgtggccggacagcggtgcattaaaaagctgaccgatatgcagacgtcgaccatgatcaaggccacagctcgttcagctccggatcgtgagcgtgagattaacaacttggtaaagcgcgccgacttcaacaacgattcgtatgtgcaagagtttggcctgaccatctccaattcgatgatggaggtacgaggacgcgtcttgcctcctcccaagcttcagtatgggggacgtgtgtctaccggcctcaccggccagcagctgttcccgccacagaacaaggtgagcttggcctcgcccaaccagggtgtatgggatatgcgaggcaagcagttcttcactggcgtcgagatccgcatctgggccatcgcctgttttgccccacagcgcacggtgcgcgaggatgcgctgcgtaatttcacccagcagctgcagaagatctcaaacgatgcaggcatgccgataattggacagccgtgcttctgtaagtacgccaccgggccggatcaagtggaacccatgttccgttacctgaagatcaccttccccggcctgcaactcgtcgtggttgtgctgcccggcaagactccagtatacgccgaggtgaagcgtgtaggtgacaccgttctgggtatggccacccagtgtgtgcaggccaagaacgtgaacaagacatcgccacagacgctctctaatctgtgtctgaagatcaacgtcaagttgggcggcatcaattcaattctggtcccctccattcggccaaaggtcttcaatgagccggtcatctttttgggtgccgatgtgacacacccaccagctggcgacaacaagaaaccatcgattgccgccgtcgtgggctccatggatgcccatccatcgcggtatgccgccaccgttcgcgtacagcagcaccgacaggagatcatccaggagctgagcagcatggtgcgcgagctgttgatcatgttctacaagtcgacgggcggctacaagccccaccgcatcatactctatcgtgacggagtctccgagggacaattcccacatgtcctgcaacacgaattgaccgccattcgcgaggcctgcattaagctagagccagagtatcggccgggcatcacattcattgtggtgcagaagcgccatcacactcgactcttctgcgcggagaagaaggagcagagcggcaaatcgggcaatattcccgcaggcaccaccgtcgatgtgggcatcacacatcccaccgaatttgatttctatctatgcagccatcagggcatccagggcaccagtcgcccctcgcactaccacgttctgtgggacgacaatcactttgactcggacgagctgcagtgcctcacgtatcagctatgccatacgtacgtgcgctgcacccgatccgtcagtataccggcgccagcctactacgcccatttagtggccttccgtgccaggtaagccattggattcgattacccttcaattggactttgcgttaatgtaatgtaattcgtttgcagatatcatctggtggagaaggagcacgattcgggcgagggttcgcaccagagcggctgctcagaggatcgtacgccaggtgccatggccagggccatcactgtgcacgcggataccaagaaggtcatgtactttgcctaaaaagtatcgcccctccccaataccaacaccaaaaagctaaagaatacaaaatcagtttcgaatttcgattcgaataagcaactccccacttccttccctcaaatcagaaagcggaaagcggatgaaagccaagcatagaagtttagaattaagttacgttttacgttgagagagcgcggatgggtggaaaaaccaatcagaatacgaagatcttgcatgcattagttacgtacacgtacatatatagtaagcagagtaatgaaaatcccacaaacaccatccacacactcactcatccacacacacacaaatcagatagccacacagtgagaaatgataactaatcgaatgtcaggcacaagtttgcgaaatcaaagaaatgtgagaattctcaaaaacaagcgtagcaaacaaattgaaagcaaataggaaatcaactaaagggaacaaaaactacgacagcaacaccaaccaacaccagaaaaacaaaacaaattaaaacataaccaaaatggaagtgaaattacgtgaaaagcgagcgtcatcagcacgagagagagagacaagttttgtaatagaaattacgattaaattgtacaatatatttttacacgatacgaaatgaagacatgatgaatgataatgaatgaatgcatacaaccaaaggtttttagtatacaaaatgaatacgttgctgatcgactcacacagcaaacaccacatgaacaccaaccactcggattctctgtactgtgaacgaagaccaccaccaaaatataaacaaaaaccacaagcgacattaaagcgacaagcattgaaagagtgtgtagacacaacttagcatgtactaatgaattacttcaatacttcaactagggcgctgacaaaaccaagcaagaacatttaatagtttgtaagttgggctctaccaaaaaccgaacacaaaatgagagagagagagagagagaaaaatgcaagcaaggccagataagttaagtgggcaatgaataacgagaactgcaatttcaacaagggacaaacttttggtcaaaacaatagctatacttatagagcagagcctaatatatacatacataattagaatctaaaactaaaatttaaagtttttacgaaacgataaccaagcggatggagctgttgtaacaatgtagattacttaaattcaaaagtgcaaataacacggtagcagacacgttacgttggcagtgctgatattttatgttagtccttagtttaccctcttttatgcaccacaccaccacacaatcagactccgaacttcttcaaccctcctcgagtccaaggcatatcactcaatgtcctcttatttatgtacctcctacaataagccttatgatatatttagttggaccttatatatatatatatatattttttaaacgaatgcctaacgaaatt

SEQ ID NO: 27926 - DNA, 3486 bp, DROSOPHILA
acagtgcggagtgtttgttacatgttagagcgtatatatattttgaaaagagcagcgacgccgcctcaaactgacgccgacaccgactaaaatgtccacggagcgtgagctggctcccggtgggccagctcagctccatccgcacacgctgccgctgacttttccggatctccagatgacctccaccgtgggcatcattgggaaagtctacgagtcacagtggaccccctcgcccactcggcctcagagtccctctcaggcgcagactagcttcgacacgctcacatcaccaccagcgcccggctcgtcggtcaatcccaccgccgtcaccagcccaagtgcccagaatgtggccgctggtggagcaactgtggccggtgcagcagcaactgccgcccaggtggcctccgccttgggtgccaccaccggcagcgtgacgccagcaattgccaccgcaacgccagccacgcagccggatatgcccgtctttacgtgtccacgacgcccgaatctcggacgagagggtcgcccgattgtgctgcgcgccaatcacttccaggtgacaatgccgcgtggctatgtgcatcactatgacatcaatatacagccggacaagtgtccgcgaaaggtgaaccgtgagattatcgagactatggtgcatgcctatagcaagatcttcggagtgctcaagccggtgttcgatggtcgcaacaatctgtatacccgcgatcccctgcccattggcaacgagcgtctagagctggaggttactctacccggcgagggcaaagatcgaatctttcgcgtgacgatcaagtggcaggctcaggtctcgctcttcaatttggaggaagctctcgaaggccgcacgcggcagataccctatgatgccattttggcgctcgatgtggtcatgcgccatctgcccagcatgacgtacacgccagtgggacgtagcttcttcagttccccggagggttactaccatcccctgggtggtggacgcgaggtttggttcggtttccatcagagcgtaaggccctcgcagtggaagatgatgctcaatatcgatgtctcggccaccgctttctacaaggctcaaccagtcattgacttcatgtgcgaggtgctggacattcgcgacatcaacgagcagcgcaaaccgctcaccgattcgcagcgcgtcaagttcacgaaggagatcaagggtttgaagatcgagatcacccactgcggccagatgcgtcgcaagtatcgtgtgtgcaacgtcactcgccgccccgctcagatgcaatcattcccactgcagctggagaacggacagaccgtagagtgcaccgtggccaagtacttcctggacaagtaccgcatgaaattgcgctacccgcacttgccctgcctgcaggttggccaagagcacaagcacacttacctgcctctagaggtgtgcaacattgtggccggacagcggtgcattaaaaagctgaccgatatgcagacgtcgaccatgatcaaggccacagctcgttcagctccggatcgtgagcgtgagattaacaacttggtaaagcgcgccgacttcaacaacgattcgtatgtgcaagagtttggcctgaccatctccaattcgatgatggaggtacgaggacgcgtcttgcctcctcccaagcttcagtatgggggacgtgtgtctaccggcctcaccggccagcagctgttcccgccacagaacaaggtgagcttggcctcgcccaaccagggtgtatgggatatgcgaggcaagcagttcttcactggcgtcgagatccgcatctgggccatcgcctgttttgccccacagcgcacggtgcgcgaggatgcgctgcgtaatttcacccagcagctgcagaagatctcaaacgatgcaggcatgccgataattggacagccgtgcttctgtaagtacgccaccgggccggatcaagtggaacccatgttccgttacctgaagatcaccttccccggcctgcaactcgtcgtggttgtgctgcccggcaagactccagtatacgccgaggtgaagcgtgtaggtgacaccgttctgggtatggccacccagtgtgtgcaggccaagaacgtgaacaagacatcgccacagacgctctctaatctgtgtctgaagatcaacgtcaagttgggcggcatcaattcaattctggtcccctccattcggccaaaggtcttcaatgagccggtcatctttttgggtgccgatgtgacacacccaccagctggcgacaacaagaaaccatcgattgccgccgtcgtgggctccatggatgcccatccatcgcggtatgccgccaccgttcgcgtacagcagcaccgacaggagatcatccaggagctgagcagcatggtgcgcgagctgttgatcatgttctacaagtcgacgggcggctacaagccccaccgcatcatactctatcgtgacggagtctccgagggacaattcccacatgtcctgcaacacgaattgaccgccattcgcgaggcctgcattaagctagagccagagtatcggccgggcatcacattcattgtggtgcagaagcgccatcacactcgactcttctgcgcggagaagaaggagcagagcggcaaatcgggcaatattcccgcaggcaccaccgtcgatgtgggcatcacacatcccaccgaatttgatttctatctatgcagccatcagggcatccagggcaccagtcgcccctcgcactaccacgttctgtgggacgacaatcactttgactcggacgagctgcagtgcctcacgtatcagctatgccatacgtacgtgcgctgcacccgatccgtcagtataccggcgccagcctactacgcccatttagtggccttccgtgccagatatcatctggtggagaaggagcacgattcgggcgagggttcgcaccagagcggctgctcagaggatcgtacgccaggtgccatggccagggccatcactgtgcacgcggataccaagaaggtcatgtactttgcctaaaaagtatcgcccctccccaataccaacaccaaaaagctaaagaatacaaaatcagtttcgaatttcgattcgaataagcaactccccacttccttccctcaaatcagaaagcggaaagcggatgaaagccaagcatagaagtttagaattaagttacgttttacgttgagagagcgcggatgggtggaaaaaccaatcagaatacgaagatcttgcatgcattagttacgtacacgtacatatatagtaagcagagtaatgaaaatcccacaaacaccatccacacactcactcatccacacacacacaaatcagatagccacacagtgagaaatgataactaatcgaatgtcaggcacaagtttgcgaaatcaaagaaatgtgagaattctcaaaaacaagcgtagcaaacaaattgaaagcaaataggaaatcaacta

SEQ ID NO: 27927 - protein, 984 aa, DROSOPHILA; identical to SEQ ID NO: 14511

SEQ ID NO: 27928 - DNA, 8465 bp, DROSOPHILA
cgcagacgatttctggcttgaccacgcacttgggattcgtagctgccactttgggtgtggagagcaggaagaggaattccctgaaattagaattgaaatagatatctagattattgatttatcatcacgatttacttgatttttcaggagcagcgacgccgcctcaaactgacgccgacaccgactaaaatgtccacggagcgtgagctggctcccggtgggccagctcagctccatccgcacacgctgccgctgacttttccggatctccagatgacctccaccgtgggcatcattgggaaagtctacggtgagtgtggcacgcatttatttcattccccaaccccatcacctttttagccctcgaaggatcggtttttctggtgtgaatacttcactgcaccctttttggtttttctcagtttcttcttagtatgattttctttttcctttcggtttcgtgaaaattctatccaatttgagtggtgaatagggggtgtagtgcgcatgtcccgctatcgatatcggtgaaaagcgcttttccgactcaccgtgtggacttgacattttccgcgaatggatcgaactgcacggttatccgcttgacgcccttcaaattcacgctcttcagctgcttgccaatggcggacacaatgccgccggaacgccgcaatgcgccactgaaaggcacagacattatttatgtttttttcacggcggcaatgaaaactctgcggtttttccgcacaaaatttacgacgtaacaaacacgctacgtaacagctgagcgacgatagcgataacgggcccactcacgatgaccgccgatggttgtacaacactggcattagcaaccctgcctcgctatgcccagatgctgcttgtatagtcatctcgctcactcgcacggctgcgggcgagagtgctttgccctcatttaagtgtggttaagagtgtacagcatgcgtcacgctcacacgtcgcgagtacaatttttgtgtggacgtccagtgtgtggctgctgtgggaaaagctgaagaaaattgcattttttgcataatgcgcggcgtgaaaagctaacaaaagttgtgctaaatcaaaattcgatagtctggccacggtttgtgcataagagcgggcggcgcgaacgtgtttggtgcacaaaaaccacgtctcgaaaaattaagaattctacgtgcacacattttttgggctgccatatataaaaaaaaaacgcatacaaacgcattttcttgctgtatatgcggaggagcacacacacacacacagagcgacagacacgcatacaattgcactcacgagatatgcgagcataaagaagaattttttcttagttgtattacaagagcattagatacatatataagtatataaatatacatatatacacgcctaggtgtgtacataaaagatacatacatataaaattaaacgaaagctgtgcctacatttgtgttcttttccaatactaaaataacaacaacaaacaataataataataataataatcatacgagtaatataaataaaataatgcaagtcgagcgagagacagcgacaagatagcacacccacttgtctgctcataattccaatttatatataataagcctacgccacgcccacgcgcaactacaacaacaaaaaacaaaacaaatgcaaaatcaaccaaacgaataaaactttaaactactttaaagtgtgataagcaaaaggctgaaatcaaaaacaaaaaaaaaaacaaaataattagtagaaaaccaaaagcaaaggcaacaacaaatacaacaacaacaaagaaacaaacaatcaattacattttacaccaaaacacgaaaagcaaacacgagccaacattttttacattaattatttttcttaaaccaaaacctaacttagtgcaaaaacatgtatccagttggacaacgtaagtggctagcaaatgatgattgcgactaaaagaacagacagacaatttccagacagaacaaaaagaagaatacaaaaataggcgattgctgccacaagtttccctcacaccatgccacacagccccccagctccccttcgcccagccgcccactaatcaagttttcgatgttctacttgcacctttatgcatatacatatgtgatacatacacacgtgcaaatgccacacagacagacacgtgcgtcaaagtgcagagttgaaaatgcgcaaaaattgggtcaacaaccttcgtcgcgtcgcaatagtttccagcttttacgggggttaatctctggcgtcttttttggggcctgcgtctcgaatttattcgaattcggtttcgtatatggatctgggttttttttgaagagcagtcactcccaattgcgtcgcaatttgccaccaattgtgcgtatttcatttaaatatttatgcttcaatggggtgaaaacgtagaagtcgtcgaatatgaaaagagtttgctggggaaggaagggatcgtcgaaaaatatgattcttttgtttgaaatctgaatatatttaatgggatcttaccaacagcgattgttgtttatgccagagaacttcaaaataggtacccttttccaatatcatatgtcatattttttttatcacaataaacaacatcatgggattataatctataagcgctagaatctttgtattatatataccagtattgtgtagatttggtttaaagataatgatttaactatcagttaattaagcatacagtttagataggtggtcgaagcacttggtagaacatcaaaacttaaaccacctgcaaaggaacccagggaacaaggatgatataactgcaaaatattaacaaaatggtggctaacgcgggacttgcatacaaatcaaataaccaatcgacctactaagtaactggacaaaggggcaaacaacttgtggcagcaggtggcatacaaactctataaagatactatatacaaatataaacggaaatacacacacatatacatacatattatatatatatatatatctattgataacgacgatgaaagaaaactgtaactaaaatattattaacgcactttaatttcgttttctttttcgttcgttatcgccaactgttttcggttttccgacatcgttctccaccattgacattatcattatcattatcattttcgattccccatcatcgacaacaacaaaccatcgattggccatttgccctattgccattttaattggaatctcttcatttccacgttcatttgattaccttgcgttgatttgattaccttttctttttatagagtcacagtggaccccctcgcccactcggcctcagagtccctctcaggcgcagactagcttcgacacgctcacatgtaaattactctccaagaaccaaaaacgattactaaaattactaagatccttatgcaatttgattgattcgaaacgctataccgaactgtttgtgtttatgttctttagtttggtgttcccccactaatccaaccaacccaactaatccgtaatccgtaatcattctttttgccgtaatgttattaacaaaaaactaacgaaaaaaaaaaccagtaccaatacctttaaactaactttttgaacttttatttcgtgtaaatgtttgtttctttgtaccatgcaaagtgcacttgaagtattactctacacctgaactaaaacacctacaaacacctgttttgaatttcaatatgtaatagtttatgtcttatgctcgttgcatgatcattttttgtttgtagcaattaagtgggttttcattctcatacgctggataatctcattggaatatagggatttctagttgataaagatcttctattagttattgtaactttaaatgctctttagaaatgtatgcgtggtataacgaaacattctgatatcttaaagttcctgagatttatccaagcatgtgaggagaaccaatccaaaaagtacagttagatattgcgtttttttttttttgaaaaccttaaattatttggaaaacgaactttttcgaagaagagactaactggcaattgactttgcagcaccaccagcgcccggctcgtcggtcaatcccaccgccgtcaccagcccaagtgcccagaatgtggccgctggtggagcaactgtggccggtgcagcagcaactgccgcccaggtggcctccgccttgggtgccaccaccggcagcgtgacgccagcaattgccaccgcaacgccagccacgcagccggatatgcccgtctttacgtgtccacgacgcccgaatctcggacgagagggtcgcccgattgtgctgcgcgccaatcacttccaggtgacaatgccgcgtggctatgtgcatcactatgacatcaatatacagccggacaagtgtccgcgaaaggtgaaccgtgagattatcgagactatggtgcatgcctatagcaagatcttcggagtgctcaagccggtgttcgatggtcgcaacaatctgtatacccgcgatcccctgcccattggcaacgagcgtctagagctggaggttactctacccggcgagggcaaagatcgaatctttcgcgtgacgatcaagtggcaggctcaggtctcgctcttcaatttggaggaagctctcgaaggccgcacgcggcagataccctatgatgccattttggcgctcgatgtggtcatgcgccatctgcccagcatgacgtacacgccagtgggacgtagcttcttcagttccccggagggttactaccatcccctgggtggtggacgcgaggtttggttcggtttccatcagagcgtaaggccctcgcagtggaagatgatgctcaatatcgatggtgagttcgcaatgctctgtattatctatttgcccaactaatgattacatattcctcagtctcggccaccgctttctacaaggctcaaccagtcattgacttcatgtgcgaggtgctggacattcgcgacatcaacgagcagcgcaaaccgctcaccgattcgcagcgcgtcaagttcacgaaggagatcaagggtttgaagatcgagatcacccactgcggccagatgcgtcgcaagtatcgtgtgtgcaacgtcactcgccgccccgctcagatgcaatcgtatgtattcagcatttttaaacatttctgcttttgttaaccaagcttcatcatcatgttagattcccactgcagctggagaacggacagaccgtagagtgcaccgtggccaagtacttcctggacaagtaccgcatgaaattgcgctacccgcacttgccctgcctgcaggttggccaagagcacaagcacacttacctgcctctagaggtgtgcaacattgtggccggacagcggtgcattaaaaagctgaccgatatgcagacgtcgaccatgatcaaggccacagctcgttcagctccggatcgtgagcgtgagattaacaacttggtaaagcgcgccgacttcaacaacgattcgtatgtgcaagagtttggcctgaccatctccaattcgatgatggaggtacgaggacgcgtcttgcctcctcccaagcttcagtatgggggacgtgtgtctaccggcctcaccggccagcagctgttcccgccacagaacaaggtgagcttggcctcgcccaaccagggtgtatgggatatgcgaggcaagcagttcttcactggcgtcgagatccgcatctgggccatcgcctgttttgccccacagcgcacggtgcgcgaggatgcgctgcgtaatttcacccagcagctgcagaagatctcaaacgatgcaggcatgccgataattggacagccgtgcttctgtaagtacgccaccgggccggatcaagtggaacccatgttccgttacctgaagatcaccttccccggcctgcaactcgtcgtggttgtgctgcccggcaagactccagtatacgccgaggtgaagcgtgtaggtgacaccgttctgggtatggccacccagtgtgtgcaggccaagaacgtgaacaagacatcgccacagacgctctctaatctgtgtctgaagatcaacgtcaagttgggcggcatcaattcaattctggtcccctccattcggccaaaggtcttcaatgagccggtcatctttttgggtgccgatgtgacacacccaccagctggcgacaacaagaaaccatcgattgccgccgtcgtgggctccatggatgcccatccatcgcggtatgccgccaccgttcgcgtacagcagcaccgacaggagatcatccaggagctgagcagcatggtgcgcgagctgttgatcatgttctacaagtcgacgggcggctacaagccccaccgcatcatactctatcgtgacggagtctccgagggacaattcccacatgtcctgcaacacgaattgaccgccattcgcgaggcctgcattaagctagagccagagtatcggccgggcatcacattcattgtggtgcagaagcgccatcacactcgactcttctgcgcggagaagaaggagcagagcggcaaatcgggcaatattcccgcaggcaccaccgtcgatgtgggcatcacacatcccaccgaatttgatttctatctatgcagccatcagggcatccagggcaccagtcgcccctcgcactaccacgttctgtgggacgacaatcactttgactcggacgagctgcagtgcctcacgtatcagctatgccatacgtacgtgcgctgcacccgatccgtcagtataccggcgccagcctactacgcccatttagtggccttccgtgccaggtaagccattggattcgattacccttcaattggactttgcgttaatgtaatgtaattcgtttgcagatatcatctggtggagaaggagcacgattcgggcgagggttcgcaccagagcggctgctcagaggatcgtacgccaggtgccatggccagggccatcactgtgcacgcggataccaagaaggtcatgtactttgcctaaaaagtatcgcccctccccaataccaacaccaaaaagctaaagaatacaaaatcagtttcgaatttcgattcgaataagcaactccccacttccttccctcaaatcagaaagcggaaagcggatgaaagccaagcatagaagtttagaattaagttacgttttacgttgagagagcgcggatgggtggaaaaaccaatcagaatacgaagatcttgcatgcattagttacgtacacgtacatatatagtaagcagagtaatgaaaatcccacaaacaccatccacacactcactcatccacacacacacaaatcagatagccacacagtgagaaatgataactaatcgaatgtcaggcacaagtttgcgaaatcaaagaaatgtgagaattctcaaaaacaagcgtagcaaacaaattgaaagcaaataggaaatcaactaaagggaacaaaaactacgacagcaacaccaaccaacaccagaaaaacaaaacaaattaaaacataaccaaaatggaagtgaaattacgtgaaaagcgagcgtcatcagcacgagagagagagacaagttttgtaatagaaattacgattaaattgtacaatatatttttacacgatacgaaatgaagacatgatgaatgataatgaatgaatgcatacaaccaaaggtttttagtatacaaaatgaatacgttgctgatcgactcacacagcaaacaccacatgaacaccaaccactcggattctctgtactgtgaacgaagaccaccaccaaaatataaacaaaaaccacaagcgacattaaagcgacaagcattgaaagagtgtgtagacacaacttagcatgtactaatgaattacttcaatacttcaactagggcgctgacaaaaccaagcaagaacatttaatagtttgtaagttgggctctaccaaaaaccgaacacaaaatgagagagagagagagagagaaaaatgcaagcaaggccagataagttaagtgggcaatgaataacgagaactgcaatttcaacaagggacaaacttttggtcaaaacaatagctatacttatagagcagagcctaatatatacatacataattagaatctaaaactaaaatttaaagtttttacgaaacgataaccaagcggatggagctgttgtaacaatgtagattacttaaattcaaaagtgcaaataacacggtagcagacacgttacgttggcagtgctgatattttatgttagtccttagtttaccctcttttatgcaccacaccaccacacaatcagactccgaacttcttcaaccctcctcgagtccaaggcatatcactcaatgtcctcttatttatgtacctcctacaataagccttatgatatatttagttggaccttatatatatatatatatattttttaaacgaatgcctaacgaaatt

SEQ ID NO: 27929 - DNA, 3586 bp, DROSOPHILA
tggacgtccagtgtgtggctgctgtgggaaaagctgaagaaaattgcattttttgcataatgcgcggcgtgaaaagctaacaaaatgtgataagcaaaaggctgaaatcaaaaacaaaaaaaaaaacaaaataattagtagaaaaccaaaagcaaaggcaacaacaaatacaacaacaacaaagaaacaaacaatcaattacattttacaccaaaacacgaaaagcaaacacgagccaacattttttacattaattatttttcttaaaccaaaacctaacttagtgcaaaaacatgtatccagttggacaacagtcacagtggaccccctcgcccactcggcctcagagtccctctcaggcgcagactagcttcgacacgctcacatcaccaccagcgcccggctcgtcggtcaatcccaccgccgtcaccagcccaagtgcccagaatgtggccgctggtggagcaactgtggccggtgcagcagcaactgccgcccaggtggcctccgccttgggtgccaccaccggcagcgtgacgccagcaattgccaccgcaacgccagccacgcagccggatatgcccgtctttacgtgtccacgacgcccgaatctcggacgagagggtcgcccgattgtgctgcgcgccaatcacttccaggtgacaatgccgcgtggctatgtgcatcactatgacatcaatatacagccggacaagtgtccgcgaaaggtgaaccgtgagattatcgagactatggtgcatgcctatagcaagatcttcggagtgctcaagccggtgttcgatggtcgcaacaatctgtatacccgcgatcccctgcccattggcaacgagcgtctagagctggaggttactctacccggcgagggcaaagatcgaatctttcgcgtgacgatcaagtggcaggctcaggtctcgctcttcaatttggaggaagctctcgaaggccgcacgcggcagataccctatgatgccattttggcgctcgatgtggtcatgcgccatctgcccagcatgacgtacacgccagtgggacgtagcttcttcagttccccggagggttactaccatcccctgggtggtggacgcgaggtttggttcggtttccatcagagcgtaaggccctcgcagtggaagatgatgctcaatatcgatgtctcggccaccgctttctacaaggctcaaccagtcattgacttcatgtgcgaggtgctggacattcgcgacatcaacgagcagcgcaaaccgctcaccgattcgcagcgcgtcaagttcacgaaggagatcaagggtttgaagatcgagatcacccactgcggccagatgcgtcgcaagtatcgtgtgtgcaacgtcactcgccgccccgctcagatgcaatcattcccactgcagctggagaacggacagaccgtagagtgcaccgtggccaagtacttcctggacaagtaccgcatgaaattgcgctacccgcacttgccctgcctgcaggttggccaagagcacaagcacacttacctgcctctagaggtgtgcaacattgtggccggacagcggtgcattaaaaagctgaccgatatgcagacgtcgaccatgatcaaggccacagctcgttcagctccggatcgtgagcgtgagattaacaacttggtaaagcgcgccgacttcaacaacgattcgtatgtgcaagagtttggcctgaccatctccaattcgatgatggaggtacgaggacgcgtcttgcctcctcccaagcttcagtatgggggacgtgtgtctaccggcctcaccggccagcagctgttcccgccacagaacaaggtgagcttggcctcgcccaaccagggtgtatgggatatgcgaggcaagcagttcttcactggcgtcgagatccgcatctgggccatcgcctgttttgccccacagcgcacggtgcgcgaggatgcgctgcgtaatttcacccagcagctgcagaagatctcaaacgatgcaggcatgccgataattggacagccgtgcttctgtaagtacgccaccgggccggatcaagtggaacccatgttccgttacctgaagatcaccttccccggcctgcaactcgtcgtggttgtgctgcccggcaagactccagtatacgccgaggtgaagcgtgtaggtgacaccgttctgggtatggccacccagtgtgtgcaggccaagaacgtgaacaagacatcgccacagacgctctctaatctgtgtctgaagatcaacgtcaagttgggcggcatcaattcaattctggtcccctccattcggccaaaggtcttcaatgagccggtcatctttttgggtgccgatgtgacacacccaccagctggcgacaacaagaaaccatcgattgccgccgtcgtgggctccatggatgcccatccatcgcggtatgccgccaccgttcgcgtacagcagcaccgacaggagatcatccaggagctgagcagcatggtgcgcgagctgttgatcatgttctacaagtcgacgggcggctacaagccccaccgcatcatactctatcgtgacggagtctccgagggacaattcccacatgtcctgcaacacgaattgaccgccattcgcgaggcctgcattaagctagagccagagtatcggccgggcatcacattcattgtggtgcagaagcgccatcacactcgactcttctgcgcggagaagaaggagcagagcggcaaatcgggcaatattcccgcaggcaccaccgtcgatgtgggcatcacacatcccaccgaatttgatttctatctatgcagccatcagggcatccagggcaccagtcgcccctcgcactaccacgttctgtgggacgacaatcactttgactcggacgagctgcagtgcctcacgtatcagctatgccatacgtacgtgcgctgcacccgatccgtcagtataccggcgccagcctactacgcccatttagtggccttccgtgccagatatcatctggtggagaaggagcacgattcgggcgagggttcgcaccagagcggctgctcagaggatcgtacgccaggtgccatggccagggccatcactgtgcacgcggataccaagaaggtcatgtactttgcctaaaaagtatcgcccctccccaataccaacaccaaaaagctaaagaatacaaaatcagtttcgaatttcgattcgaataagcaactccccacttccttccctcaaatcagaaagcggaaagcggatgaaagccaagcatagaagtttagaattaagttacgttttacgttgagagagcgcggatgggtggaaaaaccaatcagaatacgaagatcttgcatgcattagttacgtacacgtacatatatagtaagcagagtaatgaaaatcccacaaacaccatccacacactcactcatccacacacacacaaatcagatagccacacagtgagaaatgataactaatcgaatgtcaggcacaagtttgcgaaatcaaagaaatgtgagaattctcaaaaacaagcgtagcaaacaaattgaaagcaaataggaaatcaacta

SEQ ID NO: 27930 - protein, 950 aa, DROSOPHILA
MYPVGQQSQWTPSPTRPQSPSQAQTSFDTLTSPPAPGSSVNPTAVTSPSAQNVAAGGATVAGAAATAAQVASALGATTGSVTPAIATATPATQPDMPVFTCPRRPNLGREGRPIVLRANHFQVTMPRGYVHHYDINIQPDKCPRKVNREIIETMVHAYSKIFGVLKPVFDGRNNLYTRDPLPIGNERLELEVTLPGEGKDRIFRVTIKWQAQVSLFNLEEALEGRTRQIPYDAILALDVVMRHLPSMTYTPVGRSFFSSPEGYYHPLGGGREVWFGFHQSVRPSQWKMMLNIDVSATAFYKAQPVIDFMCEVLDIRDINEQRKPLTDSQRVKFTKEIKGLKIEITHCGQMRRKYRVCNVTRRPAQMQSFPLQLENGQTVECTVAKYFLDKYRMKLRYPHLPCLQVGQEHKHTYLPLEVCNIVAGQRCIKKLTDMQTSTMIKATARSAPDREREINNLVKRADFNNDSYVQEFGLTISNSMMEVRGRVLPPPKLQYGGRVSTGLTGQQLFPPQNKVSLASPNQGVWDMRGKQFFTGVEIRIWAIACFAPQRTVREDALRNFTQQLQKISNDAGMPIIGQPCFCKYATGPDQVEPMFRYLKITFPGLQLVVVVLPGKTPVYAEVKRVGDTVLGMATQCVQAKNVNKTSPQTLSNLCLKINVKLGGINSILVPSIRPKVFNEPVIFLGADVTHPPAGDNKKPSIAAVVGSMDAHPSRYAATVRVQQHRQEIIQELSSMVRELLIMFYKSTGGYKPHRIILYRDGVSEGQFPHVLQHELTAIREACIKLEPEYRPGITFIVVQKRHHTRLFCAEKKEQSGKSGNIPAGTTVDVGITHPTEFDFYLCSHQGIQGTSRPSHYHVLWDDNHFDSDELQCLTYQLCHTYVRCTRSVSIPAPAYYAHLVAFRARYHLVEKEHDSGEGSHQSGCSEDRTPGAMARAITVHADTKKVMYFA

SEQ ID NO: 27931 - DNA, 3401 bp, DROSOPHILA
actggaatgcattaataaatattaggatctcaattacacttggcagggcccattgggtgggcagctgcagcagtaggtgagtggttggccgggttttttggcacgcaaccaaaaccgagccagccgaaaaaagaaatcaattggaaagtgtttgcctgtgcctgtgcctgtgcctgtgcctcgtccttccccccacctcccgctccaggctcaattacccgagcattctcgttgatttgcagcacgtttcgccagttgccagcactaccgctgatgactgcggcgtggaaaggacgatgatgacgattccggccatgatgaagctgtcggggctcttgaagtggtcgaagatttggcgcacaattgtcacagcgaacactctgctatatagcgtcgaaaatcactttcctttggcagtttgagtggcaagccaacaaaccgaaagtagctgcctctattgcggctctaataatgtggaaaaggccttgtggccgggcagattcccctcttgcggaaacttaagctgaagtttaccgaactggcaccgaccttaaagaaataaattctagtaatctcctacttttgcgttccgaagcaggcaaccttgtccctggaaatgccatcgacttggtcaataattgacggctgctttcaatatggccaagtctcactgtccacaggccactgccagtcgaatcgcttgagagtccatcgaaatgcacacaatttgtatatgcattcgagtgggtctttgtgcgtgttccttgtgtttgcacttaagccgagctctgttgtcgattgcctgacagcaccatgcactcagaaaaatatcgtagcatttcgaaactttgtgtagtaatcgagcaatggtttatagaaacaataattgattggtattgggcataaatatttagtccttgaaatcttctttcgctctgagggtgataacaaagccaaggaaactcggcagtttttcagcttttcgaagaagcgaattttctcagagtgaataaagagttttcgagagacacagggacacagaaatcccagatgatgactgcacagatccgagtcccaaggcagtcagtccgatggattgagaattccaaagatgggaaagtgcaataagccgtcaaactcacctgcaagtcggttcctgtgcccggctgtgccagatcacaggctgatatccaaggattaaggcgtgttaatgaagtcgcagtcccgagtatggacttcttcagatccacgggcgctggcaaggatgtggtgatgctgccgcctcctgccgactcggtgctggccacggcgggcacggtgttatccttgtggccaatcaactgcgccgtctgggcatcaaggatgtggccgctggcctcccgtttgttattgttgttatcgtagctgatggcgaactccttcgagtggctgttactgtggtcgctgtgctgcaggacaccctcatcaatcagtcggctctcgtcctgctgctgctgttcggtctctctttccacttccacttccgcttctgtgtctgtctctgtctccgtctccgtttccgtctcgctctctggctctgtgtctatttccgtttccgctccgggttgctgttgctgctgcttgtgctgcggcaagtgctgctgctgcagattgtagtcctcctcgtcggcgtcttcgttgagcttgatcaggcgatcgaaggactcctcggacagcaggtcgtcctcggccaccagggcaaagatgtcctggtcctcgtcgtaggcctgcgacgaggggaactgcactgtcaggccgcgatcctcgccgtcctcctggttgttggcctcgcttgactctgtgctgtgaccggttgtggctgccagacctcctgaatccgctcccgatccgcctgttccgcctgccctacctgctatatccctgctgctgctgctctcgcgtcgtcgtcgccgctgctgagcctgtccgctatcctcgaggacgcccaggactcggagtgggcccggccctggctgtactcccgcggcggcagttgggggtggaactggagcgcgaagtcgaggtagtggggcaggaagatgggcagcaggtatgagccagagctgcgaacgaatgacgatgacgacgactcgccagtggacggtaacgtggttgcaactcctccgcctccgactccgccgccacttctgccccttttacggccgcctgctgtatttgctgctgctgctgctgctgcggatgttgatgctgcggatgttgctgctgctgccgctgctgctgctgcagatgttgctgccgctgttggtgttgctgttgctgagctgatgctgctgctgctgccacgccgagcccccgaaataaacgcaagcgccatcacgaccagcccgggtcctggccgcatattgacctcgggttcggcggtgctagcatggtgcaggcccgcttgagacgcgcttgcgactccaattcaatgcgaataatgatgggctcatggccccatcatcatcagtagtgtgggctgcggagcggtattcttgggtggcgatcggctctctctcgatccgtctgatccctctgatcccgccagagccgctccagcttcagttgctgccctgcgtccacatccagcggcatgaatccgcagcagccaggttcccagttcccttccagctgatcactggctagcatgcaaatcaccttcgttgaggaccgcgattttgggttcgaacacactccgcttagcgttttaattttccgttacttgcataatagtattaattttattaaacgtagattattgttgtcggattggttgtggctgctggtgttgcacaataaccttggaattggaaatggaattggatttggacattttgaaattcgtttgcttcgttgaattgggtattctctctttatttagtatggggcttgggttgctcacattattaattaattaagaaatctgcacaaagacaaagaattggttgttaggcactgttaggggcatttttccgatataaatgtgtgtgttttcagtcaaaaaaaatggggggtaatgttcgaaaatgttttgtgcgctcacgctctcggtttcccaatgcgctctattttcgcgctctctcgaattcattacggtaatactaatggatatgaatatgattcggaaacttttcttgcgattgaactaataacttttaggtaatttatgttgtgatttacttcaatttgcttgcgtattttcactagcgcttagttttcccgaagcttgcgaacggtaaaaccgagcgaacgcgaaccacacacaaagaaggaaaaaagccgaaaaaacggtcgtggaaatcccgtatatctaacacacacacacacacacaggcacacttgcacacgggcatgcaaagaaa

SEQ ID NO: 27932 - DNA, 1260 bp, DROSOPHILA
atgcggccaggacccgggctggtcgtgatggcgcttgcgtttatttcgggggctcggcgtggcagcagcagcagcatcagctcagcaacagcaacaccaacagcggcagcaacatctgcagcagcagcagcggcagcagcagcaacatccgcagcatcaacatccgcagcagcagcagcagcagcaaatacagcaggcggccgtaaaaggggcagaagtggcggcggagtcggaggcggaggactctggctcatacctgctgcccatcttcctgccccactacctcgacttcgcgctccagttccacccccaactgccgccgcgggagtacagccagggccgggcccactccgagtcctgggcgtcctcgaggatagcggacaggctcagcagcggcgacgacgacgcgagagcagcagcagcagggatatagcaggtagggcaggcggaacaggcggatcgggagcggattcaggaggtctggcagccacaaccggtcacagcacagagtcaagcgaggccaacaaccaggaggacggcgaggatcgcggcctgacagtgcagttcccctcgtcgcaggcctacgacgaggaccaggacatctttgccctggtggccgaggacgacctgctgtccgaggagtccttcgatcgcctgatcaagctcaacgaagacgccgacgaggaggactacaatctgcagcagcagcacttgccgcagcacaagcagcagcaacagcaacccggagcggaaacggaaatagacacagagccagagagcgagacggaaacggagacggagacagagacagacacagaagcggaagtggaagtggaaagagagaccgaacagcagcagcaggacgagagccgactgattgatgagggtgtcctgcagcacagcgaccacagtaacagccactcgaaggagttcgccatcagctacgataacaacaataacaaacgggaggccagcggccacatccttgatgcccagacggcgcagttgattggccacaaggataacaccgtgcccgccgtggccagcaccgagtcggcaggaggcggcagcatcaccacatccttgccagcgcccgtggatctgaagaagtccatactcgggactgcgacttcattaacacgccttaatccttggatatcagcctgtgatctggcacagccgggcacaggaaccgacttgcagtcatcatctgggatttctgtgtccctgtgtctctcgaaaactctttattcactctga

SEQ ID NO: 27933 - protein, 419 aa, DROSOPHILA
MRPGPGLVVMALAFISGARRGSSSSISSATATPTAAATSAAAAAAAAATSAASTSAAAAAAANTAGGRKRGRSGGGVGGGGLWLIPAAHLPAPLPRLRAPVPPPTAAAGVQPGPGPLRVLGVLEDSGQAQQRRRRRESSSSRDIAGRAGGTGGSGADSGGLAATTGHSTESSEANNQEDGEDRGLTVQFPSSQAYDEDQDIFALVAEDDLLSEESFDRLIKLNEDADEEDYNLQQQHLPQHKQQQQQPGAETEIDTEPESETETETETETDTEAEVEVERETEQQQQDESRLIDEGVLQHSDHSNSHSKEFAISYDNNNNKREASGHILDAQTAQLIGHKDNTVPAVASTESAGGGSITTSLPAPVDLKKSILGTATSLTRLNPWISACDLAQPGTGTDLQSSSGISVSLCLSKTLYSL

SEQ ID NO: 27934 - DNA, 16896 bp, DROSOPHILA
tctaatcatcgcttgcttttctttccaaatgctattggcctcccccctacttgtacaataaaaagtttttgagttttgcttaaattaagcatatttgtttgctttctatattactagcgatttctcgtcgaataaaattacataatttaaattaacaattaaataaagtttaattttgattcgtttatataaagtaaaagtatgtcgttacggttactgcataaagttaaacattataattagaccaaaaaaaaaaataggttctagcgtgtaaaaaaataaactctgccgaatccatcaaggcgcccacacggcatcccctccccgatcccgggcgactgggggcgtggccggtgctgtgggcgcggcggtgagagctcgaagtgactaatcagtaagaaccgcaggtgagtgagttttcgtgtgtttcgtgggacctgagggtcaatttcagctagttaatgttaatgtatttttattttggacatgtgtctgtgttgcagtgatcttcatcgggcgtcttgtcttacaatgaaccaagaatctcagcttcttttcaggaaaagctgaaagtgtgactattaccactcaaacaaaacaaaatgatcttcgctatttatccaattgaagtcacgttgtcacaatcgctaattaaaagaattttcatttaaaattgtctacatagaacagaaattttcttcacttaagatcttacaaaagcgcagatgaaaatattaacaattattcgtcaaaattagtagtatatgtacatcgaagtacatcgtacatggtatgtaaaattggaaaaacgtgtggacaagacccccgattaccgaccaactatggtgctgctgcgttggtgaatttgtggttccttggtttgtgggcgggtggaggcgttggttggcggtgcaataaatagcagcagagagcggcaaagggcgtgaaaagtagtgttttaagcgagcatccaacgttctttgcttgcttccagtttatgctaatgtataactacaggattctgttgaacacaaacgcccaccatgggtgacgacgaggaggcatcgctgctgctggctccggtggccgagccgctgctgccactgccgacactttgagagatgcccacctgcgcggcgggtccggtgatgtgccgcctttggccaaccacgccgacacccactcctccggatccaaccgatgctgatcccgaggagacggacgacgacgacgagggcggcagttgcaggggcacggacatgggcagtggcatcggcagtggcaggtcgctcagcgaaccgagcgccgtgccatagagcgttccggcgggctgagatgggaagagaaaggcggcagctgacggcgtaaccggattctggccgggattgccgccgccctggccaccgcccgccgccgaggcgctaatcacactcgaatcggtcatcattaggtgcgaggcagcagctgctgccgctgccgccgccgcagccaccgacgaggacgacatgttgccgtaatagggcaccgaattgggcgcatagctgttcggttgcagttgcattatcgctggcacccgcatcctgccgtgtccgtttggcggcggtggcggcatctgcggcggatcacattccatggcgtgcggatagctgatgctgttgtggttgttgctgctgccgctgttgtggtggcccaccatgttcaccatgttgctgccgtacagacgactgtggcgtgtgttgttgttgctgctgttgctgttgttgttgtggcagccggtgctgccgggactgatgtgattcaggctgcccaggctgttggtgctgtgatggctattggccagcgatggcggcggatgggcgttggactgcaggctcagagcggagaagttgttcatcgcgttggctgccaccgaatgcataagcaggcctgaaaaacaaatagatgtttgtctttaaatgggtttcatatgctgaggttgtcctttcttagaaaaaaccagggacaacaacttggtcatcctcggagaatactatgcatcttggtctttcaactcaactcgaaaatcttcgatagttgttaacaatattcattaaataattaaagttccttaaacagttctatgaaaaccaattagcattttccgtgaattcaagttatttgatcttttgcgcccagcaaacattaaagatttctaacccatgctttttttttgttgattatatcataagtttttattgaagatttttttttcactttttttgtaatttttatcttttgctttggtttgctttagttttttttgtatgaattccttttctggtttggttttggtaaagttttcgtttcggtttcattaatcgttaataaattatctcgtacttattcaacttaaaccatcagctgttgtatgtttatattatataaatgccacacatgttgcatgtccatatgtgtgtcggtctgtcggttttctgtgtatgtgtgtgagtgctttttgtgtcttttgtttttggtttttttttttaatttgggttgaattcaaattcaaatttcatatttttcatatcattgcaatactgtttcgtaaaaaaaatgcattatggtctccccgcttttccgtctccctttaccgctattgcacttcctttttgctttcatttccgcttcctttccaaaatgcaactctgcccaaataacaattggttatcgttatcgttgcagttatcgctcttattgcatacttcgccatcttctatgtgttttgctgggtatgtgtgtgtgtatgtatggtgacttttaaacttactcgacctataacactcgcttttcgggttttagtattttacacaagttttgttaagtgtctctccggttgctgttaaattcatagatcatggatcattttatcggggctaacctctaattttaataaatatttacttttttacttttatatgtatttcgtatccgtttgtctgtctgcgttttcgtctgtgtctaataaaagtaattgagtttttccgcataattactcgtaagtgttatatatagatgtatgtatgttaatttattaaatgctaaagttcttctctttagtacgtactgatttaatttgttatgcttgctatacggtttcatttgttttcttattcacttcttgtggtttactaaacgcattcatttattcatttaccaattttttctgctatttttacatgcctacgactttatactttttacaaactatgatttgtgtttggttttcaactcgtatttcgcatattagacgctctatcgatacttatcgccatttgtttatcggttatcgcttatcaatcgttccaattaaaactgttttgcatatatttaaatattaaccgcagttttatttctgaaagtgtgtttcgtttctattagacctttgttgcttaacatttttgcctgttctttttttttcgtttttgctttttgtatttgtaacaaggcccgaactttttgaagattgcggcaatgttagggcttcatagggttaattattttttgcggttgtttttatcacaaaagaaagcggctatcgcttgctttgctcgctctccttcttcgctgaggtttcgttacacgaaatccctgtaattcccaaaagtttgagaaagagagcgagaaagccacagttacgttatccctttaatgcccagaagtgttttaccacacaccaaaagggtcgtaaaagcaaatataatgcgttacgctatttatagagtaataatttatgtacgttcgattcagaaattacgggcattcattagagttttaaatgagggttcaataatttcgttagattatctatatttataatgtcataaatcataaaaacgtatattcttttgaatgaattgagaaaactattataatttgcttttaccacacattatccgacggcaattaaaggtttaaaacaaaagcgaacgctatagtcgagtacccagactatcagatacccgttactcagctagtgaacatttcaacatttttctgaataaaataaaaccgaataaaaatttcaaaaccttttttaaaagtgtgggcttgaagattaatacgtctgttaatacggacggacaggaccaaatcgactcggtaagtaatgccaatcaggaatttatatgcttatatctttttcacacattttcaacgaatcaagcgagtaacggttataattagggaataaaaaaaaaaaaaaaaataactatttatgtctatgttacaaactggggttttccattaagttcacttctcattacttgacttttgtgtatgtactttggttactaaacagattcctttcctaaccacttttttgcttgtgaaatttgtttcgtttttacatgtctacgattttcgttttggatttatactttttacaaactatgatttgtgtttcgtatttcgcatatttcactgagatccattatcgctcttacaaattttcgtttttcgcgcttaaatattttttcgaaaattaaacagcagggtcgcagcatagttcgactacagaaattatgaattcgagttaaaggaagatcactgtttctataattatcaaattgaaatggtagtgaattaaagtttaattaatttaagaaactctcgagtgctttcttttttatgctagaaaaggttagtaaaactgaaaccttaatcaccttttgcagatgattttaaaagttaacaagaaaagttgatactgctgaaaatgtttacaagcattcgagatttgaaatgatattttttttttaaaaggaaatttaaatttgctacgatattccctgctgttcgctgtttctctcagtgtcgtttaacttgtatatacctgtacttatgcatatatgtatgtatattagatgtatgtatatatgtatggcagtcattaagaaagtcgttaaggattcctcttattattattcttatgtattcgcaaactcttcgtacggttctatgacactaatagcttagacttaggtaattactctttagacatttttgcggtattaagttgacaaaaaaacgttaaacacttaacacacgattgtttttcatccgagcgcttaaaatgcgtgagcacgatacaaattacatattaagttctaaaaaaaaaattctcggtttattggaatcagttgtgaaggcgccacattacttctgataggaaaacaaacaaatgcatttcttgtttttttttttgttttaagtggcgttcgagaaagagagagatacagaggcgtggaaagagatagacagatggtgtgtgtgtgtttcaatgtgaaagagatacatgagtatttacaaaacgcagtagctattagatataatggataacatgaccatgttgcagctgctcctaaagttgctcgttgcacggttgcacggttgctgcatgccgcatgctgcatgtcgctgtttactgttgtggcatcctcgtatttgccgccgcagtcgatgttgctgctgcagatgtggctgccgttgttgccggtcatcggcgatcgtctgctggcatcatttgaatttgcatgggttttatttgacacatatttgtatattcgagtgatcgagcgaggtgttcgaatagaaaaagaaaggaatttatctttatatgagggaccaccaatcatcattgcttgcattcttgcttgctactcatcacaaacttgagtatcgtacaacaaattaaattcgcactatgcgccgaactaaaaataaaacgaaacacttcttataattaagggtgactagtgcaacataatggtaatcataaattagcgtatataaatcataatcataattgcctaatacaaacaatatattcaattacaaatttgtccacagctaaaaactaaattataaatgcttttcgtttgcacacacacacacacataaaacacacacgaaattcagcaactgaagatttcgatccttcgataaatacagtacccactcgctacgaactacaacacataactgagagagcttttgcttcaaagcagctccaaaaaaaatcaaattcataatcaacaaacacaaaattctgtgggacaggagctacaaaactcaatggtatcgattttaaaagccagggaatatcaatgcaatctgcggcaatagaacatggcatcaacatcgacaaaaagtataattagttaatgaaactatcttagattttgattttaataaacaaaaatgtttttgatttcaatatttgtttgattttgattattgacgccaaactccgaccacagacttcatcaataacctgcagagattactcccccaatttgcatgccttaaaatcaactactactcaccgtgacattggccatctgacgcaccgccaggacccgcgagtggtggcaacggcaagggaagcggcaatggcagcggcatcgcctgctgttgctgcgctgcggaggatcccccgccgacacttgaacccgaaccggaggatcctgcggccgtggccgctgctgtcgccgccgttggagccgctgcactggatgaggagaccgcaccgctactgctgttgctcgctccgaggccaccgccgacgcctccgccgctggagcctcctgctccgctggaaccggagccaccggctcctgcattcgctgtggcgcccgcgccgctcgtattggttgcctcgtctgccgtgcgcttgaagaagttgtgctgcagggcatagtagggcgtgacccgtgtcttggggtcaaagtcgagcatgcgcaggatcagatccttgaacttcagatagtccgagacggagtggcccggctcatcgagacgcctgccccctggaccgcctgtttccactccgaggatgtcgtgaagcttgcgggatcctggcggcttgtacttcctgccgttctgattcttcttcagcacataggagccatcggcgacgatcttgtcgaagaacttgcgggtcttgtgcgcctggtcgagcagatacttgggcggcatgcccagcacctcgacgatcttgttcatctggtccacctcgttgcagccggagaagagcggctcgccggtgtgcatctcgaccaagatgcagcccagtgaccacatatcgatggccaggtcatactggatgccaagcagcacctccggcgagcggtagaagcgcgactggatgtagtggtagatctgtggggattcaaggagtacattgtttagttttgaatgcatatttgaaggactctaactctacgccatcacttacccgctgtcccaactggcaggagctgccaaagtcaacgatcttgatcgccgagcgcttcgggttgcagagcaggatgttctcgggcttcaaatcacagtgaattatgttcagttcgggggtgctgaggaagagcagtgcggtgcacagctgctgggcgaacttgcgcgtgaggttcagcgaaacgccccggaagttggtgttccgcagcaggtcgtacaggttgtatgagagcagctcgaacaccaggcacaggtggttgcgccacatgaagtgccgcttgagcttaactgcggatcaaaatgatttcaatggattaaatatgctttgtactttagtaaaggtatatatatagattcacataccgatgtagtatttgttttcggcatccgcccggttcatcatctcgagcaacttgacctcgatctgtgcctggtttaggaacggtttcttattcttaattatcttgatcgccacgtggcactgctcctcgtggtcgtaagccttcaccacctggccaaaactgcctttgcctgcggaaacgtaattagtaaatgagttaaatttcgatagatatatgtatgatccccactcaccgatcagagagtcgatctcgtagcgatccaaaaacttttcgccattcttgattatatagtcgtgattatcgtcgtcgtagccgtcgttataaagttttcgctcctttttgttagatgagtcgtcgtctccttgcgtctgctgggcacgacgtttctttttcgcatagtaaacctgaaatgaagtaaataatattatcatatatattaaaaatttacaaataaaaaaaaatctttttttaactataaaacaaaaaaacacatttcatgcttttgttgtaatattatgatcatgttcgccacctggcggcaagtagagtgacctaaagggcaacaacgcgaatctgccaggagaatacgattatacacttaaaatagtcggatcaatttcaatagatagcatttctgtgttgtttacatatattagttttctaacccattataatatgttcaaaatgcatgtgaagtaatagaaaaataatacaatttccaaaaattgaagtgttaaagataattggattctattggccagttgcaagtaatcccgttacttccacttcatcaacgacaaatgtaaacacaaagtgggaagatggggaaatcgcgaaaatgagaaccaagaccggcaaataaaaaaaaaaatgccgaaagagggcgacgccaagctaaaaaaaaaaaagagaaaatcctctctccctttttcgactcactctttcgtactctctttttccccaccacggcttctctttcacgggggaaaaaaggctgcagcttggtgaaaaaagttgttgctaacgcggcaagttggcggtggtgcaagtgagatagcaccacgttgcgagaggatacaggagacagagtcagaggaagagagccccactctctcgaaatcgaaaactgtagcatacaaagcggcagcgaaaaggcatttgcaatattacggcatctccaacggcacaagctgccaactgcaaatgtaactgtaacttctgtcaaaagcactccaactgctcgagagcacctgtcaaattcaaatacttgcaacatcgctagctgtcaaatcgcccaactgcagcattctcatttaccgatttcaatatgtttgacttccgttgagaataagctacattttaagatgccggtttaaattaattacaattaagtacgctttgtcaaagaaaatatagaatatagtagctatccttaatgccagaaagtgaaggttttttttttattgggaaaagttgcgtgcaactcgtaagaactcaaactgcgtgaaatattaacatttttatgaggcatgcgacattcgccccacccactcaaggcgcataatcaccgatttaggtcggcggcattttgtcatagcgtcatttgacagtttccatgagaggccatcaagaaacaagtattagttattcgggggacgttctcgttgagaaatttgggaacttggcaggagaaccgagacagttgcgtgtagcatttatgctccttttatttatttattttttttcggctgttgtcaaccgaggcggcagacgacgtcaatcgaagccaactgcaaatggctggctgcgggggaacggtgacgctgttgggggaattgaccccacgaacgggtcaaggacaaacgtatctttagcccagctcaacgccacaaatatccgctgtcagcagatagtcagacagccgaaaaaagaaagccacaagacgagaaaagcccccgacgaaattccgatcgacatataagcgtaaataaaaaaaaaagaagaaagaaatcgggatggatggatgccaaggttccttcgtagttttgcagactacaagaacaacatcatcgcaatggtaattgataaggtagacagttacataaactagatagaatatactttttgaaatgatatggaatcttgccaagctaaaatatcaatagaatcactatttactaatgcaaatgaaaacagaaaagttatgtgcattgtaacgacaagagaacctggtaaacatgatccaaactcaatattgccacgataaacataggattttatgatcaaatatccaattatcaattggttctcatatgttttgcttgtagattaaccagattaaacgccagttatgggccacactcacctcgttgatgtgcttgtaggtctttatcagatcgacactcagcttgcgcaaaggtcccgaggcgggctcccgaaagtggttgggaatccgggcctgcatggcgcgcacctccgacgaagacgagggactagagtgctgtggaatgagatggagaacgtattactcaaactgttcaataaagtgatgcccagctagctttggctcagatcgtgctcagatcaaatcatttttattttgaacacaatctctttaatttcttaaaacaacattattaatgtacttgctaagcttcgttattaacataaatacgcagtcttaatggccgcattgagaaaggcaaaaccagtcctgaaaaataccattctttgttcttccgagggcgcggctttctcaaatgcgccataaacctttctaattgcatgttttaatttaagtagagcatgggaaaaagtaagttcatattcaacgaagtaaagttatcttttacacggctccgttgaaatatttgtggattttttctaaacaaaaaatgttctacaatttctaaaagaaagaaacacaacttctgcatgtcctttgtgtgtaaatgcatgttttggattgaagataaggataatgctagttgataatactcacatggtgcatgacatcccggtgcgtggcaggcagatcctctgcgtcgacgaatcgcccgtagagtggggcgtggcgctgtcttccgcccccgcttccgctgccctgcgctgcgtcgacgctgccgccgctggacccataagcggacactagagcgtaagagaaaggaagagatcagagatactatcagatatcggcgggaattatacaaatatatatgtgtgtatatataattattgcgatgtatttgcttgccgccttcgttgtgcgccgttctgtgctggttcattgaccggatcgctcggacaccgctcctctgcaaaatgcacctgttttcttgcacacctgactacgtcagcgtcaagagttgccaaaacgataataaaagcaaagggtagggcgaaaagtgtggacacacaccgcaggaaaaacactgccaattcccatttaagatctgatatagagccagcccagagtcatgcattctttttttaactcaagatgcaaaattcgttctaaaattagttgttgaattggtggtcatactagtgagttaaagatagtaagcacatgatgctgccatataaaaaaaaacgaattggaacatttctcttcctttccgaagaatctacttttgctagcaatatttttttcctgtgcattggcaggccagcagaggtaagtaaaaaagaagctctaccttaattttagaaccagacggaactgaactgaaattattacacaatatgcaggcgcagatacataattctgccgtttgtagattctatttccccacgttcctatgaccatttcacatgctcactctttttgttttgttgctcttcgctcttcgttcgctgatggcttgtgcaacaaaaatagacccaacgttataaacaagaatgaaaaaatcaagcaacagggtaaaacctgtaagtggcagcagctgtgttttcgatgataatccgcgacatttgatattccaacactccatttctaatttccaaaaaaacatgtggcgagagcaaagatacttttcctttctattcgttgactaattgtgcaaacgcaaaaaaaaaagttgtcggtcagttaaactgacatgcaacaaatttttctaggccaacttctctgtttcatccaatgggcttactagtataatagagtgcccgttccgccttcattctcgatgatgatgatgacgatccctgaaccatcagcacattgccatcgacccgatctctatctctatctccatcttcatctacatcccgcttcacatccaacagcaccgtgtcccaggcacttttgggcaggaatttagagatgatctgatggccagcgtcgtcgtcatccgcctgatcctgattgccatttgttggccaatttctgacacgatgctggcagccaatttgcgccaaataattgatgtaatgaggcggatgatggtgattgtggtggccgttgtgcggatggtggttcaagctgctgctgctgctggtgatgatgctgctactgaagctgccaccagctgctgcaccaaccacgaatggcgcccaatccgcggtggccttgtcaaccggatcgccgccattcattgactgccaataaaccagggccgtcgacatatcactggcaatcggaatcgcaatcggaatcgcgaacgcactttgcactaaccgcttccttttttcaatcaaaatgatatgcttatttcgtttatttttatatagtttatttaagtaatttaagatccatttggatctggctgtatgaagcgcggtctgtttcgtgtgaaaattcagcgcaaactgcctcggtttttgttcccccagttctgtccccaaagtttgccactcgtcgttgttgttgttgttgtcgtctgttttatttatacggaaccgtgttttctccctgctcttttatttcacttggtgtttttgcacttttttgctgcacttatgcggaacacacgaacgaagccgagcgccgatagcgagattgcagcaacgatcatcacgatctcggcgtggtaatgatcatgaagctaaagtagggaatgcccggctatctggcatcggaattcgctatattaacactacactagactcgttcagtgttgcacaattgcatttgagtaaatgggaaatagaaaaatctcttggtgatatctcttggtcaaatccatacctttcgacctttgtttcggagtgcacatctctggtgttgaagaagctcaactgattgaaacagtgttgggtaaatacctttcagtatctccatattgatcacagagttacttgcacttgcttgtgattaaccacaaacgaataaatcggttttcttaggtattctcccccattattgttggtgaaaagctcacttctggctggccttttgttttctatcacaagtgttttttttgacagagggagttccgcttttcgttgataatggcatttcaataatgacatgtagcgtagtgacatgtagcgaatgcatgtggggtaaatgggggaacgctgggtggttgtgggtgggaaagtgctcgcacttgtctcgtgcgcgcaaagatacaaatatacatacatacatacatacatacatatgtaagtatgcatttctttgtttcggcttttgcgtcgtcggcaagtcaaggaaatcaaaacaaagcaaacgaaatgtgaaattaaaataaaatgtaattaaccccaggcaaaaagtgtgtgtacataatgcagtgcgttacaaaactgtataactggttgagctgccacttggcagagtgggccataaaaataggaaatcgttttcgaaactaaaatgcccagtaatgccaaacgattttgaaataattataaacttgtgttctttcgagttatgtaaatgtctgtctacacgccaagctaatttgtgttttccatttcgccaaagcaattaaaaaatattttgcttttataataaacaaattgaacgcttgccaatcgatggaagagttgaataattaatgcgttcggggcccctcgaaagattcgcaggagcatagccaccagtccctctatttatagggatcccatccgatccgatccgatccgatcctccgttcgcaatgtgggatctttgccccaaagttctcatgttcgttgtttgtctgtcgcgtctctcggccgaaaataaaaatagttgacgacattttgcgttcgctccccgccacctttttggccacttgcattttgggcgaggaatgaggggggggggggggatagggccactaccaacaatcacacaccatcgataattgcatccggagcaggtgactcacatcgtgacgtgactgcgactgtaatactactattacccaccacttgacaactttatgaacagatggcggcgccagctaatcggatactaaagtctcgacatatttggcaaataatggggaagtcccgcatagacttacgggtttttcaaaacagtgcggattggaacaaatacagacggtgacggttgagtgataagcaaacagttggacatattatttactgaatgaatgcagtgacattgttgcattcctcgcctgagcaggaaaagcggtggaaatggtggggaaaggcagcccaaattagctgttcgaaatctggccattatttaaaatagcacctgatcctgatactaattattattatcggtgatatgccccatttgcgtggaattattgcagaacatggcactgccatcgaaagcagtaatattgaactgatttattctcgaaaggtaaataatgtagtatcgttacagctgtactactgcggccacattaacaccattttttatcttggaatgtcaagtgtatttgcaaaatgactgacttttatttgatttatagtcagtcccctcgtatttacaatatagcactacaattttcgattggcacaaagtaccatctatatggcaataaaaactaacttcaatttacactaaaaaaatgattgtaccgaataaattcgcaggatatacttcaattgacaaaaagaagtggttataaactgggtttgcaatggtgaaaggttgatgaaatatttggcagtttctggagcggtccgagcgatatgatccttagttttttttttttttttttttttggaaaaggatcagtggataatacttacgtttctgtttattcttatccataacgccgccgctattcgtatcctctaatctatacatggggatgatgtttgttggttttgcgctgattaatgaatctttacttggtttgttggctcctatgtattacgctatatgtacttgacatatatatactcttgcttatatatatttatatagatgaatatatatatgttgcgttatttgttcatgcgatttggatagtttgaaattgtgtttttgtgtcggattttggttgcttgtgatttgtaggtttttttttataaattaaatatttttttttgtgtattttgcattcatttcgttatcctttgcgtcgttgttgttgccttattacttgtttttgtttgaatttcctttcgtgattaccagttaatatagatttatgtatgtggtattggttaatatatattttttcgtatatatttttaaatgggtcgaatactttttgttgtttgtttaaaattatgaacacaagtttcaagtctttttttcgaatttgctttaccgtttgtacgcgcacttgtcacgaattacttttctttcttttttacagtgtaattgtcaaacatttatgaaacaaacaaaacaaaaacacgtttctcctgctgctcttgttgttattattgttattgctctttccgtttatttaccgctcgacattgcaattacacacactcccacacaacggggcgtgtgtgtgtgctctaatgaaaacaaaacacacacacacacacgcgaatgcgaactcacacgcacacagtcgcaggggggaaatctgagaagaaagcaaaaacttttgcgatctgtctttcttctgcgttgtatggattgtttttttgtttttgtcttctctttatcgatttgttagctagaatctatcgattttctcaagttaatgtacttttggttttatggtaatttttggcttccgctatgctcaacattttgcataaacatttcaaaagcacttttaaatttgaatgtttccttttgcaattgataatggtaaaaaattgtcgccacgctttgtttacaaaactgtactgctgctgttgttgtttgtgctgctgcttgctgcaatgaaatgagagaaggcgtttgtttaatcaactaattgaattgtaattatttatagttaagtatatatatattcaaatacgcatatatgtgtatgaattggggagccggaaaaggtttgaagcgtacgtcgcaaataaaaataataaataataacaatcgggcgctctctctgcctctgttaacgcgatgttaatcagctcgctctcccaactctctatcgctctgtgtttctctttggcaggtgaacgaacgacacgcgacgcaaaaagcatgcgtctgtgtgcgagcgagagagcgcgcaagttcaacgtgtggcttggcttttttcgttgtgtttttttttcttctgccggggcgccgcctctaatacatacatacacacacacacacgcccacctctgacattgcactcgcacacaaatacacgcaccgtggagtgacagctgtttcaagttcgatttcgatttcgattactcgttttcgactctgttgtcaaggcgaaaaatttggtgtgcattttaattacaaatgtcgattaaccccacacaatacacaatatacgtgtgcaaatattttaattagctaaacaaaacaaagcccacacgcgcaaattgcttttgttgtctatgctgcggtgaaagtggcgtttataagcgtttagaggtgcgctgcttgctactttttcttgctttgttgttgctcttctgtcggcatttcgcgattttgttgccaagcaaatggaattgaccagcagacgaccagggttgccacccctccttcaatttctggctctgcctcgcggcgcaaaaaaagggataacaaacaacaacagcaaaataaatgcacaattgtacagctgcggttagcactctagtgacgaaggctatacagcaaatttattaaagtgtaataataacaccaaacaagaaaactatgcaaaatattattattaattattatcatttatggaatgcaataaaatgcacagaatta

SEQ ID NO: 27935 - DNA, 3764 bp, DROSOPHILA
aagcagcagcacaaacaacaacagcagcagtacagttttgtaaacaaagcgtggcgacaattttttaccattatcaattgcaaaaggaaacattcaaatttaaaagtgcttttgaaatgtttatgcaaaatgttgagcatagcggaagccaaaaattaccataaaaccaaaagtacattaacttgagaaaatcgatagattctagctaacaaatcgataaagagaagacaaaaacaaaaaaacaatccatacaacgcagaagaaagacagatcgcaaaagtttttgctttcttctcagatttcccccctgcgactgtgtgcgtgtgagttcgcattcgcgtgtgtgtgtgtgtgttttgttttcattagagcacacacacacgccccgttgtgtgggagtgtgtgtaattgcaatgtcgagcggtaaataaacggaaagagcaataacaataataacaacaagagcagcaggagaaacgtgtttttgttttgtttgtttcataaatgtttgacaattacactgtaaaaaagaaagaaaagtaattcgtgacaagtgcgcgtacaaacggtaaagcaaattcgaaaaaaagacttgaaacttgtgttcataattttaaacaaacaacaaaaagtattcgacccatttaaaaatatatacgaaaaaatatatattaaccaataccacatacataaatctatattaactggtaatcacgaaaggaaattcaaacaaaaacaagtaataaggcaacaacaacgacgcaaaggataacgaaatgaatgcaaaatacacaaaaaaaaatatttaatttataaaaaaaaacctacaaatcacaagcaaccaaaatccgacacaaaaacacaatttcaaactatccaaatcgcatgaacaaataacgcaacatatatatattcatctatataaatatatataagcaagagtatatatatgtcaagtacatatagcgtaatacataggagccaacaaaccaagtaaagattcattaatcagcgcaaaaccaacaaacatcatccccatgtatagattagaggatacgaatagcggcggcgttatggataagaataaacagaaactgtccgcttatgggtccagcggcggcagcgtcgacgcagcgcagggcagcggaagcgggggcggaagacagcgccacgccccactctacgggcgattcgtcgacgcagaggatctgcctgccacgcaccgggatgtcatgcaccatcactctagtccctcgtcttcgtcggaggtgcgcgccatgcaggcccggattcccaaccactttcgggagcccgcctcgggacctttgcgcaagctgagtgtcgatctgataaagacctacaagcacatcaacgaggtttactatgcgaaaaagaaacgtcgtgcccagcagacgcaaggagacgacgactcatctaacaaaaaggagcgaaaactttataacgacggctacgacgacgataatcacgactatataatcaagaatggcgaaaagtttttggatcgctacgagatcgactctctgatcggcaaaggcagttttggccaggtggtgaaggcttacgaccacgaggagcagtgccacgtggcgatcaagataattaagaataagaaaccgttcctaaaccaggcacagatcgaggtcaagttgctcgagatgatgaaccgggcggatgccgaaaacaaatactacatcgttaagctcaagcggcacttcatgtggcgcaaccacctgtgcctggtgttcgagctgctctcatacaacctgtacgacctgctgcggaacaccaacttccggggcgtttcgctgaacctcacgcgcaagttcgcccagcagctgtgcaccgcactgctcttcctcagcacccccgaactgaacataattcactgtgatttgaagcccgagaacatcctgctctgcaacccgaagcgctcggcgatcaagatcgttgactttggcagctcctgccagttgggacagcggatctaccactacatccagtcgcgcttctaccgctcgccggaggtgctgcttggcatccagtatgacctggccatcgatatgtggtcactgggctgcatcttggtcgagatgcacaccggcgagccgctcttctccggctgcaacgaggtggaccagatgaacaagatcgtcgaggtgctgggcatgccgcccaagtatctgctcgaccaggcgcacaagacccgcaagttcttcgacaagatcgtcgccgatggctcctatgtgctgaagaagaatcagaacggcaggaagtacaagccgccaggatcccgcaagcttcacgacatcctcggagtggaaacaggcggtccagggggcaggcgtctcgatgagccgggccactccgtctcggactatctgaagttcaaggatctgatcctgcgcatgctcgactttgaccccaagacacgggtcacgccctactatgccctgcagcacaacttcttcaagcgcacggcagacgaggcaaccaatacgagcggcgcgggcgccacagcgaatgcaggagccggtggctccggttccagcggagcaggaggctccagcggcggaggcgtcggcggtggcctcggagcgagcaacagcagtagcggtgcggtctcctcatccagtgcagcggctccaacggcggcgacagcagcggccacggccgcaggatcctccggttcgggttcaagtgtcggcgggggatcctccgcagcgcagcaacagcaggcgatgccgctgccattgccgcttcccttgccgttgccaccactcgcgggtcctggcggtgcgtcagatggccaatgtcacggcctgcttatgcattcggtggcagccaacgcgatgaacaacttctccgctctgagcctgcagtccaacgcccatccgccgccatcgctggccaatagccatcacagcaccaacagcctgggcagcctgaatcacatcagtcccggcagcaccggctgccacaacaacaacagcaacagcagcaacaacaacacacgccacagtcgtctgtacggcagcaacatggtgaacatggtgggccaccacaacagcggcagcagcaacaaccacaacagcatcagctatccgcacgccatggaatgtgatccgccgcagatgccgccaccgccgccaaacggacacggcaggatgcgggtgccagcgataatgcaactgcaaccgaacagctatgcgcccaattcggtgccctattacggcaacatgtcgtcctcgtcggtggctgcggcggcggcagcggcagcagctgctgcctcgcacctaatgatgaccgattcgagtgtgattagcgcctcggcggcgggcggtggccagggcggcggcaatcccggccagaatccggttacgccgtcagctgccgcctttctcttcccatctcagcccgccggaacgctctatggcacggcgctcggttcgctgagcgacctgccactgccgatgccactgcccatgtccgtgcccctgcaactgccgccctcgtcgtcgtcgtccgtctcctcgggatcagcatcggttggatccggaggagtgggtgtcggcgtggttggccaaaggcggcacatcaccggacccgccgcgcaggtgggcatctctcaaagtgtcggcagtggcagcagcggctcggccaccggagccagcagcagcgatgcctcctcgtcgtcacccatggtgggcgtttgtgttcaacagaatcctgtagttatacattag

SEQ ID NO: 27936 - protein, 828 aa, DROSOPHILA
MQARIPNHFREPASGPLRKLSVDLIKTYKHINEVYYAKKKRRAQQTQGDDDSSNKKERKLYNDGYDDDNHDYIIKNGEKFLDRYEIDSLIGKGSFGQVVKAYDHEEQCHVAIKIIKNKKPFLNQAQIEVKLLEMMNRADAENKYYIVKLKRHFMWRNHLCLVFELLSYNLYDLLRNTNFRGVSLNLTRKFAQQLCTALLFLSTPELNIIHCDLKPENILLCNPKRSAIKIVDFGSSCQLGQRIYHYIQSRFYRSPEVLLGIQYDLAIDMWSLGCILVEMHTGEPLFSGCNEVDQMNKIVEVLGMPPKYLLDQAHKTRKFFDKIVADGSYVLKKNQNGRKYKPPGSRKLHDILGVETGGPGGRRLDEPGHSVSDYLKFKDLILRMLDFDPKTRVTPYYALQHNFFKRTADEATNTSGAGATANAGAGGSGSSGAGGSSGGGVGGGLGASNSSSGAVSSSSAAAPTAATAAATAAGSSGSGSSVGGGSSAAQQQQAMPLPLPLPLPLPPLAGPGGASDGQCHGLLMHSVAANAMNNFSALSLQSNAHPPPSLANSHHSTNSLGSLNHISPGSTGCHNNNSNSSNNNTRHSRLYGSNMVNMVGHHNSGSSNNHNSISYPHAMECDPPQMPPPPPNGHGRMRVPAIMQLQPNSYAPNSVPYYGNMSSSSVAAAAAAAAAAASHLMMTDSSVISASAAGGGQGGGNPGQNPVTPSAAAFLFPSQPAGTLYGTALGSLSDLPLPMPLPMSVPLQLPPSSSSSVSSGSASVGSGGVGVGVVGQRRHITGPAAQVGISQSVGSGSSGSATGASSSDASSSSPMVGVCVQQNPVVIH

SEQ ID NO: 27937 - DNA, 6145 bp, DROSOPHILA
ccgtaaacaaaaaaaaaaaagttagtttcgacacactccgtgagagccaacaacgatttgagcagcctgtcgagctcgacgatcgacgttaattgcaaattgtggactggttgctcctcgcctcgactcgaagtctctatgcgcaaaaaatcaaaaaaaaaactggtgccgccgaattttgcttgttgctttgccacccaattcgtcggcaaattttcgatgtttgtaaaaatagctgtgcaaagggggcatagaatcggcagatgtacactttagatacccttccgcgctatgaaacttccaaatgtaatagttaaaaagtattaatatattgtatctcaccaattaaatgcaattgatagggtatgcagtagctgccaatgaaatgaacagaaatattgctgagtcacataattactctatcaacagagaaagcctctgtttaactaagattgcattttaattttatatgcctatgatttgattagatacatatgaattaaatattttcaaggtattgtatgtataataatgactattccaaatgggcagactcgcaaatatgcttttaattcgtgacgagcgtgatacgaactataaaaaaaccggcaaagcgaatcacgtgtacactaaaaataaaagagagtgccgcgataaatgtaaagagaacgatttagccggccggcgaaaaaacatacagtttttctctctgttcggaatttggagctttcaaaacaaataaatcattttgaaagctccggatgaaaaaaaaactagaatatcaagctttggatgacataatacattgagaaaaacgattagttaagcaaaatgaataaatatgaataaaaaatggaatgcaagttatgttaaaattaattaattgcatatgtagatagatttttaattggcgtaaaatgtatatttttggattataatattgacgatactttttgcatttaaaatatgtttatccgctcttcgatatatttaattgacattatttcaacttgaactccgagacttggtgtccggcatttagtagcagagtctctggagttgtgggtgcccccaagcgaagccactcccgaggaagtcctgcatcctggcgcgctgattgcagagcctgttgaagtgcaaaaatcacactaacagccaaacagcaaggaggctctccggtggcctttgagcccatgaaacccgaactactcggtcgtggattgtggaccagttccacgcggaaatcaatgggaatgtccttcgcacccaacggcttgtagttccatgtgcggttagtcagcaggcgaccattgtcgccctcgtagatgagcagttcgctgagccagtagcccaggcccatgacgaaggcgccctccacctgaccgacatctatccagggactcaggctctcaccggcgtcctctaggatgtccacccgcctgatcagaatgttgccggtcagcacatcgatctccacctcggaaagggcaagtcccagcacatggtagttctgcatgtcgccggtcttgtagtgatccgaggctatcagattgatcaactgggcattggccgcttccacagtctccacccaagtggccttggccttcctcactggcttcaatcgggcattgagcgtctcgcagatcttacggactgcgtagcagacactctcgcttccgatggcatagccagtgaccattgaattggctccattgatgctagttgaggactccactttcacgtagctcaaatcgattcccagggtataggccgccacttgagctatctttgtattcatacctataaagcataaaggaggtaatcactacaaatcctataaaagtctgctcccttacttaccctgacccatttctatgcccccatgggtaaccacaacagtgccatctacatggtaaatagtcaccgttgccggaaactgcccaatgtagataatggggaagttcatcaaggagagacccaagcctctttttttccatcgattgttggcattgaatgcctcgatctccttcttccgggagtagtactccctagtcttgaggaactctggaaagacggttgccatcttactcttcttactaatgtttgctagtcgcacttcggctgggtctttctggatttcgaatgccacgtgctcgatgatgttctccatcatagcaatgccctccactgatccaggagcacggcaccaagtggaacttggggcatccgtaagaacagcatgaccactcagcttgaagttgctatcggtgaattcatagcagttggctgctgtgaaagtggagtgtccttgcacaggactctcgttcgtgttccagccagcgtcctcgtaaaaatcgttggacagcccgacgatcctgccactggtcttcacgtgacactgatattcggaacgacaggcccacctctttccattgcaatccatcatggactccagggattggacaaagcgaacgggacgattcagcttatgggcagccaaggcggctgcacaggcaacctggttacctctggatattttgcagccatatccaccacccaatctgcgaacctgcaacgaaagtactcaaataataagacaaaaatttatttaagtatttgtcttacctctagttgcacatctttggctttcatctgcagggtatgagcaatcactgattgagtctgatcaatccattgggtagccgagaagacctttagtccatcttcaaagggaataataatagtggtctgcggttccatggtgaagtgatactgcagtcccatctcgaatatgcccctcacttccaaatcaggtttgtcagaaaactttacttccttaagctttgatataaccaagggtataatgcgagaagtatctggagtttcggaggagaacacatccttcaaactcggcatcagcttgaagttggaactggggctgctatagctgatcttgacaagctttgttgccctttgggcttggtcagcagtaagagccacgattacacccactggttgttccgagtggcgcaccattccagagcagaaaatctcctccgcttcgtaaccaaaactgggctcacagaaagtattcgttccgggaatgtccttcgcagtgtaaaaggccaccactcctggatgttggagagcttccgtagcatcgatttgatcaatggtggctcccacctttgtggcgcccacaaaggcgcagtaaacggagttggaagtggtcagcacatcgttcatatatgtggcctctccggagcactgaatcatgccctccagcttctgcacgccctgtgtcacggggtaggtctgtttattggtctggaagagctgcaagccggaggagagtggccgctggagcagctcaccgccgctcttgaactttccgctgacctccgcatcgggggcgtgtttcaagaggaacttgtagagcagtccgcaggccaatttggaacggtaggcgggactggcatcgggtagaacctcatccggcttgaccagactctccagcttgttgaatgtttgttccaccaaatttgattcgtagggactgtgacccaccattaactgttcaatatctgtggcatgaatgaaatccggtcgaattccaccaaagcaaatacgggcagatttcaccattgagttgccatccaattccagaagaaatcctgcattaacataagcatgagcattttgcgctcttggcatgatctaccgatatatgaataattttacaaattttagatattaagattttccgaacaatattaccttgaaggagtcgtaaatatacatatccttggggtatctagggagaatgaaggccttgagcagcatttttctatccgtatcacccaaaaattcctctaaagtcatttctttttcatcgtcgatgcctttcattgcaacaaccttgacatccagagcttcaaaggatataaatatatcggatggaaactcgggatgttcctttttggtacaaatattgcctgccaaagtgccagactgaaacttaaaatattaaactgttttaataacatatgaggttgcttacatttcgaacaggaacattggcgacaaggtcgatgtggtgccacaggacctcaagatactcaaatcctgattgcttcgaagtgctttgtattatttccatcgtttcggtcaaactgagactagcgcccaaggttagtttttccttatctgagctgtactgatgcaaatcctccacaccattcacatcaatgaaatgctttatgtcgggggatctcctgtagaccccatgagccgtattacctccaaccagcatgaactcttccgaatcccccacattttctagtgcctcgaatatttccgccagtgtgcttggccagtaccactgggatccatcctcgtagattagtttggattgccgacatgtacccttgcagacttttcccgatcttggacagtttcgagccttcagattgagatcctcaatatcaacgctctcttcggaaacctcaacggtgctgtccaccgcaaaggacttcatggcatccagaatgggacgatatccagtgcagcgacaaatgtttccgccgaaggagttctccacctcctccatggtcactctgccgccatgctgttccatcaacccatacatgttcatcacgaatcccggcgagcaaaagccgcactgggtgccgttcatcttggccagccgcttctgaatcggatggtagcccgttacctggttacccagtccctcgcacgtaataatctccagctgggcacaggtattcagcagcttgagacactgaaaatcgaggagcaggagtagaagcacagttagagctgaaatgatctggctgcccttcgacccaccgagttcactgtccaggtgctcttcccatcgctcactgcgcaaacacaagctccacatcctccctccaggcacataaacttcgtggccgtcagttgggcgtgttcccggatgaaggtgttcagagttatgtccggtgggaggtcggtaaggttaactggcacagatcgagatttattggcaaggcgagagaaactcattgcacttaaaggatcctatgtctagtgtcttatcatacctgcatacggttgtccatttatggtaaatgtggtcgacatttcactttaatttataattcagttattaaataaactctccgttttggtcgctataaccagctgcagctacgatttctgctcaactggcactttgtggcttaaaacctccatttattgcattttaccaactgtggactaatttaatatttgcctttgtcaacttctaaataaagagttatttgctaaaaaacgttataaatggcatattcccgctttagtgatttcattcatctaaaatgttgacatttttcgcttttgtttggctgcaatttccattatttgatataccgattagcagaggtaaccgattccattagaaattcaatgctttgtgtttaaaggatttaatttgtggctgtattcaaatgcagtttttcatttgccctcatcattagtcattttatatcatgcactttttatcccaaacaaggcttaatgtttttcgttattggctcctttatcgccattcggattttgtatcttgacgcgacttaattaattaaatacatgttccctcctcgttgtttcttttattaaccgtttccataaaaaaaagtggaaaataagccgaataaaactgtcaactcattggtaaatcatttgtcaaaatataaatcgatgtttccttttcgaggaacgcttggacgggtcagccacgaaaaaatgttacataatcatgcacaaaacatgcagaacaagaaccgatgccgatccaacaacaaagcagccgttccgcctttgcaccttatcgatattcaagaatcgttctccatacacaaaataataatcaaagccgaacagaaatgagggaaaaatgatgaggagaccttaaacaagtaaaattaaaatatgaataacgcaatcttttctcacatggctaagcattttggtaactccaatcgaaggaatcggacgaatcggaggcaacccgctgtcaaacaggtaagcagagggttaagttggcggagttcggaggaggggttcttctggagaccccgac

SEQ ID NO: 27938 - DNA, 3771 bp, DROSOPHILA
atgtcgaccacatttaccataaatggacaaccgtatgcagttaaccttaccgacctcccaccggacataactctgaacaccttcatccgggaacacgcccaactgacggccacgaagtttatgtgcctggagggaggatgtggagcttgtgtttgcgcagtgagcgatgggaagagcacctggacagtgaactcgtgtctcaagctgctgaatacctgtgcccagctggagattattacgtgcgagggactgggtaaccaggtaacgggctaccatccgattcagaagcggctggccaagatgaacggcacccagtgcggcttttgctcgccgggattcgtgatgaacatgtatgggttgatggaacagcatggcggcagagtgaccatggaggaggtggagaactccttcggcggaaacatttgtcgctgcactggatatcgtcccattctggatgccatgaagtcctttgcggtggacagcaccgttgaggtttccgaagagagcgttgatattgaggatctcaatctgaaggctcgaaactgtccaagatcgggaaaagtctgcaagggtacatgtcggcaatccaaactaatctacgaggatggatcccagtggtactggccaagcacactggcggaaatattcgaggcactagaaaatgtgggggattcggaagagttcatgctggttggaggtaatacggctcatggggtctacaggagatcccccgacataaagcatttcattgatgtgaatggtgtggaggatttgcatcagtacagctcagataaggaaaaactaaccttgggcgctagtctcagtttgaccgaaacgatggaaataatacaaagcacttcgaagcaatcaggatttgagtatcttgaggtcctgtggcaccacatcgaccttgtcgccaatgttcctgttcgaaattctggcactttggcaggcaatatttgtaccaaaaaggaacatcccgagtttccatccgatatatttatatcctttgaagctctggatgtcaaggttgttgcaatgaaaggcatcgacgatgaaaaagaaatgactttagaggaatttttgggtgatacggatagaaaaatgctgctcaaggccttcattctccctagataccccaaggatatgtatatttacgactccttcaagatcatgccaagagcgcaaaatgctcatgcttatgttaatgcaggatttcttctggaattggatggcaactcaatggtgaaatctgcccgtatttgctttggtggaattcgaccggatttcattcatgccacagatattgaacagttaatggtgggtcacagtccctacgaatcaaatttggtggaacaaacattcaacaagctggagagtctggtcaagccggatgaggttctacccgatgccagtcccgcctaccgttccaaattggcctgcggactgctctacaagttcctcttgaaacacgcccccgatgcggaggtcagcggaaagttcaagagcggcggtgagctgctccagcggccactctcctccggcttgcagctcttccagaccaataaacagacctaccccgtgacacagggcgtgcagaagctggagggcatgattcagtgctccggagaggccacatatatgaacgatgtgctgaccacttccaactccgtttactgcgcctttgtgggcgccacaaaggtgggagccaccattgatcaaatcgatgctacggaagctctccaacatccaggagtggtggccttttacactgcgaaggacattcccggaacgaatactttctgtgagcccagttttggttacgaagcggaggagattttctgctctggaatggtgcgccactcggaacaaccagtgggtgtaatcgtggctcttactgctgaccaagcccaaagggcaacaaagcttgtcaagatcagctatagcagccccagttccaacttcaagctgatgccgagtttgaaggatgtgttctcctccgaaactccagatacttctcgcattatacccttggttatatcaaagcttaaggaagtaaagttttctgacaaacctgatttggaagtgaggggcatattcgagatgggactgcagtatcacttcaccatggaaccgcagaccactattattattccctttgaagatggactaaaggtcttctcggctacccaatggattgatcagactcaatcagtgattgctcataccctgcagatgaaagccaaagatgtgcaactagaggttcgcagattgggtggtggatatggctgcaaaatatccagaggtaaccaggttgcctgtgcagccgccttggctgcccataagctgaatcgtcccgttcgctttgtccaatccctggagtccatgatggattgcaatggaaagaggtgggcctgtcgttccgaatatcagtgtcacgtgaagaccagtggcaggatcgtcgggctgtccaacgatttttacgaggacgctggctggaacacgaacgagagtcctgtgcaaggacactccactttcacagcagccaactgctatgaattcaccgatagcaacttcaagctgagtggtcatgctgttcttacggatgccccaagttccacttggtgccgtgctcctggatcagtggagggcattgctatgatggagaacatcatcgagcacgtggcattcgaaatccagaaagacccagccgaagtgcgactagcaaacattagtaagaagagtaagatggcaaccgtctttccagagttcctcaagactagggagtactactcccggaagaaggagatcgaggcattcaatgccaacaatcgatggaaaaaaagaggcttgggtctctccttgatgaacttccccattatctacattgggcagtttccggcaacggtgactatttaccatgtagatggcactgttgtggttacccatgggggcatagaaatgggtcagggtatgaatacaaagatagctcaagtggcggcctataccctgggaatcgatttgagctacgtgaaagtggagtcctcaactagcatcaatggagccaattcaatggtcactggctatgccatcggaagcgagagtgtctgctacgcagtccgtaagatctgcgagacgctcaatgcccgattgaagccagtgaggaaggccaaggccacttgggtggagactgtggaagcggccaatgcccagttgatcaatctgatagcctcggatcactacaagaccggcgacatgcagaactaccatgtgctgggacttgccctttccgaggtggagatcgatgtgctgaccggcaacattctgatcaggcgggtggacatcctagaggacgccggtgagagcctgagtccctggatagatgtcggtcaggtggagggcgccttcgtcatgggcctgggctactggctcagcgaactgctcatctacgagggcgacaatggtcgcctgctgactaaccgcacatggaactacaagccgttgggtgcgaaggacattcccattgatttccgcgtggaactggtccacaatccacgaccgagtagttcgggtttcatgggctcaaaggccaccggagagcctccttgctgtttggctgttagtgtgatttttgcacttcaacaggctctgcaatcagcgcgccaggatgcaggacttcctcgggagtggcttcgcttgggggcacccacaactccagagactctgctactaaatgccggacaccaagtctcggagttcaagttgaaataa

SEQ ID NO: 27939 - protein, 1256 aa, DROSOPHILA
MSTTFTINGQPYAVNLTDLPPDITLNTFIREHAQLTATKFMCLEGGCGACVCAVSDGKSTWTVNSCLKLLNTCAQLEIITCEGLGNQVTGYHPIQKRLAKMNGTQCGFCSPGFVMNMYGLMEQHGGRVTMEEVENSFGGNICRCTGYRPILDAMKSFAVDSTVEVSEESVDIEDLNLKARNCPRSGKVCKGTCRQSKLIYEDGSQWYWPSTLAEIFEALENVGDSEEFMLVGGNTAHGVYRRSPDIKHFIDVNGVEDLHQYSSDKEKLTLGASLSLTETMEIIQSTSKQSGFEYLEVLWHHIDLVANVPVRNSGTLAGNICTKKEHPEFPSDIFISFEALDVKVVAMKGIDDEKEMTLEEFLGDTDRKMLLKAFILPRYPKDMYIYDSFKIMPRAQNAHAYVNAGFLLELDGNSMVKSARICFGGIRPDFIHATDIEQLMVGHSPYESNLVEQTFNKLESLVKPDEVLPDASPAYRSKLACGLLYKFLLKHAPDAEVSGKFKSGGELLQRPLSSGLQLFQTNKQTYPVTQGVQKLEGMIQCSGEATYMNDVLTTSNSVYCAFVGATKVGATIDQIDATEALQHPGVVAFYTAKDIPGTNTFCEPSFGYEAEEIFCSGMVRHSEQPVGVIVALTADQAQRATKLVKISYSSPSSNFKLMPSLKDVFSSETPDTSRIIPLVISKLKEVKFSDKPDLEVRGIFEMGLQYHFTMEPQTTIIIPFEDGLKVFSATQWIDQTQSVIAHTLQMKAKDVQLEVRRLGGGYGCKISRGNQVACAAALAAHKLNRPVRFVQSLESMMDCNGKRWACRSEYQCHVKTSGRIVGLSNDFYEDAGWNTNESPVQGHSTFTAANCYEFTDSNFKLSGHAVLTDAPSSTWCRAPGSVEGIAMMENIIEHVAFEIQKDPAEVRLANISKKSKMATVFPEFLKTREYYSRKKEIEAFNANNRWKKRGLGLSLMNFPIIYIGQFPATVTIYHVDGTVVVTHGGIEMGQGMNTKIAQVAAYTLGIDLSYVKVESSTSINGANSMVTGYAIGSESVCYAVRKICETLNARLKPVRKAKATWVETVEAANAQLINLIASDHYKTGDMQNYHVLGLALSEVEIDVLTGNILIRRVDILEDAGESLSPWIDVGQVEGAFVMGLGYWLSELLIYEGDNGRLLTNRTWNYKPLGAKDIPIDFRVELVHNPRPSSSGFMGSKATGEPPCCLAVSVIFALQQALQSARQDAGLPREWLRLGAPTTPETLLLNAGHQVSEFKLK

SEQ ID NO: 27940 - DNA, 6549 bp, DROSOPHILA
gagtctagccatgttttactcagaagtaattcaccaagcttttcacaaggtcgtcgcaactctcatctaactagcaggtatttagtagtcgaatttctcgaccctggtgttccagttcgttgtctcggcaatcttgtagatgccagcccccatcaatccataggcaattaactgcccacacatgcatacacaccttcgtggctggtgccgttgattgtaattcttccagccattatctgtgaattatataagtcccttgaatcacttaaaagccgtccgggaatcgttgtgaaattaattgcagcctttctcgccttcaattgacgcgggtgttcagaattatttggatggttatagtgggttctggaaactatgttatttcacaatatgtggcaatgagtccacttgtcagcctcgtttgattccacgccgaactgcgagcgactgagggtatgggccttccgtagccccatatatatagtggttctccggccctcgaaagagactcccgcctctccaagttcaagttcacctgctccccgctcttaactaccatgttccatatactgcgctcacaattcagcattagatcatcgtagcactctgaaacgttatcgtctgccggtttcaaatactctccctcggttttggaactgaaagctttatcagtaaacggcttgtttcgacgtttttgttttgctcatatttctaaacaaaacggcgagattatgttcggaataaggggaactagtcctataaacagagtggtgccttatgagcgaaagatttcttcaaaacatatatgtacatatgtatacaattctattaggaattatataacaggagaacgattcttcaaaacttcaaacgatttccacacgattctatatttatttagtaagataaattacataatacagataaagaaatcaaaagatcgaagcagtacaccaaatgaaatatcgaaaaatacccaaatctaagccagaacttcatttcattacaaggcgaatgcttccacctggcttccggagttaaggacgaccgtttccggcgtcgttggtgcccccaagcgaacccactccctcggaagacccgcatcgttcctggccgactggatggcgtgttgcatggcgaacagagctccgacagccagacacagagcaggctcacccgtggccttggatcgcataaagcccacggggttgggactcttctggagcaactcgatgcgaaagtctatcgggatatccttggcgcctggtgggtggtagttccaggtgcggtttgtcagaatctgacctgtctgacgatcgtaaaccagctgctcggtgagatagtatcccaaacccatgacaaaagcgccctccacttgacccacatctatatgtggactcaggctttccccggcatcctctaggatgtcaacccggcggatcagatggttgcccgtcagaatgtccagttccagttcggtgagactcaacccgaagatgttgtagttggggatatcccccaaccggtaagattccgtggcgatgagaaacacggactgcaaaaaggccgcttggagcacctgcacccaggaggcccgaggtccgagtctttccttcaccggagccagtcgcttgtttagagtgtcgcaggcttttctcactgccaatccgatcatctcgctggtcatcgagttggccgtcagcatggagttggctccgtttacagtattgctggcctcgactctcacctggtccaacggaacacccagcacgaatgctgccacctgggccgccttggtgttcactccttggccaatctcaatgcctccgtgagagatcaccaccgacccgtcctcatgatagatggccactgtgaccggatagttgaaggccacggtcgtgttcagcgggaaactcattagggccaatcccagacctcgtttgcgccatcggttctgggagttgaataagttaatctggtcccgccgcttgtggtactctgtggaggccaggaactttggcagcagctgcaccattttatttccgggctgaagatttaccaaacgaacgtcggcaggatctagctggcaggtgaaggctatgtgctccaaagcggtctccgtcatggcgattcctgtgaatgtgaacgatattgtatatgtaaatactgtaaacctttttaaatggtttttgacttaccctctgcggaaccaggagctcgacaccaagtggagctgggtgcatccgttctgatggcactgccttgggtcctatagttcgcgtcagtcagattgtaaacattcctcagaattggcagagtcaggaagtcaacgacgttctcatttagattacatccggaatcctcatagtagttattactcaacatgataatggatccattggctctggctcggaactcgtagtccgatctgcaggcccatcgtttgccaatggtctccatcatggactctatggtctggacaaatctggcaggtctccttagctttgaagccaccaaagccgtggcgcaagcaactatattgcctctagtgacctttgcaccatacgctccacccactcgtctaacttggagctgaatggagttcacactaactttcaacatgtgggcaatcgctccttgggtggcgtccatccattgggtggcgcagtatacctgcagaatgttatcaagcggcaccacgatggttgtttgtggttccatagtgaagtggtattgggacgcaagctccaggatccctctgccaagaacatcgccaggtgcgagaggaggcagctttaggggttccacggtatccttcttcgtgctcacaatccgatcggtttgcttttccgctaacacttggttcatggtcgtgaagatctttcgctgatcccgggcatatgtgaccacaaccaatgtggcagcatagacagccgcatcatgggtgagagctgcgatgactcccaacggttgatcaaagtatttgactcgcccggcaacaaagacctcgtccacttcaggtgtaagctgattcaccagaacgaagttgttggagcctgggatatcttcggccgaatagaaggccaccactcccttgcactgaagggcagcagaaggatcgatctgctcaatggtggcacccactctcttcgcagttacaaacgcacaatggacggcatttgaggttgtcagtagatcgttcatatacgtggcctcgccagagcactgaatgagacctggaaatccaaatcgataataataataccacgtatggaaaagggttttcttaaacgatgtaccttctagtttttgaactggttgcgtgacgggatagttttttttaatcgtctcaaaggattggcttcccgaggaaagtggtctctccagtagcaagcctccagtccgaaaacgctcccgaactcgctccttgggtgcggtggccagcagaaacttgtaaagcaaggagcaggctagcatttggcgatattccggggaggcctccggaggacgctcctcgggttgcaagctagctgggagttcctgaaagatctgcgcaactgtggcgggatcgtacagatccctgccaggaagcagttgctccacttggtcatcgtgtatgtaatctggtcgaatgttgccgaaacatatgcgtgcggagtggacaatcctgtgctgaatgtcctgccattcaatgaggaagcctgcattcacataagcatgaacattctgcgctctgggcaagatctattgtttggagaggagattgattcagttaactaaattcatatttttaggaataagttcatccaccttataagatctaaacaggaatctgtcctttggataggcttttaggataaaaccacccagcaccagtttggaggttgtatcaccgagatacgtcagcaggttcatcaccctttgggtactgggattgtcgtagacgaggacgtggacatccagagcctcaaatgtgatgaacacatcggagggaaattcaaaatgttgcttcttgatgtttatgttgcccgccagtgtgccattctgtgaaaatttaattataaattatttaagtaataatattttacaatttgtttcatttttcatttctaaatttttttttcagtgtctgcagcgacttgaattgatttactatctttgttgtgaaagtaaaatgggtttttaagctaaaatgttctctgtgctaagagttgattgcttttgttagaaaactggacagtaactcaaggcaatgcctgtgatttaagaagtaaattaactttgctatataaacgaacaatacttcaatggtggaataataaatcgaaaattcactggccttgaaataagtttttaaataagcgtttcacgggagaaagagcattcaattgtcaaaaactactattattttcgctaatcttcgtcttcgccaagcgccgaaacgggtttctggttttatggagcactctactcacatttcgcaccggcacattggcaatcaggttgaagtgctgccataactgggcacaatactcgaatccgggcctcttggcagccagcaggaaaacttgcatggcatccgtgagagtgacattaccgcccagcagcaggtgatccgtctcaatgctgtactgcctcagctccggcaccatattcacgtcaatgaagtgtcggatgtccctgggtcgccggtaaactccatgggcggtgttcccggccaccagcatgtagagttctccgttcgccacctgactaagggctccgaagagctccgttagagtctttggccagtaccactgactatccccatgatccctcaacggaggtctcgagcagctgcccttgcaggattgtccagttcgcgggcagagcagctcgaaggagtcctcgatgtccacactttccgccggaacctcaacgttgctatcaaccgcgaaggacttcatggcatccagaatgggtcgatagccggtgcagcgacagaggtttccaccgaaagcgtcctccacctgcgacatgctcacctgcccgcgatgttgctccagcaatccgtacatgttcatcacgaatcctggcgagcagtagccacattgggtgccattcatctgagccacgcgcttttgaatgggatggtagccactcagttggttgcccagtccctcgtccgtcatgatctccgcatcgtcacaggtgttcagaagcgtcaggcactgtggaatgggcagaaataacccatagtttaattatattttaattctagtaattacaaatttaactttttattgctcgctgtattcaggtgtggagaaagccactccccgaaaagtgacttcttaccgagttggctgccctggactgaacctcctgggtgaccgggtggcgcctgcggatgacgcagacgcacgagccacagccgccctccaggcacatgtacttggtggccgtcaggtgcaggtgctcccgcaggaaggtgttgagggtggtgtccggtggatagtcagccgcctgcacctcgtacggaaagccattcacattgaacttgatgctcatcgctgcacagtcgtcggtcgaatggagctcttttggtcattcgtttctatttcaaagcgctgctgaaacctgatttcccgttaattaggctaaacgggttggagcagattaaagtgccatctaaagcatacactgagcgaaaccgtgcactctgcgaaacttactaagtttttgctgatgctttgcacttaattgacagatttataatagaaattccgctaaacactattttatggtttttaaagtgataacttccagaattatcgttttgtcataaaacacaatatgaatgagtcaaaaatttgaaagagctgttaatgtcacgtacgaatgataatcccaccaagatatttaacttgattataacaatgcaaccaaatgcatttcaatataaaaactttaataatatttcaaatatatgtataaagaaagaaccatatgtatatgtaaatgggacagaagccgatcaaaaccacatatttacttaagcctaaaactggctgcttcatgtcctgcattgaccaccagagtttccggagttgtgggtgcacccagacgcacccactcccgcggtagtcctgcatcatggcgggctgaatccagggcctgtcgcagggcgaaaaccacactcacagccaaacaacagggtggttctccagtggccttcgaccgcatgaagcccgccccagagggattgggtttctgaatcagctcaatgcgaaaatcaatgggaatgtccttggcacccggcggcttgtagttccaggtgcggttggtgaggaggcgacctgtttcccggtcgtacaccagctgctcactcatccagtagcccaggcacatgacaaaggcaccctcaatctgaccgatgtctatccagggactcaggctctctccggcatcctccagtatatccacgcgcttgatctgactgtttccagttagcacatccaactctacttcggttagggccagaccgtagatatgatagttttgcatatcgcc

SEQ ID NO: 27941 - DNA, 3671 bp, DROSOPHILA
cgatgagcatcaagttcaatgtgaatggctttccgtacgaggtgcaggcggctgactatccaccggacaccaccctcaacaccttcctgcgggagcacctgcacctgacggccaccaagtacatgtgcctggagggcggctgtggctcgtgcgtctgcgtcatccgcaggcgccacccggtcacccaggaggttcagtccagggcagccaactcgtgcctgacgcttctgaacacctgtgacgatgcggagatcatgacggacgagggactgggcaaccaactgagtggctaccatcccattcaaaagcgcgtggctcagatgaatggcacccaatgtggctactgctcgccaggattcgtgatgaacatgtacggattgctggagcaacatcgcgggcaggtgagcatgtcgcaggtggaggacgctttcggtggaaacctctgtcgctgcaccggctatcgacccattctggatgccatgaagtccttcgcggttgatagcaacgttgaggttccggcggaaagtgtggacatcgaggactccttcgagctgctctgcccgcgaactggacaatcctgcaagggcagctgctcgagacctccgttgagggatcatggggatagtcagtggtactggccaaagactctaacggagctcttcggagcccttagtcaggtggcgaacggagaactctacatgctggtggccgggaacaccgcccatggagtttaccggcgacccagggacatccgacacttcattgacgtgaatatggtgccggagctgaggcagtacagcattgagacggatcacctgctgctgggcggtaatgtcactctcacggatgccatgcaagttttcctgctggctgccaagaggcccggattcgagtattgtgcccagttatggcagcacttcaacctgattgccaatgtgccggtgcgaaataatggcacactggcgggcaacataaacatcaagaagcaacattttgaatttccctccgatgtgttcatcacatttgaggctctggatgtccacgtcctcgtctacgacaatcccagtacccaaagggtgatgaacctgctgacgtatctcggcttcctcattgaatggcaggacattcagcacaggattgtccactccgcacgcatatgtttcggcaacattcgaccagattacatacacgatgaccaagtggagcaactgcttcctggcagggatctgtacgatcccgccacagttgcgcagatctttcaggaactcccagctagcttgcaacccgaggagcgtcctccggaggcctccccggaatatcgccaaatgctagcctgctccttgctttacaagtttctgctggccaccgcacccaaggagcgagttcgggagcgttttcggactggaggcttgctactggagagaccactttcctcgggaagccaatcctttgagacgattaaaaaaaactatcccgtcacgcaaccagttcaaaaactagaaggtctcattcagtgctctggcgaggccacgtatatgaacgatctactgacaacctcaaatgccgtccattgtgcgtttgtaactgcgaagagagtgggtgccaccattgagcagatcgatccttctgctgcccttcagtgcaagggagtggtggccttctattcggccgaagatatcccaggctccaacaacttcgttctggtgaatcagcttacacctgaagtggacgaggtctttgttgccgggcgagtcaaatactttgatcaaccgttgggagtcatcgcagctctcacccatgatgcggctgtctatgctgccacattggttgtggtcacatatgcccgggatcagcgaaagatcttcacgaccatgaaccaagtgttagcggaaaagcaaaccgatcggattgtgagcacgaagaaggataccgtggaacccctaaagctgcctcctctcgcacctggcgatgttcttggcagagggatcctggagcttgcgtcccaataccacttcactatggaaccacaaacaaccatcgtggtgccgcttgataacattctgcaggtatactgcgccacccaatggatggacgccacccaaggagcgattgcccacatgttgaaagttagtgtgaactccattcagctccaagttagacgagtgggtggagcgtatggtgcaaaggtcactagaggcaatatagttgcttgcgccacggctttggtggcttcaaagctaaggagacctgccagatttgtccagaccatagagtccatgatggagaccattggcaaacgatgggcctgcagatcggactacgagttccgagccagagccaatggatccattatcatgttgagtaataactactatgaggattccggatgtaatctaaatgagaacgtcgttgacttcctgactctgccaattctgaggaatgtttacaatctgactgacgcgaactataggacccaaggcagtgccatcagaacggatgcacccagctccacttggtgtcgagctcctggttccgcagagggaatcgccatgacggagaccgctttggagcacatagccttcacctgccagctagatcctgccgacgttcgtttggtaaatcttcagcccggaaataaaatggtgcagctgctgccaaagttcctggcctccacagagtaccacaagcggcgggaccagattaacttattcaactcccagaaccgatggcgcaaacgaggtctgggattggccctaatgagtttcccgctgaacacgaccgtggccttcaactatccggtcacagtggccatctatcatgaggacgggtcggtggtgatctctcacggaggcattgagattggccaaggagtgaacaccaaggcggcccaggtggcagcattcgtgctgggtgttccgttggaccaggtgagagtcgaggccagcaatactgtaaacggagccaactccatgctgacggccaactcgatgaccagcgagatgatcggattggcagtgagaaaagcctgcgacactctaaacaagcgactggctccggtgaaggaaagactcggacctcgggcctcctgggtgcaggtgctccaagcggcctttttgcagtccgtgtttctcatcgccacggaatcttaccggttgggggatatccccaactacaacatcttcgggttgagtctcaccgaactggaactggacattctgacgggcaaccatctgatccgccgggttgacatcctagaggatgccggggaaagcctgagtccacatatagatgtgggtcaagtggagggcgcttttgtcatgggtttgggatactatctcaccgagcagctggtttacgatcgtcagacaggtcagattctgacaaaccgcacctggaactaccacccaccaggcgccaaggatatcccgatagactttcgcatcgagttgctccagaagagtcccaaccccgtgggctttatgcgatccaaggccacgggtgagcctgctctgtgtctggctgtcggagctctgttcgccatgcaacacgccatccagtcggccaggaacgatgcgggtcttccgagggagtgggttcgcttgggggcaccaacgacgccggaaacggtcgtccttaactccggaagccaggtggaagcattcgccttgtaa

SEQ ID NO: 27942 - protein, 1222 aa, DROSOPHILA
MSIKFNVNGFPYEVQAADYPPDTTLNTFLREHLHLTATKYMCLEGGCGSCVCVIRRRHPVTQEVQSRAANSCLTLLNTCDDAEIMTDEGLGNQLSGYHPIQKRVAQMNGTQCGYCSPGFVMNMYGLLEQHRGQVSMSQVEDAFGGNLCRCTGYRPILDAMKSFAVDSNVEVPAESVDIEDSFELLCPRTGQSCKGSCSRPPLRDHGDSQWYWPKTLTELFGALSQVANGELYMLVAGNTAHGVYRRPRDIRHFIDVNMVPELRQYSIETDHLLLGGNVTLTDAMQVFLLAAKRPGFEYCAQLWQHFNLIANVPVRNNGTLAGNINIKKQHFEFPSDVFITFEALDVHVLVYDNPSTQRVMNLLTYLGFLIEWQDIQHRIVHSARICFGNIRPDYIHDDQVEQLLPGRDLYDPATVAQIFQELPASLQPEERPPEASPEYRQMLACSLLYKFLLATAPKERVRERFRTGGLLLERPLSSGSQSFETIKKNYPVTQPVQKLEGLIQCSGEATYMNDLLTTSNAVHCAFVTAKRVGATIEQIDPSAALQCKGVVAFYSAEDIPGSNNFVLVNQLTPEVDEVFVAGRVKYFDQPLGVIAALTHDAAVYAATLVVVTYARDQRKIFTTMNQVLAEKQTDRIVSTKKDTVEPLKLPPLAPGDVLGRGILELASQYHFTMEPQTTIVVPLDNILQVYCATQWMDATQGAIAHMLKVSVNSIQLQVRRVGGAYGAKVTRGNIVACATALVASKLRRPARFVQTIESMMETIGKRWACRSDYEFRARANGSIIMLSNNYYEDSGCNLNENVVDFLTLPILRNVYNLTDANYRTQGSAIRTDAPSSTWCRAPGSAEGIAMTETALEHIAFTCQLDPADVRLVNLQPGNKMVQLLPKFLASTEYHKRRDQINLFNSQNRWRKRGLGLALMSFPLNTTVAFNYPVTVAIYHEDGSVVISHGGIEIGQGVNTKAAQVAAFVLGVPLDQVRVEASNTVNGANSMLTANSMTSEMIGLAVRKACDTLNKRLAPVKERLGPRASWVQVLQAAFLQSVFLIATESYRLGDIPNYNIFGLSLTELELDILTGNHLIRRVDILEDAGESLSPHIDVGQVEGAFVMGLGYYLTEQLVYDRQTGQILTNRTWNYHPPGAKDIPIDFRIELLQKSPNPVGFMRSKATGEPALCLAVGALFAMQHAIQSARNDAGLPREWVRLGAPTTPETVVLNSGSQVEAFAL

SEQ ID NO: 27943 - DNA, 2714 bp, DROSOPHILA
taaagctccacgatggctgatcaggtccggtacaattgaaaataatcttgtagaatccaggtggcacgatatccggaaaaccttcggcttcaaagacgcatttgtcaccgatatacgttcgtttcggccaaggcggttgaaatttgcccttgaactgcggcacattggaacagggggcaaagttcttcattatcacatccttgtagtaggagttgaggtagtcgtaaaaggtttgcttaggaatggcccaagggagcagcttgtagtcggactcatcacccgaattgctgcggtatacaacagcctccacctatatatataaaaaaaaaagtatgttgttatgcaaggaataccgtttaaggaattttcccaccattgtctcctcagtggtgtcatagttccactccacccgcgctgatattccaaactttccacgccctaagcgaacaatactggactctaattttattagactgtcgtccgaagaggtggttaatatcaatacaggttcgtactcccatttccgctaaaaaaaaaaaatatatattggtaaagatagttcatcagtttaaatactgaactaaccgctgctccgcatctactgattagccaaactgccaacaatattaagactgacgaatagccggaatccatttggccaatatgaaactgggtaagaatgctctgtgacttgtgtttatatagcctgtttaaatgactatttcaacgttacacgacattactatcagattttaatagacacgtggattctacacaaatcaaaaatgtttttaaattccaaaatgcactatgtaaaacgattttataacgccagaagaattcattacaaagcaaattagtggaaaatgctcatcggagcaaaatgattaccaataataaagagattctattttgtaaaatgaaataagaacaataatttattactcattggatttatttataggattataaaaaaatagaatcttaaatattaacatatctagaaaattttgttagtcagcttaaaaacggctgtgaaaccccaagttggctgcccaggaccaaatttagtgaatacgatcttgtagaatcctggcggagcgatttccggcaatccatcaccaccgattttgcacttgtcaagcttataggtgttctttggccagggaggctgaaatttatcttcgtatttgggtagattggagcagtagccgaggttttttgagatcacatccttatagtaggtgttgatgtaatcatagaagggctgtttgggtattgcccagggtagcagcttgtaatcactctcatcgcccgaattactgcgatacgcttgtgcctcaacctagacaatatattgtgaactaaattataaataataaatgatttggaatgacccaccatcgtttcctcattcgtgtcatatttccactctaagatggccgaaagtccgtaatctgaacgccccagacgttcgattttagcttcaaatttaagcttgctttcatccgaagaggttgcggttaataatataggctcgtagtcccattttcgctaaaaacataagaaacattaggtattgaaattaatttttttatgcccaaacttactgatgctgctgtcaaatgaaataatatacacactattccgattctagttgaggttgtaaccaactcaaaagctaacatttcgctcgaattaaatttgatacattctggcaaaacaaggcccttatataccggattgataatctaaattcaacaaactcacgaacttatcatgttcgcaagatatttataatgtttgcgtttcatatttaaacattctattctgtacaacgaacaatttcgtgactgtaattgtccaataattaagttttttgaagtgtctttgatgcttcatttattgctttttatgtcaactactctctacgtgctttataataggaatatacataggtacttttgataatacctatttaagtgatcgcccacgtggaaatcagacaagttttgtggttatcttcacaatcagaatgaatccccaatccacgggattcgtcaaggtgaaattgaccttgtagtagccctcgggaaccatatccggaaaaccatcactgtttgccacacacttttccaacacgtacgtatcctggggccacggtggctcgaatttgccatcaaacttgatgagattggaacaatcgcccagatttggtagcactacgttcttatagtggctgttcatgaactcaacatatggctgtttcgggatgctaaacggcataatcttgtagtcattttcgtccccggaggtgcttcgataggccattgcttcaacctgagggaaatttacagcattaattctttacattcttaaccatatctttgggaatgaatagatagttgtctttattccacttgtacatatttaccatggtattatcttctggtgtgtacttaaattcaatgttgccagaaagggcatattctcccctaccgactcgctccactttggccgcaatcttcagcttagtctcatccgtggtataggtttcaatggacagcggttcgtagtcccacttgcgctgttaaatcaagcttaagatttttatcaaacttaaacgcaaactcggttttggttacctaccttgccattgcattgatcaactatcaaaagtattaatactcctccaatgatgggcagtagcaaac

SEQ ID NO: 27944 - DNA, 602 bp, DROSOPHILA
aatgtatcaaatttaattcgagcgaaatgttagcttttgagttggttacaacctcaactagaatcggaatagtgtgtatattatttcatttgacagcagcatcacgaaaatgggactacgagcctatattattaaccgcaacctcttcggatgaaagcaagcttaaatttgaagctaaaatcgaacgtctggggcgttcagattacggactttcggccatcttagagtggaaatatgacacgaatgaggaaacgatggttgaggcacaagcgtatcgcagtaattcgggcgatgagagtgattacaagctgctaccctgggcaatacccaaacagcccttctatgattacatcaacacctactataaggatgtgatctcaaaaaacctcggctactgctccaatctacccaaatacgaagataaatttcagcctccctggccaaagaacacctataagcttgacaagtgcaaaatcggtggtgatggattgccggaaatcgctccgccaggattctacaagatcgtattcactaaatttggtcctgggcagccaacttggggtttcacagccgtttttaagctgactaacaaaattttctag

SEQ ID NO: 27945 - protein, 191 aa, DROSOPHILA
MLAFELVTTSTRIGIVCILFHLTAASRKWDYEPILLTATSSDESKLKFEAKIERLGRSDYGLSAILEWKYDTNEETMVEAQAYRSNSGDESDYKLLPWAIPKQPFYDYINTYYKDVISKNLGYCSNLPKYEDKFQPPWPKNTYKLDKCKIGGDGLPEIAPPGFYKIVFTKFGPGQPTWGFTAVFKLTNKIF

SEQ ID NO: 27946 - DNA, 2704 bp, DROSOPHILA
tcgccatcgatcacgcatttgttgccaaaataggtctgctttggcaatggcggttggaatttaccctcgaattgcggaatattggaacagtgcttaaagttcttcatcgaaacatccttgtaataggtgttcagatgttcgtatagcgattgcttgggaatggcccaaggaagcagcttgtagtcgctgacatctcccgtcgagcttcgaaggacattggcctcgacctacggaaaaatcacaatccttattcaaaggactaacttatcaagtaagacacacgtaccatggtttcatcagtcgtatcgtagttccactcaaccttggcgtcaatccaaacactccgcgattgattcgctcaattttcatatctaattttattaaactctcatcggatgagtgggtttcgatggatatgggttcgtagtcccatttccgctggataattctttaaattattacaagatatatggaagatatgaactgtgaacctaccgccgtttggcattcacctacgagcaggagtgccatacaaagttcagcaataaaacaccggacagacataattacaatatgaaactaagtattgggaaatcgggctttatgcttatatagccatgtccattgataaaaaaaaatgtgcacattgtcacggcattttatcacactattgcagatctttcccacagtacctaaatgtatatgattatataactatttacagccattaaatacgaatagtccattgaaacacttaaacttcgcataacttttttatataagtatgtgcttattgtaactgatatatttagtttctgattttggaaatgtttttatttctgttttttattgtttatgttctattacatcattgtattacatttatctatgtacgaagatacgagttcaaattcagaaaaacacgtgtataagctcgctttaaaggatttaaaaaaatatttggccgtattttatttgatatatatttattgctacatagctaaaacattttgtttattattttaaaaattccgataaagctccacgatggctgatcaggtccggtacaattgaaaataatcttgtagaatccaggtggcacgatatccggaaaaccttcggcttcaaagacgcatttgtcaccgatatacgttcgtttcggccaaggcggttgaaatttgcccttgaactgcggcacattggaacagggggcaaagttcttcattatcacatccttgtagtaggagttgaggtagtcgtaaaaggtttgcttaggaatggcccaagggagcagcttgtagtcggactcatcacccgaattgctgcggtatacaacagcctccacctatatatataaaaaaaaaagtatgttgttatgcaaggaataccgtttaaggaattttcccaccattgtctcctcagtggtgtcatagttccactccacccgcgctgatattccaaactttccacgccctaagcgaacaatactggactctaattttattagactgtcgtccgaagaggtggttaatatcaatacaggttcgtactcccatttccgctaaaaaaaaaaaatatatattggtaaagatagttcatcagtttaaatactgaactaaccgctgctccgcatctactgattagccaaactgccaacaatattaagactgacgaatagccggaatccatttggccaatatgaaactgggtaagaatgctctgtgacttgtgtttatatagcctgtttaaatgactatttcaacgttacacgacattactatcagattttaatagacacgtggattctacacaaatcaaaaatgtttttaaattccaaaatgcactatgtaaaacgattttataacgccagaagaattcattacaaagcaaattagtggaaaatgctcatcggagcaaaatgattaccaataataaagagattctattttgtaaaatgaaataagaacaataatttattactcattggatttatttataggattataaaaaaatagaatcttaaatattaacatatctagaaaattttgttagtcagcttaaaaacggctgtgaaaccccaagttggctgcccaggaccaaatttagtgaatacgatcttgtagaatcctggcggagcgatttccggcaatccatcaccaccgattttgcacttgtcaagcttataggtgttctttggccagggaggctgaaatttatcttcgtatttgggtagattggagcagtagccgaggttttttgagatcacatccttatagtaggtgttgatgtaatcatagaagggctgtttgggtattgcccagggtagcagcttgtaatcactctcatcgcccgaattactgcgatacgcttgtgcctcaacctagacaatatattgtgaactaaattataaataataaatgatttggaatgacccaccatcgtttcctcattcgtgtcatatttccactctaagatggccgaaagtccgtaatctgaacgccccagacgttcgattttagcttcaaatttaagcttgctttcatccgaagaggttgcggttaataatataggctcgtagtcccattttcgctaaaaacataagaaacattaggtattgaaattaatttttttatgcccaaacttactgatgctgctgtcaaatgaaataatatacacactattccgattctagttgaggttgtaa

SEQ ID NO: 27947 - DNA, 582 bp, DROSOPHILA
tttcatattggccaaatggattccggctattcgtcagtcttaatattgttggcagtttggctaatcagtagatgcggagcagcgcggaaatgggagtacgaacctgtattgatattaaccacctcttcggacgacagtctaataaaattagagtccagtattgttcgcttagggcgtggaaagtttggaatatcagcgcgggtggagtggaactatgacaccactgaggagacaatggtggaggctgttgtataccgcagcaattcgggtgatgagtccgactacaagctgctcccttgggccattcctaagcaaaccttttacgactacctcaactcctactacaaggatgtgataatgaagaactttgccccctgttccaatgtgccgcagttcaagggcaaatttcaaccgccttggccgaaacgaacgtatatcggtgacaaatgcgtctttgaagccgaaggttttccggatatcgtgccacctggattctacaagattattttcaattgtaccggacctgatcagccatcgtggagctttatcggaatttttaaaataataaacaaaatgttttag

SEQ ID NO: 27948 - protein, 188 aa, DROSOPHILA
MDSGYSSVLILLAVWLISRCGAARKWEYEPVLILTTSSDDSLIKLESSIVRLGRGKFGISARVEWNYDTTEETMVEAVVYRSNSGDESDYKLLPWAIPKQTFYDYLNSYYKDVIMKNFAPCSNVPQFKGKFQPPWPKRTYIGDKCVFEAEGFPDIVPPGFYKIIFNCTGPDQPSWSFIGIFKIINKMF

SEQ ID NO: 27949 - DNA, 7143 bp, DROSOPHILA
actcaatcgggacattcgtgccgccgctgccttgagatacttttgcttcccgctcgccgtataattgcgaaactcattgaaggcaattagtaataaattcctgtaggtcgacatggaaagagttctggcattcggtggacacatgacgctgaatttctgagcaaatacacaatttcacggatgtagtttcttcagattgtactccactcaccgatgggttattacaggctaggttatttgtaccgcagtaaggcagctggcaaaaatcaaccaacttgctgcatccaaagggaatgaaattgagcagtgctacgaatatgaacccacttagttccattttctagtgaagtctggaggttttgctaggggaaattcgcctatttattgcctagacaaagtatgtatatttaactgtaataacagtttcttctaggaacataaaaagctgcggctaatgtttataaacatatgatttcttgggaagtgagagagcttatatgtatagcgctacctggtttaactgtagcaaccatacctcgtttgatattattaattataactggtatgctatatcccgaaaccacagggatcttaaactcccccaattaaagctgccacattcattataagtgtgtcaattgaacaatgtcgtcagggatgtgctcattaagggcacagcagttggcgatatttgaaaaatccattaggtccttctgccacgaccgcaaggcaactgctgcccccgccttccttttccgcgtccaccccgccctcgaccttttggccagatcacacttaacgcttcgtgtggcataaaatttctatacaacaatttatgttaaaattaatgaagacctcttggcggggtgtgtccgcgtgttgaggtgttaagcattaagcaagagcccggaaaatgtaaattccgaatgcctggagctctggacaggggcttctgttgacccaggccgacggctggctggcaatgaatgtcatttggattaagcgttggataagtttttaatttattgtgcagacaacacaatgtcggctagtctagagtcggcggatccgccaggttaagtgggggtgtaagtgcaggttatcttggcgtgcttatcggagcgttcccatcgtggccacgtgccatgtcccacggtcagggatacgagtccacattcttcttctccacctagttcagcttgaactggctgggctcggtgcccgagtggaggaccaggtgctcgggggtcatcggggcggtgagggtcacccaagacttgggcacgccggcgtcatcgcgagctgattgcagggcctgctgcagggcaaaggcgactgcgatggacaaacagatggctggctctccggtggctaaggataaagaagtcccagttagctggattcacaaccatgctgtagatagatactcacccttggatctcatgaagcccgccttgttgggactcttggggagcagctcgatgcgcagatcagtgggtatgtccttagctcctggtggcttatacgtccaggtacgattcgtgagacactcgcccgtcttcggatccgcaatcacttgctcgctggtccagtagcccaagcccatcatgaatgcaccctcgatctggccaatatccacattgggattcagactctcaccagtgtcctccaggatgtccactcggcccacaatgtagttaccggtgaggacatccaactccacctcggtgaggcagagaccgcatacggagtacggatccatgtcgccctgcttgcactgatcgctggcgatcagattgatcttgcggttgtaggcctcctggatgaggtcctgccaattctcgggcttcacctcctcgcgcacgggcttcaatcgttcatttagagtctcgcacgccttgcggactgcaaagcagagggtttcactgcccacagcccctccagtgaccatggagttggctccgttgatggtatcgctggcctcgatgcgtacctgttccatcggaatgcctagggtgtgggccgccacctgcgagatcttggtgttcatgcctagcaaagagatacaaaagtttaagaccagcttctttacccaaggaccatcactcaccttgacccatttcaatgcctccatgggaaaccaccacggtgccatcgctgtggtagatagccaccgtagcggggtattgtccgaagtaaccgatctggtactccatgatacacaaacccaatccgcgcttgtgccagcggttctccttgttgtgggctatagcctccgccttccgttccctgtacttggtactttccaggaatcgcggcatcatgtcgcccattttatgggcgggtagcaaattggcgaatcgcacgtcagccggatccactccagtctcgaaggcgatgtgctcgatgatattttccatcattgcaataccctccacggagccaggagcacggcacggagtattcgatggcgaatccgtgcagactaggtagccatccagtttgtagttgtcgctgaactcgtagcaattcttggatagcaaaacggtatgaccaatgggtgattcgttggccagatatccagcatcctcgtagaatcgactaacgataccggagatctttccggatttctgaacgaaaaagtcgtagtcgcaatggaaggcccagcgtttgcccagactggtcatgatggactccaaggactggacgaatctaatgggtctgttcagcttgtgagcagccagagcagcagcggcagcagccagattgcatcgtgtggctttgcctccatatcctcctccaatacgacgcgtctttacctgaacatcgttggacttgaggttcagcacattggcgatggtgtcctgggttaggtccatccactgggtggcagcgtacacctgcaagccgccctcgaagggcagaaccactgttgtctgcggttccatgtagtagtggtactggagtcccatatccagttggccggaggagctcacatcaaagggttcctccagctggaggacatcgatggtggacttgatgggctgctccaaccgcttgttattgccagcttcggatccaactttgtctagcactgccttcaaggagggtagtatttcttccgctccgccctcgtaggtcagtttcaccagctctgctgcccgattggccagcgaattggagttggctaggattatgcccacgggctgaccataaaacttaatctctcccgtggcgaatagttcctcatccttggggaagaaaaactggtcccggattttgggcccaacgtagttcggtcccggaatgtccttggcatcgaggtacgccaccaccccgggtagatccagagccggttgcgtatccaccttggtgacttttgcgcccaccttcttcgcgatgacaaacgcagcccacaactggttgtgctgggtgggcagatcgttggagtaggtggcttcgccagagcactggatcagaccctcatgcttctctgttgccttggtcaccgggtagtgctcctggaaggtctcaaaactctgctggccacttgaaacgggacgtttcaggagagaaccgcctgtgacgaatcgactgcccaaaccctgctttcgctgagccgctatcttcaagaggaacttgtagaaaagaccacaggccaacttgcgtcggtagacgggtgaagcatccggaagaacggcatctggctgaagcagggtggacagctgcccgaaggccttctccaccaatccgttctcgaagggattcttgtcccgaatcaagttttcaatcgctgtggcatgcacgaattcgggatggatgccaccgaagcaaatgcgagctgatttcaccttggcgtctgccgtgaactccacgaggaaagcagcgttcacataggcatgggcattctgcgcacggggcataatctgttaaaagagtaaaattaaaatatattcaattttaaatgatttgtaaatgaaagaatggctatcttatcagctttgagataatcaccccaaagtgtcgtaattgctcgtttttttcgcatttctaaaaacttacaagacatttgtaaagtcgcattactttcgttgataagaaattgtactgcacttcactacttcgaatactccataatttgcactcaccttgtaggagtcaaatgcaaaccgctccttgggatacgcgcgcagcaccagaccacggataatctttccctccatggaagagcccagatagctggccaggctgacagtctgctgcttgtccaccgcctcctggacaatcacttgagcatctagggcctccaggacgatgaacacatccgaggggaactccgggtgggcatgcttgatggacagattgcccgccaaggtgccagcctgggttaatgcgaaatgggttgataaacacaaggtgctcaaggtgttttcattgttggcctgattagataagggtcgagggctttcaaacctcttggatttgacttacattgcgcactggaacattagcgatccaatcgaggtgttgccacacctgagacaaatactcgaagcccttcgtgttctccaactggcgacacagctccatggtttcactgagactcagatttccaccgagagttagggatgagttatctgcgctcagcttatgacccttgagctccgccaagccggaaacatcgatgaatgcctttatgtccggactacgtctgtagacgccgtgggccgtatttccagccaccagcatgtagggcagcttctctttgactgctccctgcagagcggcaaagaggtcacccagactcactggccaactccagcggctgccatccggatacagttggctgcccttgggctgctgcttcttgcagctgccggagcaggtttggccggtcttgggacactttttggtgctcaggtcttcaatgtcaatgcactcagctggtacctggatgttgctgtccacggcaaaggatttcatggcgtcaagaatgggacgatagccagtgcagcgacagatgttgcctccaaaggagttctccacctcctccattgtgaccttgccgcccttggacttcagcaggccgtacatgttcatcacgattcccggcgagcagtagccgcactgggtgccgttcatcttggccagtcgctgctggatggcatggtagccgacccgcttgttgcccaatccctccgaagtggtcacctccaggcccaagcacgtattcagcagcgtgaggcacgagttgaccgcccaggtgcgcagctctccggtctccggatgaatcccagtcagggtgcagacgcagacgccgcatccgccctcctggcacatgaacttcgtgcccgttaatccggcatactctcggatgaaagtgttcagcgagatatccgccggcagggcagacaggttgactagggggcacaagcaaacggaggcataagtgtctacacaatccgggtgttatcttatcgagtagcctaattcctcacaacatgtcaaagaacaattgtttgcgatatctgcttcttatgagctaacgattgctgctgagctattatttaaatattttagaagaaaatgcttgtaattgatattcagtacctctcagtttgtagaagtgctctgatgggctaatgaaaataaattagcaaaatgaaatggaaccctataaaatattgttacaactgttttggaaacgagtctagccatgttttactcagaagtaattcaccaagcttttcacaaggtcgtcgcaactctcatctaactagcaggtatttagtagtcgaatttctcgaccctggtgttccagttcgttgtctcggcaatcttgtagatgccagcccccatcaatccataggcaattaactgcccacacatgcatacacaccttcgtggctggtgccgttgattgtaattcttccagccattatctgtgaattatataagtcccttgaatcacttaaaagccgtccgggaatcgttgtgaaattaattgcagcctttctcgccttcaattgacgcgggtgttcagaattatttggatggttatagtgggttctggaaactatgttatttcacaatatgtggcaatgagtccacttgtcagcctcgtttgattccacgccgaactgcgagcgactgagggtatgggccttccgtagccccatatatatagtggttctccggccctcgaaagagactcccgcctctccaagttcaagttcacctgctccccgctcttaactaccatgttccatatactgcgctcacaattcagcattagatcatcgtagcactctgaaacgttatcgtctgccggtttcaaatactctccctcggttttggaactgaaagctttatcagtaaacggcttgtttcgacgtttttgttttgctcatatttctaaacaaaacggcgagattatgttcggaataaggggaactagtcctataaacagagtggtgccttatgagcgaaagatttcttcaaaacatatatgtacatatgtatacaattctattaggaattatataacaggagaacgattcttcaaaacttcaaacgatttccacacgattctatatttatttagtaagataaattacataatacagataaagaaatcaaaagatcgaagcagtacaccaaatgaaatatcgaaaaatacccaaatctaagccagaacttcatttcattacaaggcgaatgcttccacctggcttccggagttaaggacgaccgtttccggcgtcgttggtgcccccaagcgaacccactccctcggaagacccgcatcgttcctggccgactggatggcgtgttgcatggcgaacagagctccgacagccagacacagagcaggctcacccgtggccttggatcgcataaagcccacggggttgggactcttctggagcaactcgatgcgaaagtctatcgggatatccttggcgcctggtgggtggtagttccaggtgcggtttgtcagaatctgacctgtctgacgatcgtaaaccagctgctcggtgagatagtatcccaaacccatgacaaaagcgccctccacttgacccacatctatatgtggactcaggctttccccggcatcctctaggatgtcaacccggcgga

SEQ ID NO: 27950 - DNA, 4215 bp, DROSOPHILA
cagttcggcgtggaatcaaacgaggctgacaagtggactcattgccacatattgtgaaataacatagtttccagaacccactataaccatccaaataattctgaacacccgcgtcaattgaaggcgagaaaggctgcaattaatttcacaacgattcccggacggcttttaagtgattcaagggacttatataattcacagataatggctggaagaattacaatcaacggcaccagccacgaagtcaacctgtctgccctgccggcggatatctcgctgaacactttcatccgagagtatgccggattaacgggcacgaagttcatgtgccaggagggcggatgcggcgtctgcgtctgcaccctgactgggattcatccggagaccggagagctgcgcacctgggcggtcaactcgtgcctcacgctgctgaatacgtgcttgggcctggaggtgaccacttcggagggattgggcaacaagcgggtcggctaccatgccatccagcagcgactggccaagatgaacggcacccagtgcggctactgctcgccgggaatcgtgatgaacatgtacggcctgctgaagtccaagggcggcaaggtcacaatggaggaggtggagaactcctttggaggcaacatctgtcgctgcactggctatcgtcccattcttgacgccatgaaatcctttgccgtggacagcaacatccaggtaccagctgagtgcattgacattgaagacctgagcaccaaaaagtgtcccaagaccggccaaacctgctccggcagctgcaagaagcagcagcccaagggcagccaactgtatccggatggcagccgctggagttggccagtgagtctgggtgacctctttgccgctctgcagggagcagtcaaagagaagctgccctacatgctggtggctggaaatacggcccacggcgtctacagacgtagtccggacataaaggcattcatcgatgtttccggcttggcggagctcaagggtcataagctgagcgcagataactcatccctaactctcggtggaaatctgagtctcagtgaaaccatggagctgtgtcgccagttggagaacacgaagggcttcgagtatttgtctcaggtgtggcaacacctcgattggatcgctaatgttccagtgcgcaatgctggcaccttggcgggcaatctgtccatcaagcatgcccacccggagttcccctcggatgtgttcatcgtcctggaggccctagatgctcaagtgattgtccaggaggcggtggacaagcagcagactgtcagcctggccagctatctgggctcttccatggagggaaagattatccgtggtctggtgctgcgcgcgtatcccaaggagcggtttgcatttgactcctacaagattatgccccgtgcgcagaatgcccatgcctatgtgaacgctgctttcctcgtggagttcacggcagacgccaaggtgaaatcagctcgcatttgcttcggtggcatccatcccgaattcgtgcatgccacagcgattgaaaacttgattcgggacaagaatcccttcgagaacggattggtggagaaggccttcgggcagctgtccaccctgcttcagccagatgccgttcttccggatgcttcacccgtctaccgacgcaagttggcctgtggtcttttctacaagttcctcttgaagatagcggctcagcgaaagcagggtttgggcagtcgattcgtcacaggcggttctctcctgaaacgtcccgtttcaagtggccagcagagttttgagaccttccaggagcactacccggtgaccaaggcaacagagaagcatgagggtctgatccagtgctctggcgaagccacctactccaacgatctgcccacccagcacaaccagttgtgggctgcgtttgtcatcgcgaagaaggtgggcgcaaaagtcaccaaggtggatacgcaaccggctctggatctacccggggtggtggcgtacctcgatgccaaggacattccgggaccgaactacgttgggcccaaaatccgggaccagtttttcttccccaaggatgaggaactattcgccacgggagagattaagttttatggtcagcccgtgggcataatcctagccaactccaattcgctggccaatcgggcagcagagctggtgaaactgacctacgagggcggagcggaagaaatactaccctccttgaaggcagtgctagacaaagttggatccgaagctggcaataacaagcggttggagcagcccatcaagtccaccatcgatgtcctccagctggaggaaccctttgatgtgagctcctccggccaactggatatgggactccagtaccactactacatggaaccgcagacaacagtggttctgcccttcgagggcggcttgcaggtgtacgctgccacccagtggatggacctaacccaggacaccatcgccaatgtgctgaacctcaagtccaacgatgttcaggtaaagacgcgtcgtattggaggaggatatggaggcaaagccacacgatgcaatctggctgctgccgctgctgctctggctgctcacaagctgaacagacccattagattcgtccagtccttggagtccatcatgaccagtctgggcaaacgctgggccttccattgcgactacgactttttcgttcagaaatccggaaagatctccggtatcgttagtcgattctacgaggatgctggatatctggccaacgaatcacccattggtcataccgttttgctatccaagaattgctacgagttcagcgacaactacaaactggatggctacctagtctgcacggattcgccatcgaatactccgtgccgtgctcctggctccgtggagggtattgcaatgatggaaaatatcatcgagcacatcgccttcgagactggagtggatccggctgacgtgcgattcgccaatttgctacccgcccataaaatgggcgacatgatgccgcgattcctggaaagtaccaagtacagggaacggaaggcggaggctatagcccacaacaaggagaaccgctggcacaagcgcggattgggtttgtgtatcatggagtaccagatcggttacttcggacaataccccgctacggtggctatctaccacagcgatggcaccgtggtggtttcccatggaggcattgaaatgggtcaaggcatgaacaccaagatctcgcaggtggcggcccacaccctaggcattccgatggaacaggtacgcatcgaggccagcgataccatcaacggagccaactccatggtcactggaggggctgtgggcagtgaaaccctctgctttgcagtccgcaaggcgtgcgagactctaaatgaacgattgaagcccgtgcgcgaggaggtgaagcccgagaattggcaggacctcatccaggaggcctacaaccgcaagatcaatctgatcgccagcgatcagtgcaagcagggcgacatggatccgtactccgtatgcggtctctgcctcaccgaggtggagttggatgtcctcaccggtaactacattgtgggccgagtggacatcctggaggacactggtgagagtctgaatcccaatgtggatattggccagatcgagggtgcattcatgatgggcttgggctactggaccagcgagcaagtgattgcggatccgaagacgggcgagtgtctcacgaatcgtacctggacgtataagccaccaggagctaaggacatacccactgatctgcgcatcgagctgctccccaagagtcccaacaaggcgggcttcatgagatccaaggccaccggagagccagccatctgtttgtccatcgcagtcgcctttgccctgcagcaggccctgcaatcagctcgcgatgacgccggcgtgcccaagtcttgggtgaccctcaccgccccgatgacccccgagcacctggtcctccactcgggcaccgagcccagccagttcaagctgaactaggtggagaagaagaatgtggactcgtatccctgaccgtgggacatggcacgtggccacgatgggaacgctccgataagcacgccaagataacctgcacttacacccccacttaacctggcggatccgccgactctagactagccgacattgtgttgtctgcacaataaattaaaaacttatccaacgctt

SEQ ID NO: 27951 - protein, 1273 aa, DROSOPHILA
MAGRITINGTSHEVNLSALPADISLNTFIREYAGLTGTKFMCQEGGCGVCVCTLTGIHPETGELRTWAVNSCLTLLNTCLGLEVTTSEGLGNKRVGYHAIQQRLAKMNGTQCGYCSPGIVMNMYGLLKSKGGKVTMEEVENSFGGNICRCTGYRPILDAMKSFAVDSNIQVPAECIDIEDLSTKKCPKTGQTCSGSCKKQQPKGSQLYPDGSRWSWPVSLGDLFAALQGAVKEKLPYMLVAGNTAHGVYRRSPDIKAFIDVSGLAELKGHKLSADNSSLTLGGNLSLSETMELCRQLENTKGFEYLSQVWQHLDWIANVPVRNAGTLAGNLSIKHAHPEFPSDVFIVLEALDAQVIVQEAVDKQQTVSLASYLGSSMEGKIIRGLVLRAYPKERFAFDSYKIMPRAQNAHAYVNAAFLVEFTADAKVKSARICFGGIHPEFVHATAIENLIRDKNPFENGLVEKAFGQLSTLLQPDAVLPDASPVYRRKLACGLFYKFLLKIAAQRKQGLGSRFVTGGSLLKRPVSSGQQSFETFQEHYPVTKATEKHEGLIQCSGEATYSNDLPTQHNQLWAAFVIAKKVGAKVTKVDTQPALDLPGVVAYLDAKDIPGPNYVGPKIRDQFFFPKDEELFATGEIKFYGQPVGIILANSNSLANRAAELVKLTYEGGAEEILPSLKAVLDKVGSEAGNNKRLEQPIKSTIDVLQLEEPFDVSSSGQLDMGLQYHYYMEPQTTVVLPFEGGLQVYAATQWMDLTQDTIANVLNLKSNDVQVKTRRIGGGYGGKATRCNLAAAAAALAAHKLNRPIRFVQSLESIMTSLGKRWAFHCDYDFFVQKSGKISGIVSRFYEDAGYLANESPIGHTVLLSKNCYEFSDNYKLDGYLVCTDSPSNTPCRAPGSVEGIAMMENIIEHIAFETGVDPADVRFANLLPAHKMGDMMPRFLESTKYRERKAEAIAHNKENRWHKRGLGLCIMEYQIGYFGQYPATVAIYHSDGTVVVSHGGIEMGQGMNTKISQVAAHTLGIPMEQVRIEASDTINGANSMVTGGAVGSETLCFAVRKACETLNERLKPVREEVKPENWQDLIQEAYNRKINLIASDQCKQGDMDPYSVCGLCLTEVELDVLTGNYIVGRVDILEDTGESLNPNVDIGQIEGAFMMGLGYWTSEQVIADPKTGECLTNRTWTYKPPGAKDIPTDLRIELLPKSPNKAGFMRSKATGEPAICLSIAVAFALQQALQSARDDAGVPKSWVTLTAPMTPEHLVLHSGTEPSQFKLN

SEQ ID NO: 27952 - DNA, 2407 bp, DROSOPHILA
ttgtccaacttgtaaacatttcgtggccatggtggcacaaaatcgccatcgaactgcaccatattggagcaatggcccacattcttgatgaacgcgtccttgtagaaaccgtttagatattcgaaaaatggctgtttaggaatggaccagggcatcattttgtaatcgtcttcgtcacccgatgagcagtgatgaacgtctgcctccacctgtccagcgattaataaccattttcttaattaatagaaacttgatattaaaatcaatatctcaaccatagtgtccttatccacatcgtagttccagtccagtgtcatggaaaatgcataatcgctgcgcccaagtcgatcaatttttgtggtgatcttcaagagactctcatctgagctataggatgtcaatgataagggctcatactcccagttacgctgtggaatgagcacagaaattataagtatcctattttgttagaatatcctggcatactcctgctttgcagccatcgatcagcagcgtagcgagcaaaaatagcaacgaacaacacgaaatcatttagccagactttaaacttcatcaacttgcaatttagttgcatttatatagcaaactgcagtggattgcatgtattaattatataactccctgttacattttgggctaaccatgtcaaacaagactgcatgccaaaaacatgaaaaaatgtgtggactttgaatattaaatatgaattttgtttattggttggtctttagctacaattgagcaaacttacaaatgtatattaagtatttgagaaatgtgaatttttttacacaataactgaaaattctcttccactagtaattgttactgatcttgaatttttcttgaatatttcttacctccttcaaggacactcatttcttatcgaaacagctaaaatatttcaaatttttaccattgattttattaaacataagcgcagttaaaaaaaaaatgtgtttatctaagataatggtttttacattaatttgggtgtgattttaaaaactgacgtagtgttccatgtgggttgacctggtccatagcatttgatcacaatcagataaaaaccggcaggaacaatttctggcaacccatcgccatcgatcacgcatttgttgccaaaataggtctgctttggcaatggcggttggaatttaccctcgaattgcggaatattggaacagtgcttaaagttcttcatcgaaacatccttgtaataggtgttcagatgttcgtatagcgattgcttgggaatggcccaaggaagcagcttgtagtcgctgacatctcccgtcgagcttcgaaggacattggcctcgacctacggaaaaatcacaatccttattcaaaggactaacttatcaagtaagacacacgtaccatggtttcatcagtcgtatcgtagttccactcaaccttggcgtcaatccaaacactccgcgattgattcgctcaattttcatatctaattttattaaactctcatcggatgagtgggtttcgatggatatgggttcgtagtcccatttccgctggataattctttaaattattacaagatatatggaagatatgaactgtgaacctaccgccgtttggcattcacctacgagcaggagtgccatacaaagttcagcaataaaacaccggacagacataattacaatatgaaactaagtattgggaaatcgggctttatgcttatatagccatgtccattgataaaaaaaaatgtgcacattgtcacggcattttatcacactattgcagatctttcccacagtacctaaatgtatatgattatataactatttacagccattaaatacgaatagtccattgaaacacttaaacttcgcataacttttttatataagtatgtgcttattgtaactgatatatttagtttctgattttggaaatgtttttatttctgttttttattgtttatgttctattacatcattgtattacatttatctatgtacgaagatacgagttcaaattcagaaaaacacgtgtataagctcgctttaaaggatttaaaaaaatatttggccgtattttatttgatatatatttattgctacatagctaaaacattttgtttattattttaaaaattccgataaagctccacgatggctgatcaggtccggtacaattgaaaataatcttgtagaatccaggtggcacgatatccggaaaaccttcggcttcaaagacgcatttgtcaccgatatacgttcgtttcggccaaggcggttgaaatttgcccttgaactgcggcacattggaacagggggcaaagttcttcattatcacatccttgtagtaggagttgaggtagtcgtaaaaggtttgcttaggaatggcccaaggg

SEQ ID NO: 27953 - DNA, 348 bp, DROSOPHILA
atggtcgaggccaatgtccttcgaagctcgacgggagatgtcagcgactacaagctgcttccttgggccattcccaagcaatcgctatacgaacatctgaacacctattacaaggatgtttcgatgaagaactttaagcactgttccaatattccgcaattcgagggtaaattccaaccgccattgccaaagcagacctattttggcaacaaatgcgtgatcgatggcgatgggttgccagaaattgttcctgccggtttttatctgattgtgatcaaatgctatggaccaggtcaacccacatggaacactacgtcagtttttaaaatcacacccaaattaatgtaa

SEQ ID NO: 27954 - protein, 115 aa, DROSOPHILA
MVEANVLRSSTGDVSDYKLLPWAIPKQSLYEHLNTYYKDVSMKNFKHCSNIPQFEGKFQPPLPKQTYFGNKCVIDGDGLPEIVPAGFYLIVIKCYGPGQPTWNTTSVFKITPKLM

SEQ ID NO: 27955 - DNA, 2447 bp, DROSOPHILA
cgccttgggccagggtggtacaaattcattttcatagacgggcaaatcggtgcaattgcccagattcggcaacaacaggtccttgtaaaaggtattgacatattcggtgaatttctgcggttgaatggacatgggagtcagtttgtaatcggactcgtcaccggagtaactgctcagaatacgcatctcgacctaaaagcagtatttgatttttaagtgcttttgaatcaatgatatttggtacagaaattaccatcacgctatcgtccacatcaatattccagaagaatgtgcctgaaaacccgaattccgaccttgaaatgcgctcaattcgcagattcatgtccatggcactgggatttgtggtggtgccaccaatcgacaatggcgttgcctcccagttgggctggaaacaataaaccatatttaaaaaaaaataaagaaatatttaggaatatttctttcttagcatacctttgccgcacaaccattgtaaaggtttgcaaaaatacacactgataaaagcgatgaaatgcaaaacgaaatcatttctggttaaattgacaatataagttgcaacctacttgcttttatagtctgtcaatttagatttatcttttaaaaacatttgtgacacgaaaacattgtgtacaattgtgcacattgttagattattgaagttggaataggtgtaaatcatgtcaagcttatctaaatttactgatcgtcacggtatcacccatccaaatttagcaaattacacaaatacacaacgcgcaagtcatgcttgcattggctaaaaaaattttctttcatatttggatatgcagaagttgataatgtagacgataaattcgttgtaaataaaatacaaaaatataaattttataaatattaatttaatacaatttaatataaattcattttacacaacatagtacaatttgttaagtagaaaaaaaaatgtttgaacttcttaagagccgcatataatataatattaaataacctttggcgagaccttaacaatcagggtgaaaccccaatccacctgtcctgtcattttatactctagcttgtagaaaccctctggtgcaatatctggcagtccctcgccactggccacacatttgtccaacttgtaaacatttcgtggccatggtggcacaaaatcgccatcgaactgcaccatattggagcaatggcccacattcttgatgaacgcgtccttgtagaaaccgtttagatattcgaaaaatggctgtttaggaatggaccagggcatcattttgtaatcgtcttcgtcacccgatgagcagtgatgaacgtctgcctccacctgtccagcgattaataaccattttcttaattaatagaaacttgatattaaaatcaatatctcaaccatagtgtccttatccacatcgtagttccagtccagtgtcatggaaaatgcataatcgctgcgcccaagtcgatcaatttttgtggtgatcttcaagagactctcatctgagctataggatgtcaatgataagggctcatactcccagttacgctgtggaatgagcacagaaattataagtatcctattttgttagaatatcctggcatactcctgctttgcagccatcgatcagcagcgtagcgagcaaaaatagcaacgaacaacacgaaatcatttagccagactttaaacttcatcaacttgcaatttagttgcatttatatagcaaactgcagtggattgcatgtattaattatataactccctgttacattttgggctaaccatgtcaaacaagactgcatgccaaaaacatgaaaaaatgtgtggactttgaatattaaatatgaattttgtttattggttggtctttagctacaattgagcaaacttacaaatgtatattaagtatttgagaaatgtgaatttttttacacaataactgaaaattctcttccactagtaattgttactgatcttgaatttttcttgaatatttcttacctccttcaaggacactcatttcttatcgaaacagctaaaatatttcaaatttttaccattgattttattaaacataagcgcagttaaaaaaaaaatgtgtttatctaagataatggtttttacattaatttgggtgtgattttaaaaactgacgtagtgttccatgtgggttgacctggtccatagcatttgatcacaatcagataaaaaccggcaggaacaatttctggcaacccatcgccatcgatcacgcatttgttgccaaaataggtctgctttggcaatggcggttggaatttaccctcgaattgcggaatattggaacagtgcttaaagttcttcatcgaaacatccttgtaataggtgttcagatgttcgtatagcgattgcttgggaatggcccaaggaagcagcttgtagtcgctgacatctcccg

SEQ ID NO: 27956 - DNA, 381 bp, DROSOPHILA
atgacactggactggaactacgatgtggataaggacactatggtggaggcagacgttcatcactgctcatcgggtgacgaagacgattacaaaatgatgccctggtccattcctaaacagccatttttcgaatatctaaacggtttctacaaggacgcgttcatcaagaatgtgggccattgctccaatatggtgcagttcgatggcgattttgtgccaccatggccacgaaatgtttacaagttggacaaatgtgtggccagtggcgagggactgccagatattgcaccagagggtttctacaagctagagtataaaatgacaggacaggtggattggggtttcaccctgattgttaaggtctcgccaaaggttatttaa

SEQ ID NO: 27957 - protein, 126 aa, DROSOPHILA
MTLDWNYDVDKDTMVEADVHHCSSGDEDDYKMMPWSIPKQPFFEYLNGFYKDAFIKNVGHCSNMVQFDGDFVPPWPRNVYKLDKCVASGEGLPDIAPEGFYKLEYKMTGQVDWGFTLIVKVSPKVI

SEQ ID NO: 27958 - DNA, 2577 bp, DROSOPHILA
catattacacaatgtaaccattaaaaagcatatcgaatctgctgatagaaacatgatttggtatgttttaaaggataaaccaaagaattgagtttttcttaaatgaagatctaagactagtcttaaatctttttcttttaaatcaatgctcaaagtgcctcaggtcttgttaaaaaaaacctctgcgactttatttcgtagctgtgaaattgccaatgatttccatgcgatgttggctcactctaaactgcacttttttttccaccagccaacaagcggagcagcctgaaaatggggaaaacacagtggcggccacaagtttttcgagaggcgggttgcggcgggtaggtgccgcatgctgctgtcatcagttgacagccagcagcagcagcgtcgccttcgtcgttgtagcttttaacaatttgcaataaattagccgaggcaactgtgcagagttttcacttgaaatgcaacacgaattgcattttcaaggggggagcgaaatgaggggaaagtaaacaggaaaaaaaatgagagactttctttgctttaagaatgtcttgttagagcagttttacaaccttatggtttgcacacttgttagttaatactttcagctattttcatttatatgagcataattttctttggcaaaaaccctttttctcagtgctagcgacacttggtgcaatttttgttcgaagttactctctatcccgccaactaccacactccttttcttaccacaacagtttccaaacatgtcttgccaatttcacactcgaactgcctgcctgcctgcctttccgtcctcccaacttcagctggctaaaagcgatttttacctggcccggttcatttattggcccccgagtcggtcggattttatgacgatcctctcgtcgcagctggaatttcggcccacacctcggaaatgcccaacagcaaaaacagttggcaatagagtgagaagatgttctgcgatttaatgctcgaatatttagaacattttcgttctgatccgcagaacgacggacacggtgacttcaagatttggctgggcggtgatgacggcttcgcctttatagaagccatctgccaaaatatccggcaatccttggccgttcagagcgcagcgggtgaaattgtaggtcgccttgggccagggtggtacaaattcattttcatagacgggcaaatcggtgcaattgcccagattcggcaacaacaggtccttgtaaaaggtattgacatattcggtgaatttctgcggttgaatggacatgggagtcagtttgtaatcggactcgtcaccggagtaactgctcagaatacgcatctcgacctaaaagcagtatttgatttttaagtgcttttgaatcaatgatatttggtacagaaattaccatcacgctatcgtccacatcaatattccagaagaatgtgcctgaaaacccgaattccgaccttgaaatgcgctcaattcgcagattcatgtccatggcactgggatttgtggtggtgccaccaatcgacaatggcgttgcctcccagttgggctggaaacaataaaccatatttaaaaaaaaataaagaaatatttaggaatatttctttcttagcatacctttgccgcacaaccattgtaaaggtttgcaaaaatacacactgataaaagcgatgaaatgcaaaacgaaatcatttctggttaaattgacaatataagttgcaacctacttgcttttatagtctgtcaatttagatttatcttttaaaaacatttgtgacacgaaaacattgtgtacaattgtgcacattgttagattattgaagttggaataggtgtaaatcatgtcaagcttatctaaatttactgatcgtcacggtatcacccatccaaatttagcaaattacacaaatacacaacgcgcaagtcatgcttgcattggctaaaaaaattttctttcatatttggatatgcagaagttgataatgtagacgataaattcgttgtaaataaaatacaaaaatataaattttataaatattaatttaatacaatttaatataaattcattttacacaacatagtacaatttgttaagtagaaaaaaaaatgtttgaacttcttaagagccgcatataatataatattaaataacctttggcgagaccttaacaatcagggtgaaaccccaatccacctgtcctgtcattttatactctagcttgtagaaaccctctggtgcaatatctggcagtccctcgccactggccacacatttgtccaacttgtaaacatttcgtggccatggtggcacaaaatcgccatcgaactgcaccatattggagcaatggcccacattcttgatgaacgcgtccttgtagaaaccgtttagatattcgaaaaatggctgtttaggaatggaccagggcatcattttgtaatcgtcttcgtcacccgatgagcagtgatgaacgtctgcctccacctgtccagcgattaataaccattttcttaattaatagaaacttgatattaaaatcaatatctcaaccatagtgtccttatccaca

SEQ ID NO: 27959 - DNA, 516 bp, DROSOPHILA
atggtttattgtttccagcccaactgggaggcaacgccattgtcgattggtggcaccaccacaaatcccagtgccatggacatgaatctgcgaattgagcgcatttcaaggtcggaattcgggttttcaggcacattcttctggaatattgatgtggacgatagcgtgatggtcgagatgcgtattctgagcagttactccggtgacgagtccgattacaaactgactcccatgtccattcaaccgcagaaattcaccgaatatgtcaataccttttacaaggacctgttgttgccgaatctgggcaattgcaccgatttgcccgtctatgaaaatgaatttgtaccaccctggcccaaggcgacctacaatttcacccgctgcgctctgaacggccaaggattgccggatattttggcagatggcttctataaaggcgaagccgtcatcaccgcccagccaaatcttgaagtcaccgtgtccgtcgttctgcggatcagaacgaaaatgttctaa

SEQ ID NO: 27960 - protein, 171 aa, DROSOPHILA
MVYCFQPNWEATPLSIGGTTTNPSAMDMNLRIERISRSEFGFSGTFFWNIDVDDSVMVEMRILSSYSGDESDYKLTPMSIQPQKFTEYVNTFYKDLLLPNLGNCTDLPVYENEFVPPWPKATYNFTRCALNGQGLPDILADGFYKGEAVITAQPNLEVTVSVVLRIRTKMF

SEQ ID NO: 27961 - DNA, 2642 bp, DROSOPHILA
ggaactttttgtaacagatagtgcaatttttgtaggattttctaattatttatacggagctctccatattttatactttaataagcaaaagaataaatattcagggaccagcatattcattttaccgattaagtggcttaaataagactcaaaggcttttacttacatcaatatagaagttattctaatacattaagatgtgtattcaataaaagaagtccactctagtctcgaatcaacattactaatgcttttggagtgcctcgctcacatgcacacccaaactagaatgtatatttcgatggtcttatctattgtcccgatttggaagtctaatggcccagggtacatttcgaatttcaattgcatggcgaaattcaagcgaacgaaacgaaccgaaccggtcgatccagtagcaagaaatcgaatagatgtttcattttgtgatggcaattaacactttaatgtggaattctctcgattgcatttacaaatgggctacggtgagcattgaacactggctggagcttacttgctaaattggtaccagtttcgagtcttacgaaaagattaaaatcacaaaatcaaatgcattaagtacataaacaattggatccggctctggtttctggtgaaagttgattgagcaataaggtttgggtactattagttcttaaaaaacattatctgataaataaaagtatatggttacatttctaaaactttcacttttatgccgtatactaaatattaatatatttatacacaaatgtataaacttcagcgatttcgattaaaaatttcctaagctccagtgcggccaatttcagtttaaattggatataaaaaacatttgcaagtgtctgcacgaaatcaaaactaattaaaattagaatttaaactaaaaacaaattaaggaatctatagctaatcataacaaacagaaaatactgagtgcactaacgatataaatagttcggaattcagcgagtccgcagctctagggactctcgctgctgtggatgcgactgtgctccaggatatccgtgttctgcatgggctccagatccgtttcggagataatctctgccagccactgctcgatttggacgggatggaatgagtcttcatcaccgctgtttgcctcgaggatgatcttgagattctcgaagttcttaaggattagccgcttgcccggctgcaattgtggtcccgattcgctgtgcgttagcgatgtggtggtcgaaactggctcctgtttggcagccgactgctttggattgcagttggcatcgcaactggaatcggcagccgatgtttgaacgggctctgccaactggttgtatgtcctgcgtggcttctctaccatgctcttcttgatctcgttgagtaggcgattgtaaaaatcgcaggtgacatcgtgaatctcggtctcctcgtaccgctgggcctgtccaggcgtaggagtggaatccgagctgggttcacgctctatcttgtccagctttttgttcgccttttgctttttggactgcgaacgggagctggcattactggagtaattggaactggaggcggtggtggtgggcgtggagttcgagggttcggtggtactggaatcggcggacttggccaggggcatctctgcactcaccgcctcttcgctggcgcagttgatggtcaggctggctatgttgcgcagattgatcgtgccattgcaattgttgattgtgatttttggcttgaagcgctgtttgcgacccttgcatttcggtggttcttgtacgctgctctttgatttggcagaggtttctcgccccaagctggaaacggcttcggcaatcgaagattccaactcgtcatccagctcctccaagtttaagggcggcacatatgtatccctcttgatcttggccttttttatcagatcctttgcctcctgcagtgtaatgttgataatggagcgcttggcattatcttcgacgagacttctgttgcgagagaagtcgaccacaatggcctctggtggggcaccgtcttcgtccagatcgagatacgatacttgcccatcctgcaggcacttgtacatggtctcgtggtcatctagtggctctatgtagtcctcgttcctcaaacccgtggtgcggtaatcctgcagcgccaactgcatatcactgttgtccagcagaaagtgtccgtagcttcggatggctgtcagtagtttctcctccgcatcctcgctttccccgggaatgaaacgcacaccactttgatctttcttgccaaccgagttcgagttctccatttcggtgggcgacttcttcagcagctgctgctgctgtcgcgtgttcgctatgacctccagttgccggagcagcaacttctcgcgcatatgcaacgcagcacggatttcattgaacttcttttgtacggtgtctttgacctgggcgatgaaaaattggggcgtgtatcagtaaacagcagtcaaaacacacagtccattcggttttagggggctgaatataaaaaaaggagagtacaaacacaaacctcatccagattcttgtccatttcgtgcgtgctactaaatactttctcctttctaaacgctgcgcattttttttcataaattcctgtgtatc

SEQ ID NO: 27962 - DNA, 642 bp, DROSOPHILA
atgcccctggccaagtccgccgattccagtaccaccgaaccctcgaactccacgcccaccaccaccgcctccagttccaattactccagtaatgccagctcccgttcgcagtccaaaaagcaaaaggcgaacaaaaagctggacaagatagagcgtgaacccagctcggattccactcctacgcctggacaggcccagcggtacgaggagaccgagattcacgatgtcacctgcgatttttacaatcgcctactcaacgagatcaagaagagcatggtagagaagccacgcaggacatacaaccagttggcagagcccgttcaaacatcggctgccgattccagttgcgatgccaactgcaatccaaagcagtcggctgccaaacaggagccagtttcgaccaccacatcgctaacgcacagcgaatcgggaccacaattgcagccgggcaagcggctaatccttaagaacttcgagaatctcaagatcatcctcgaggcaaacagcggtgatgaagactcattccatcccgtccaaatcgagcagtggctggcagagattatctccgaaacggatctggagcccatgcagaacacggatatcctggagcacagtcgcatccacagcagcgagagtccctag

SEQ ID NO: 27963 - protein, 213 aa, DROSOPHILA
MPLAKSADSSTTEPSNSTPTTTASSSNYSSNASSRSQSKKQKANKKLDKIEREPSSDSTPTPGQAQRYEETEIHDVTCDFYNRLLNEIKKSMVEKPRRTYNQLAEPVQTSAADSSCDANCNPKQSAAKQEPVSTTTSLTHSESGPQLQPGKRLILKNFENLKIILEANSGDEDSFHPVQIEQWLAEIISETDLEPMQNTDILEHSRIHSSESP

SEQ ID NO: 27964 - DNA, 7547 bp, DROSOPHILA
aaacccaagcgtttcttgactttaggagtccagtttattcaacaacaattaacagacagaaacaaaatgcaggtaaactaaccgctgtcatcgtttaccaggccagcggagtgccgtcgtagttgacaaaaccgccgttctgtttctcgcccagcttgctgatggtctgcacaatttgtcccgtgctggtgggcacgtccaagggggcactggagccacccatgtcggttttcacccagccaggatgcagactgacgcacatgatgcgttgcggatacagatccacgctcaacgacttggtggccgcattcaaggccgacttagaggtgcgataggcgtacattccgccgtccgtgttgccctggatggagccaaggatcgaggacatgttaataatggcggcacggcccacgcccatcggctgggattcgttcgctttggctgccttcttaaggagcggcagacacgccttggccagcatgatgggcacaaccgtgttggtctgcaaggtgtcgagcagctcctgcgatcgaacggccgttatcctggccgatttgggcgctatgccggcattgttgaagagcacattgaggccttggtccttggtcacgccctcgatgtcggcgactagcttgtcataggcatcgaaatttctcaaatctgcacggaaaatatatttatatgcgagagtgtttagcggctggtaaaacataatgcttaccaatctcaagtatgtgtatgttcgagtggttcttggctagatcctccagctcctgtgggccaaattgggaaagacaaaatgtttgaataagaagcacattattagtaaaaaagcagtttatatatgaataattttccagttaaattactgtaatttttagaggcaaatttggtatttcatgagagtttaaatagcgcgcccaacgagcgcgttagtgccataataaccgatagacgataagtgctgctggtgtgaccgaacaatagtcggcccagcaatcgacaagccaatcgacgtctccctttcgcacgctcgtacgaaagtacaaaagctattgcaaaagttggctccgcttattcgtttcgtgctttcgcgagtgccgagagccgctacaatacacgcttagcagtttttacatttccgcttcgactacaacaacattcactacccgccgttgatccttgttttctgtctgatttacgtggagcacctaccaacaagcaacaaaataatggcgcccgtgcaaggtgagtttcacagttaattcgattccaattgaaccattcaatttatgcatgcccatttggacgattaaaaagcggtttgtagaaatagtggctcttgtggattgttcgcgtagcttctgtagtttctgtagctcgacggttgtgagtcaccggttttgttggattactggattgtcttagtagagagacaacgcaaaataagaagaaaacatctctcacctttgcctgctcgcgattccggcaggtggtaaatagatgctgcggcggctggggaagattgagcagcgccttgaccaggcccagacccaatcctcgattgcagccggttatcaggatggagttcatgttttttttttccgaagatccgcgatcgagttgctcgaaatcttatcgcgtcgtacttgagataaaaccaataaagggcggcactactatacgggttccgtgtgttctgtggatttcaccagacccgcagccagatctttccgtgcttatcaatcgactttattgccgtaacacaagcgtgaaaatagtgaaatgttaggaaaaattttgacggccggctgtttcgttcggacagcagcagtgttaccaaccatccgcgagttatcgatacacttgcgcattgccaaacgtgcgtttcgcacatttccaattggcaaagggcagaacaactgttgtgatgttcaaatcccaaatggaatttcgcaatccaatggatgctcctttatggcaaatccattttatcccaaacattctcgtttttgcggtacgcgctcttgcgccctctctctttctcgctgcttctgttacgtagccgtttatcggcgcctctgcctgcccaccgctttcgcagcattcccggccgaaccagcgaacgtgtttgtgttgtgtgttccgccgtcatttttctgcacccttttcgcgaatagtttcgtttcgcctccagctggtagagtgaaacgccaaacgttgaagaaggggaaaggccaacaagatgaacttgtgcaattcgagattctccgttacgttcgtgcggcagtgctcgacgattttaacgtctccttcggctggcattatacaaaacagaggctcactgacaacaaaggttccccattggatttccagtagtctcagctgtgcccatcacacgtttcagcgaactatgaacttgacgggacagcgaggatcacgcgacagtactggagctaccggtgggaatgctccagccggatccggtgccggcgcaccaccacccttccagcatccacattgcgacagggcggccatgtacgcgcaaccggtgcgaaagatgagcaccaaaggaggtgagcatcgatatcgattgatattctgattagatctttgctgttgccgccgcagctgctgctcctgttgccgccggttggcaacgcggtcgattgtcgcggttttcttgcttgttgttttttctgggtcttcttgtgtttaaccgacgccattatgcaataaccgttagttgcctggccaaaaagtccattactctgctcttattacctggcttatcgggtttctgcggcacgtattcgccaagggtttatatgcctgcccggcatttgctgtctcacatttgcaccgtcatcgtcaatcgtcatcgcgcacccgctccaactggaattgtacagtcggggtcgcgcgaacagcactcgaaactcgtatcatgctgaagtacatgatttgcgccatcgttgtgggcgccaaaaagagcacatcctctaagtataatggtcaacaaagttctgaatcgcgtataaatactatgtcagtcgaatttttttaattgaattatggattgctcataaaaccattactcaattgcagcttaaacaatatcagttatttgcctcaaaaaagaattacatcatatgacttaacgaattaataatatttgttaaattacattcatacaagtcacttgtattgccattttgcctttagctggtaaaaaaaaactaatatctatttatatgaagttaaacgtatttgatgttttaatttgtaatataatataaatcccacatgccacgatcaagttttcttgttaaatgaataattagccaatcgagcagatacgaagcttctaattccgaaaacaatagaagaatttacttataaatatatgccatattctgatttcaaatggtaattaagggtataataggatttcttaaagcaccaacgtgatatgtgtgatttttgtcgaatgcggtgctcttgaacgaataaccctttgcggaatgttcgagaatcgctttatgatgatgatgatgatgatttcaccatatcagtcgggtgcatttattccctttatctgtgttttctatttcgtatctctcgtatccgtcgctcaacgagcgcccgccatcgtctttgatctttcatcatcattgctgagctgcgtcatcaccacttcattccgcaattaattgcagtgtgacgacaacaattgtttatttgcactcgcattcgtacgtagccacctgatttccccctgttcctggccaggattagcattccgtccgataaaagcgaattgtgtgtggtgttgccaactagttttggggcgtaaccatgacaaagtccggcgggtcaaagcaaaccgaatgggggggcgtaggtggacggacggaagaaaggcgtggccgggctgggatgggcgtggcttggtgtgtggcgatgtcgctagatgattgctccactttgattcgaactcccactgacccagtggcatgtgtggcattcggcagcactatcgctacctggcaactgaagccaaggagctcgacgggattgcacggtgcagattacggattgcaggaggccaaacagtcttcgttccgcacttctttggtctggatgcatctgttcgaattcataccggcttcccagttggtcgagggtgaaccacgccaccggaggagcatctaccgatccgcctatctggacatacgactgcgcgaggagtccaccaaaggcaggcggggattagccataatcatgagtgaagctaaagagaaacttgagtagttggcaccacatggctaattgatatcattacctatcactgataaggattttcaactaatctagatactggttaagaacaaaaacagaccatgccaatacaacatggctattgatgttactaacggtgataagtttttaataatacaaggtgaattggctgtgctacgattagatttcctgacggctcctcatgttctgtgacctcttgacctctttaagcccaattttggcagtagattacatatttctatagacaaaaggcgatgaatcaaacgaaaaccttttttctcctgcaggatcctacgactacgaccttattgtgattggaggcggctcagctggcctggcctgcgccaaggaggcagtcctcaatggagcccgtgtggcctgtctggatttcgttaagcccacgcccactctgggcaccaagtggggcgttggcggcacctgcgtgaacgtgggctgcattcccaagaagctgatgcaccaggcctcccttctgggcgaggctgtccatgaggcggccgcctacggctggaacgtggacgaaaagatcaagccagactggcacaagctggtgcagtccgtacagaaccacatcaagtccgtcaactgggtgacccgtgtggatctgcgcgacaagtaagtgtgactatatctatggcttccgctcgagcatccccactaattatacccttctatttgcgctcaggaaagtggagtacatcaatggactgggctccttcgtggactcgcacacactgctggccaagctgaagagcggcgagcgcacaatcaccgcccagaccttcgtcattgccgttggcggccgaccacgttatccggatattcccggtgctgtcgagtatggcatcaccagcgatgatctgttcagtttggaccgcgagcccggcaagaccctggtggtgggagctggctgtaagtagctactttcatttgcttacatcaaattgatgaataacccattcggtttctgctctttcactcagacattggcttggagtgcgctggattcctgaagggtctcggctacgagcccactgtgatggtgcgttctattgtgctgcgtggcttcgaccagcagatggccgagctggtggcagcctcgatggaggagcgtggcattcccttcctccgcaagacggtgccgctgtccgtggaaaagcaggatgatggcaagctgctcgtgaagtacaagaacgtggagaccggcgaggaggccgaggatgtttacgacaccgttctgtgggccatcggccgcaagggtctggtggacgatctgaacctgcccaatgccggcgtgactgtgcagaaggacaagattccagtggactcccaggaggctaccaatgtggcaaacatctacgctgtcggcgatatcatctatggcaagccagagctgacgcccgtcgccgttttggctggccgtttgctggcccgccgcctgtacggaggatctacccagcgcatggactacaaggatgtggccaccaccgttttcacgcccctggagtacgcctgcgtcggcctgagcgaggaggatgccgtcaagcagttcggagccgatgagatcgaggtgttccacggctactacaagcccacggagttcttcattccccagaagagcgtgcgctactgctacttgaaggctgtggccgagcgccatggtgaccagcgcgtctatggactgcactatattggcccggtggccggtgaggttatccagggattcgctgccgctttgaagtctggcctgactattaacacgctgatcaacaccgtgggcatccatcccactaccgccgaagaattcacccggctggccatcaccaagcgctccggactggaccccacgccggccagctgctgcagctaaagcgggaacgcagctcagccgcctgggacgtgtcgaagccgcttgctccacccgaaatcccgtagatgaatggttgttgtcgcggcccagcgatcgatgagttcaatagttccgtttcgtttccacaattaacacccaacacaatagctctgcgcaagggaggggcactgggcagcgatggcgggtggaacgacaccagtggaactacccgcgcgaccagcccaacccacgactgctgcgccgccgacatgcactcaaaattttgaatttgtttgaacctatgaaattaactatgaaatcccctaaatgtacggttgaagaatataatttttcaccaacaaacccctctgtgtttcagttctgtgcatttcctttaaaacatacctcgacctttagcccttcctctgccttttcaatcaagtaagttcattagccatgcaaatggcttgacttgacctggctaaatcgattctgtctgccagcctgacaacttgttagccacccgactaattgctaatgccattgctaggggaatctttgccctcgagggctataaatcagctacgaacgatggcaccctggagatacatatatcagtgggtaataaattatactttagttttcaaaggaaaaacagtgcgtgataaagtgtaatagaagctacgaaaaggttgaagtttatgacctaaggaatcctcgcaagcaaatcaaaatcaaattaagacagtaaattgatgcaatcaattaatgaacagcaaagagaattcaatagcttctataaggaattagcattaatcatatatgtatgtatggaacactttcgaggtggtatctccgattggatgccacgaaacaaagcgagatggctatactatgaaccaagcgacttggaatagcccaatatacccatagtgaaacccaacccattgataagtcgctgttgtgatattttttctattacatttttattttggttttcctatttttcgtattgaataactcctttgttttgaacaacgtaagactttttcatttacaactgacgcagcgctggcgcctctgcagccgccgatcgtgctcctcatcccgctactgcgctggctcttcccgcggctcgtcctggtgtctttgtgtccgttaattagtgggcgagtgcggcgcgaaaggacgaagggcagagtttaaaaaaaaacattaattagttattagtttagatcagacgcgagagtgggcgcctagatagccacactctgcttggcctcgttctcccgctgctgcttgttgaccgccgatatgcacttggccatggtgggcgaggcgcgcgaaatggcgtcgg

SEQ ID NO: 27965 - DNA, 2044 bp, DROSOPHILA
cgacaagccaatcgacgtctccctttcgcacgctcgtacgaaagtacaaaagctattgcaaaagttggctccgcttattcgtttcgtgctttcgcgagtgccgagagccgctacaatacacgcttagcagtttttacatttccgcttcgactacaacaacattcactacccgccgttgatccttgttttctgtctgatttacgtggagcacctaccaacaagcaacaaaataatggcgcccgtgcaaggatcctacgactacgaccttattgtgattggaggcggctcagctggcctggcctgcgccaaggaggcagtcctcaatggagcccgtgtggcctgtctggatttcgttaagcccacgcccactctgggcaccaagtggggcgttggcggcacctgcgtgaacgtgggctgcattcccaagaagctgatgcaccaggcctcccttctgggcgaggctgtccatgaggcggccgcctacggctggaacgtggacgaaaagatcaagccagactggcacaagctggtgcagtccgtacagaaccacatcaagtccgtcaactgggtgacccgtgtggatctgcgcgacaagaaagtggagtacatcaatggactgggctccttcgtggactcgcacacactgctggccaagctgaagagcggcgagcgcacaatcaccgcccagaccttcgtcattgccgttggcggccgaccacgttatccggatattcccggtgctgtcgagtatggcatcaccagcgatgatctgttcagtttggaccgcgagcccggcaagaccctggtggtgggagctggctacattggcttggagtgcgctggattcctgaagggtctcggctacgagcccactgtgatggtgcgttctattgtgctgcgtggcttcgaccagcagatggccgagctggtggcagcctcgatggaggagcgtggcattcccttcctccgcaagacggtgccgctgtccgtggaaaagcaggatgatggcaagctgctcgtgaagtacaagaacgtggagaccggcgaggaggccgaggatgtttacgacaccgttctgtgggccatcggccgcaagggtctggtggacgatctgaacctgcccaatgccggcgtgactgtgcagaaggacaagattccagtggactcccaggaggctaccaatgtggcaaacatctacgctgtcggcgatatcatctatggcaagccagagctgacgcccgtcgccgttttggctggccgtttgctggcccgccgcctgtacggaggatctacccagcgcatggactacaaggatgtggccaccaccgttttcacgcccctggagtacgcctgcgtcggcctgagcgaggaggatgccgtcaagcagttcggagccgatgagatcgaggtgttccacggctactacaagcccacggagttcttcattccccagaagagcgtgcgctactgctacttgaaggctgtggccgagcgccatggtgaccagcgcgtctatggactgcactatattggcccggtggccggtgaggttatccagggattcgctgccgctttgaagtctggcctgactattaacacgctgatcaacaccgtgggcatccatcccactaccgccgaagaattcacccggctggccatcaccaagcgctccggactggaccccacgccggccagctgctgcagctaaagcgggaacgcagctcagccgcctgggacgtgtcgaagccgcttgctccacccgaaatcccgtagatgaatggttgttgtcgcggcccagcgatcgatgagttcaatagttccgtttcgtttccacaattaacacccaacacaatagctctgcgcaagggaggggcactgggcagcgatggcgggtggaacgacaccagtggaactacccgcgcgaccagcccaacccacgactgctgcgccgccgacatgcactcaaaattttgaatttgtttgaacctatgaaattaactatgaaatcccctaaatgtacggttgaagaatataatttttcacc

SEQ ID NO: 27966 - protein, 491 aa, DROSOPHILA
MAPVQGSYDYDLIVIGGGSAGLACAKEAVLNGARVACLDFVKPTPTLGTKWGVGGTCVNVGCIPKKLMHQASLLGEAVHEAAAYGWNVDEKIKPDWHKLVQSVQNHIKSVNWVTRVDLRDKKVEYINGLGSFVDSHTLLAKLKSGERTITAQTFVIAVGGRPRYPDIPGAVEYGITSDDLFSLDREPGKTLVVGAGYIGLECAGFLKGLGYEPTVMVRSIVLRGFDQQMAELVAASMEERGIPFLRKTVPLSVEKQDDGKLLVKYKNVETGEEAEDVYDTVLWAIGRKGLVDDLNLPNAGVTVQKDKIPVDSQEATNVANIYAVGDIIYGKPELTPVAVLAGRLLARRLYGGSTQRMDYKDVATTVFTPLEYACVGLSEEDAVKQFGADEIEVFHGYYKPTEFFIPQKSVRYCYLKAVAERHGDQRVYGLHYIGPVAGEVIQGFAAALKSGLTINTLINTVGIHPTTAEEFTRLAITKRSGLDPTPASCCS

SEQ ID NO: 27967 - DNA, 3841 bp, DROSOPHILA
ggaaagtggaggaagtgcagatctcaggaaactgcggattagtgacttatgtgacttatatgattcgagattgtaatttggttttattgcatttgatttagctgtaatttatggattttattttatggcgaatgctaatggcgcgaaaaggaaaccaaaagtaggcgaaggtcgcactgcagagttattaattagtacaactgaatttaactagtaacttaccaattgaagaacgtttttaatagtttggaaatcacaaaacaaaagagacaaaaaaataagcgcaggagaaaacacgcacgtacacacaaacacacacacgtatacttttaaatggcgagtgtaagtgaacatacgtttcgagcaatttattggacttccatccgttttcgggtaacatttcgatgctactcattgccacgacatgcacttaattataactaacacttcaaactgatttgcagcacttttttcaaacaaaagtcccgtaaatcaaaaatctttacgccgtaaaatagttgcttcttctttaagaagaaaaggaagaacaagaagagaactttgaaatgagcagcttcttcttcttattattgatcctcttttccgttatgtacagcacaccctcgcaaaaaggcacaagctgacgatctaatttggcaaaagtattgcaaatacaaataagttaacattccaaagtcagaaattaaatggcagctataaagaatataggtatgagaatattacgtttaaagattgtaataatattacaaagatcaaatctaatcaaatatcaaatatatgaacatttgcgatgtaaggtgcatgccaaatataaatttgataaaatcaacgtagttttagattttatttaatataatttttaaatattttcattaatcttagctgttaatttaatagtaataatatcaattgataattcgatagccgatagtcacagttggccggcgatgattgtatcgatagtatcgagtgccaatcgattgctgttacagctgttcgcgcatatgtgtgggtgggatttattcatagcaaggaaaattacgagttttgcggatataggattttacataagtttgccatgcacacgcactagcgccacaaatcgagatcggattgatcgatccggaactccgaatatcggaagcacaacaaagaggacggccgactgccccatgtgtgcgtgcgcgagtgtgtgagtatgtgcgtgagcgtgtgcgtgtgcgtgtgaatgaaaaaccatcaactgtgaaaatataaccaaaaataagtccgaggcacacggttgcaggcgaggattaccagtcctcccagataagccccggaggagcagcaggttccctcttagagccaattccgtcgcttttcagaatggcggatgcccaggcagcggcggccggaaagaagaagtacaagaacaaaaagaactcagcggagaagaaccccaatcacaatccaaattccagtggccaggtggaggcacagacacccagcaatggacacgttcagcaccaagaggaggaggcgacggaagaccaggagccagcgcaggaactcagaggcctgcttaaaaagatgcacctttgcaatggccatggtcacaaggagcaggaggctcggccgcttggggaggtcgtcaatggccatgcacatgggcacagcaacaacaatcacattcgctgcacaagcggcagcagcaacaacaacaacagcactcacaacaacaacagcgtggacagcagcaacaacaaccgcaagcagcgaagagaaggaggcgacggcggaggatcggattcgaactccctcaaaccggaggagaagcccataacagccacaagcaaaaccactgccaacatacacccaaccacaacgacggacccaaaaccaaaagtgtcggaggatgtagctgtggaacagggagtgcatgtggcgacggggagtggccacagtcgggagcaggagaggaagcaaccgccctccgactatgcagagggggccacgcccaccattacagcacagctccaactgccggaacctgccatttcagccgacgagatcgtatataaggaatacgaggctgaacaccaaatgcatgtgagtacctccaagtatgaccaagtgcgaactgtgcgcaacacttatctaattccccgcatatcgaacacgcaggacatcatgcgactgatccaggcggagctgtccgagccgtactcgatatacacgtatcgctacttcatctacaattggccaaaactctgcttcctcgcctcgcacgacaatcagtacgtgggcgccatcgtgtgcaagctggatatgcacatgaacgtgcggcgcggctacatcgccatgctggccgtgcgcaaggagtatcgcaagctcaaaatcggcaccacgctggtcaccaaggccatagaggtaggatgtctggggcatctttcccttgcaataagttataaatcgggttgcatgtaatcgatgctcgatatgtgtgttacggaacaattatgtgttgttaactatggatgaaattgccatcaaagctcaccaatggctcctcgagcctcgaggtatactttcgggcacattggcgagggatacataccaactacctctctttctgtgaaaacttatatcacactgcaattttcccatttgcaggcaatgctggccgacaatgccgacgaggtggtgcttgagacggagatgcgtaaccagccggctttgcggctctacgagaacttgggcttcgtgcgagataagcggctgttccgctactatcttaacggggtggacgcgctgcggctgaagctctggtttagatgagtggacccggcggctgccgttgaaattgttgtctaagtagccgccgaagatgtcgagatctgcgctctgcggaggaccagggcgctcccctcgtcctgggtcctggccagctggcagcttgtatcggcgccctcttttttgtacctatttaactaggaagcatcgtagcatcagtttattttctccccaactcacaccgtcccttgtctctctttcatttgtaaattattttattatgtagcagcagcagtacgagcaacatctgctacatatgcaggagcagcacgagcagcacacaacggacccgaaatttggttaattttacaggaggcaattttgtatgcaatacgtgatttacatgcataaaattaagcattaaagtcgtaagcaagcaattagttatgtacattaaacaatctacaaaaaccaatctagggaatagacaacaacatgaagcagcagcgcagcacacgctcatcgacgcccatttacaaagctataaacatagtatcaaattttgtaaaaagatcaatcaaagcgatgatcgcgcaagtcgaacgataaactcgatcatgtatatcaaaataaacgcaattggaaccaagagctgagaacagacacacaaaaatgcagcctcatatgcatacttgtatacaaaccttcaatgggtggatggcggtggtcctcgcggctaagaaaactcgccatctggtcttaagtaacctctctgtgctctccagaaacacgtaacacgtagcgataaggataaagatgtggtggatcccgagtaacattgaaagaacgcaataaaatcttcaacaaatgcgaaaatcctgccttctgttctttagtttagcacaacttggggaatagcgagcttgtttggaagtttgtgtggtgttttccaattgagaaactatatgccagtacggtattttcgttttattatcataaaaaacagaattataactactcgaactaggaaagtatgtcttacgga

SEQ ID NO: 27968 - DNA, 1598 bp, DROSOPHILA
attgctgttacagctgttcgcgcatatgtgtgggtgggatttattcatagcaaggaaaattacgagttttgcggatataggattttacataagtttgccatgcacacgcactagcgccacaaatcgagatcggattgatcgatccggaactccgaatatcggaagcacaacaaagaggacggccgactgccccatgtgtgcgtgcgcgagtgtgtgagtatgtgcgtgagcgtgtgcgtgtgcgtgtgaatgaaaaaccatcaactgtgaaaatataaccaaaaataagtccgaggcacacggttgcaggcgaggattaccagtcctcccagataagccccggaggagcagcaggttccctcttagagccaattccgtcgcttttcagaatggcggatgcccaggcagcggcggccggaaagaagaagtacaagaacaaaaagaactcagcggagaagaaccccaatcacaatccaaattccagtggccaggtggaggcacagacacccagcaatggacacgttcagcaccaagaggaggaggcgacggaagaccaggagccagcgcaggaactcagaggcctgcttaaaaagatgcacctttgcaatggccatggtcacaaggagcaggaggctcggccgcttggggaggtcgtcaatggccatgcacatgggcacagcaacaacaatcacattcgctgcacaagcggcagcagcaacaacaacaacagcactcacaacaacaacagcgtggacagcagcaacaacaaccgcaagcagcgaagagaaggaggcgacggcggaggatcggattcgaactccctcaaaccggaggagaagcccataacagccacaagcaaaaccactgccaacatacacccaaccacaacgacggacccaaaaccaaaagtgtcggaggatgtagctgtggaacagggagtgcatgtggcgacggggagtggccacagtcgggagcaggagaggaagcaaccgccctccgactatgcagagggggccacgcccaccattacagcacagctccaactgccggaacctgccatttcagccgacgagatcgtatataaggaatacgaggctgaacaccaaatgcatgtgagtacctccaagtatgaccaagtgcgaactgtgcgcaacacttatctaattccccgcatatcgaacacgcaggacatcatgcgactgatccaggcggagctgtccgagccgtactcgatatacacgtatcgctacttcatctacaattggccaaaactctgcttcctcgcctcgcacgacaatcagtacgtgggcgccatcgtgtgcaagctggatatgcacatgaacgtgcggcgcggctacatcgccatgctggccgtgcgcaaggagtatcgcaagctcaaaatcggcaccacgctggtcaccaaggccatagaggcaatgctggccgacaatgccgacgaggtggtgcttgagacggagatgcgtaaccagccggctttgcggctctacgagaacttgggcttcgtgcgagataagcggctgttccgctactatcttaacggggtggacgcgctgcggctgaagctctggtttagatga

SEQ ID NO: 27969 - protein, 402 aa, DROSOPHILA
MADAQAAAAGKKKYKNKKNSAEKNPNHNPNSSGQVEAQTPSNGHVQHQEEEATEDQEPAQELRGLLKKMHLCNGHGHKEQEARPLGEVVNGHAHGHSNNNHIRCTSGSSNNNNSTHNNNSVDSSNNNRKQRREGGDGGGSDSNSLKPEEKPITATSKTTANIHPTTTTDPKPKVSEDVAVEQGVHVATGSGHSREQERKQPPSDYAEGATPTITAQLQLPEPAISADEIVYKEYEAEHQMHVSTSKYDQVRTVRNTYLIPRISNTQDIMRLIQAELSEPYSIYTYRYFIYNWPKLCFLASHDNQYVGAIVCKLDMHMNVRRGYIAMLAVRKEYRKLKIGTTLVTKAIEAMLADNADEVVLETEMRNQPALRLYENLGFVRDKRLFRYYLNGVDALRLKLWFR

SEQ ID NO: 27970 - DNA, 5369 bp, DROSOPHILA
ccgagagcggtcgtcgtcgtccacagaaacggggtgccacctacttcaccatgcgcatcctggcccaggccttcacaatgacgttcctggccgagtggggcgatcgctcccaactgaccaccattattctcgccgctagcaaggtgagcactttggataaaaataaccggaatgatttggtacatgaagctattatccgttgcaggacgtttacggcgttatcgctggcggtattattggccactgcatctgcaccggcctggctgtgattggtggtcgtctcgtggcttccaaaatctcagtgcgcactgtcaccattgtgggtggcattgtgttcatcggattcgccatctacgctgtcgccatacctccggatgacatttaggcgaagcctttatactccaatcgagattgcccgctgacgaccccacaatattatgaagatttagttttagttactacctgataaaccccacttttcttcgaggagcatcaggcaaggatcgtgttgaactagtttaaaactagaaatgcgttgatgtttttaacgtagctttcttcttgccaaacatccaaaacaaaagtgccttcagtgctttccgcttcggccatgacatacatttttagttcacacaattaattcttttgttttccaattgtctagtatcgctttaatttgtttgtttagtttcggtttcgtgttaagtattaaagatgattgtacatacgcgtgtagagccatcgcgatgcccacgctcctctgagttgtatcctttccttcataacgcagatccttattcgcatatttgtttacgtagccgtgtttacttaatggaaacaaccaaaatgaaactttgtagatttgattatttatgcgaattttgtatgaaaaactaattaaattgagcaaaacaaagattttaaagtgcgcttaatgggcgggataaatcttgttctttcttttaaatttaagaacctgtatgagtgatgaataaaatcattaggtttcttgttataggcataatttattatggttaaagtttgtttttaaagtttacatcgtgttttacagtcgaaaaataatttggttagattacttgcaaagttgcagcaccttaaagcccgccatcttttactgctttattgttttgggatcgcgatagatgcccgtaaataggatcgacctggaagtgcggtcgtagatgacgaacaggaacggatggttgcactcaaacttggccggctccacgggcctggccgagcggtaggtgaagaggactgtggccgccgccgcagtgctaccctcctcgtccaccttgatcttggccacgtgcttggagtcaccgatggaaatcgtctcggaggtcagatcatcgaaggtagcgacagactcatcgaacattttgctaactcccattttggcaaggatctaaggaatggagcaggtcaaaactaaatcaagctttggaatcaaaaagtctaaacttacaggattaagttccaggcgctgttcaaactcaaacttgggcagcgaaacttcgatttcgcggggcattgcctgcttcaacgaatcatccagactgtcggcattcaaccgggagagcacatcttcgagggaattactgttaaatggcggcaagatgagcaccatggagatgtccgagttctcatccggcgagctgtcctccttctcctgagactcaaagacggtgcgatagggcagctgaagcacgtgggcgcggagctgttcgtcgacattcagtaagaaggtgcccttctgttgcatcatggacacgagagagtagttcgacggagacgtgtagaagggcatgggcaccgtcttctccgtcttgaactgactgagccactgacccttcagataggcggcgttggccaggaccaaacgagtgcgcggagtgatttcatcggcactgagcatattgcggatttgatcgtgcgtctgcttggcaatccaatcgttgatttgcttgcgcgactcctccgtctggctcttgaagtcgatctgctgcacctcctcggccagacgattccttgcgcattcggtcacatgcagatcattggcgaagaatatgcgatcggctgaggagaactcgagaggcattttgctctgccgctccttacggttcatcttctccagaatataggcactgcgcaccacctccttcgagtcggcccaatccagatgcagcaccttggccaactccttctccgtgtcaccagaggatccgaaataggcgaggagcagggcatgatacgtgctgtacggcgagaagaagacgttctcattgggagtgctctgccgaatcacgttcagcatggacacggcaaagttctgttggcccttatagaggttcagccgctgatccaacaaacccgcatcgggctcaaccccacagagaccggctaaggcgatggccggcaggaccgccattagagatatgctgaggatgtgcatgatgtggaagcctgctaaaaattggaacatgatttaagttaaaatagcaattattttaacggctgcaagcacatgtgattgaaatgggtaaccgaaaagcacaagacccctaaatatgtgaccttgtataccattttatttttgagtgtgtgatttgtgtggaatacgtgaccggcattgaatcctggtataatttctcatctaatttattagacaactaagcatttaaagcgcactcaggccagaaaaatttatgaatctcccagaaatattgacaaaattccccaaagtgatttctgtgtaaagtcactactaattatgggagtagttaaattagaactgcaagtcccagctaattacgtacttaatattcacttagtttgccaaacttcaagtcattagggttttctagttacataaaccgactactgcagaattgttgtaaacaatcacgaaatattttatagacttagcttagatgatttgtgattgaaactttttagaaaatatagaaccgatttgaggtcgttaaagatcgctttaggctgattcaccaaaaagctttttccagtccatggagtggtcagctatttgcagacgacagttgcaacatctccgcagaggcgacattaaaaaaaagtgaaagtttccgctgctctgcactcgaaattcgcaatccgaacataatgtatccatacatcagccattcccacatgcatccatcggagcatgaaggagcgcccacagatcggatcggatcggggatcggtttgggagcttgagctttgtgatgaccatagctccagttttgctttcagcagctgagcgatgacgaagtcatccgttgcgtgactgcagtgaaaagcgctttgttgtgtgaaaataaaaaacccaaaattaacattttcgataaccggttgcggataccaccggcagttaccaatatacatagtatatgattcataaacgtatttcaacgcgtatgaatgctcattgttgaccctgtatgggcgattttgtaattgctttcggctgggtcttttatttttttttttttaccccatagacgtaacgctgtttctgcgcatgcgcgtcgttttttgtgcgttttgctgggttttttttgggcgaatccaaaaaatattgaacaaccagttttttgactgacaggtggaaatggacatgtcagccaaaattaagctgcattgaacttggattaattgctttgtcaaaaacacaagcacttcctttgaaatttcttagtaaataaatataagtagaattcaaatttcttggacaaatgcgatttactttttaatcatgtcatatgagtgactaaggcaaaattatttatttttgcacaacaaaattaaataaatattttcattccgatttcagtgttttccccgttttatttataaacgcagagctatgtgtcactcaaaacaatatttttctttaaagtcatcaagtgaaaaacctattaaattggaggtcattatgggatcgcacttcagagatcaatcaaatcaaggctatagtggcaaaaagttataaacagcgaaaatacactggcccatttaaaatgcgtgcctgatatatgtacatatgtatgtatattcaaatccctatatgcgtaaacatatatctacgtatgtatgtgtaattgtgcaatcatttgcatgctgattagtgttacaataatagacaacgctttaatttcaacccgattcgttcgcttaatgatcgtcacaattgccggggagttgaacaaattgggacagacacaactggatgatcactgggaaataccttcttcgagtaaacgtaggcttaagtggcaccgatatacaactattacttggaacgactgcaagtccgttcaccagcgcgtctaactataaactgagtccggtgctccaaagtagcttggtacttaaaacccaaagcgcagcttggatatcgatatccgatgattgtcactcagaaagtcaagatgtgggttgcttcaacgggtttgcgtttcgtgcaaaagttgttacttaaactgcgatacaaatgttgtgacttggatatgagcttttgagagttgtatggaaatttaaaagtattacctttcaataagctagcttatatcgaaattaataaatgaaaataacagttggtgcattatagagcatatttttcttcaagtttttcaaaaacacacaagtcttaaaacacttctagtgctgcatttgcctgggatcgctgtagacgcccgcaaagagaatcgtgtctaccttttcatcatagataagaaacacgaacgggtggttgcagttgaatttggtgggatcgggctgcctgctggatcggctgaccaagaggatggtggccgctgccgcagtgctgcccacttcgtccactttgatcttggccagatgttgggcgtcatcgatgacaagggaaatgggatcggcagtcaggtctccaaaggtggcgtttctcgtgaacattgtgttcactcccattaagctgaggatctgaaaaggtaacagcttacgtgttagtgcgactcaagtggtccagttaggtcatagcttacaggggtcagttccaggcgctgctcaaactggaacttgggcagcgacaactcgatcttctgcggcaatgcccgttcgaaccatttcttaacggaatcggcatttagccgggatatgacacggttaagactgattttgttggagttcggcagaatgataatcatggagatatcggatttggactcgggggtggaaatgtgcgtctccttcgacttgtatatggtgcggtagggcagcttgatgatctgcgattgcaagccctcatcgatggtcatcttgaaggcgcccgtcttgtgcatcatgtaaac

SEQ ID NO: 27971 - DNA, 1511 bp, DROSOPHILA
cgcgctggtgaacggacttgcagtcgttccaagtaatagttgtatatcggtgccacttaagcctacgtttactcgaagaagcaggcttccacatcatgcacatcctcagcatatctctaatggcggtcctgccggccatcgccttagccggtctctgtggggttgagcccgatgcgggtttgttggatcagcggctgaacctctataagggccaacagaactttgccgtgtccatgctgaacgtgattcggcagagcactcccaatgagaacgtcttcttctcgccgtacagcacgtatcatgccctgctcctcgcctatttcggatcctctggtgacacggagaaggagttggccaaggtgctgcatctggattgggccgactcgaaggaggtggtgcgcagtgcctatattctggagaagatgaaccgtaaggagcggcagagcaaaatgcctctcgagttctcctcagccgatcgcatattcttcgccaatgatctgcatgtgaccgaatgcgcaaggaatcgtctggccgaggaggtgcagcagatcgacttcaagagccagacggaggagtcgcgcaagcaaatcaacgattggattgccaagcagacgcacgatcaaatccgcaatatgctcagtgccgatgaaatcactccgcgcactcgtttggtcctggccaacgccgcctatctgaagggtcagtggctcagtcagttcaagacggagaagacggtgcccatgcccttctacacgtctccgtcgaactactctctcgtgtccatgatgcaacagaagggcaccttcttactgaatgtcgacgaacagctccgcgcccacgtgcttcagctgccctatcgcaccgtctttgagtctcaggagaaggaggacagctcgccggatgagaactcggacatctccatggtgctcatcttgccgccatttaacagtaattccctcgaagatgtgctctcccggttgaatgccgacagtctggatgattcgttgaagcaggcaatgccccgcgaaatcgaagtttcgctgcccaagtttgagtttgaacagcgcctggaacttaatcctatccttgccaaaatgggagttagcaaaatgttcgatgagtctgtcgctaccttcgatgatctgacctccgagacgatttccatcggtgactccaagcacgtggccaagatcaaggtggacgaggagggtagcactgcggcggcggccacagtcctcttcacctaccgctcggccaggcccgtggagccggccaagtttgagtgcaaccatccgttcctgttcgtcatctacgaccgcacttccaggtcgatcctatttacgggcatctatcgcgatcccaaaacaataaagcagtaaaagatggcgggctttaaggtgctgcaactttgcaagtaatctaaccaaattatttttcgactgtaaaacacgatgtaaactttaaaaacaaactttaaccataataaattatgcctataacaagaaacctaa

SEQ ID NO: 27972 - protein, 427 aa, DROSOPHILA
MHILSISLMAVLPAIALAGLCGVEPDAGLLDQRLNLYKGQQNFAVSMLNVIRQSTPNENVFFSPYSTYHALLLAYFGSSGDTEKELAKVLHLDWADSKEVVRSAYILEKMNRKERQSKMPLEFSSADRIFFANDLHVTECARNRLAEEVQQIDFKSQTEESRKQINDWIAKQTHDQIRNMLSADEITPRTRLVLANAAYLKGQWLSQFKTEKTVPMPFYTSPSNYSLVSMMQQKGTFLLNVDEQLRAHVLQLPYRTVFESQEKEDSSPDENSDISMVLILPPFNSNSLEDVLSRLNADSLDDSLKQAMPREIEVSLPKFEFEQRLELNPILAKMGVSKMFDESVATFDDLTSETISIGDSKHVAKIKVDEEGSTAAAATVLFTYRSARPVEPAKFECNHPFLFVIYDRTSRSILFTGIYRDPKTIKQ

SEQ ID NO: 27973 - DNA, 5951 bp, DROSOPHILA
atgaatgaaaagcgggaggcggaaagctcgacttatcccctgagctttgactttaggcctctggggagcttcgcggaggaaacccaaaaagtgcgcggagctttagtgcgaaaaacacattttcaccaagcacattttccattctgtttgttgttctcgctgcgtgcggtttgtgttctatttatctcgaatttgtaggctttatccaccagttatagtttgccaagtcggttgcctttccccagtaacagtagtgaacgtaggataaaacggacttattacctgaattaatattcatagccgcgtgtcattccaaaaatgtgcgaatggcatcatttggccaggccaaaaagcaaagacccctgtgatataagctggccacaatgggcataaaaagctccatggccagtgaatctgagctttcgtcccgttagtcgcatcatcagctgacccggagcaacaacaacctgtgcggaggcacaaagtttcgcgctaaaaatacccaaagttcatggtcaacgtcctgggcggagcgggctgattgaatccctgatattggcatcccgaaatggccttgattcgctgctgcttcgagccaccggaactgcctgagttcttcgacagcttcgtgcaaaagtgcacggatcccagttgtaagtacatataatgaaggagattttctctaaaagtaaaaatatttatataaattaataaaataagaatattgaaggcaaacatgtacgaaatattaaatgttaaaatagtttaaaggttgactacggtttatagttaatttgttacttcttaactattaaataaaaataaaatagctccagtttttgttgatttgaagtgaaattcaaaaagcacattgtagccccgcacagtgggcatcatttgcaagttagcagatacaattattattttacagtatggcagtgttcttacaccgcactctacactgtatttgcctgcactaatcgcacggtcacacctcttgcctatcgataagtcggccgagagtgtctcatccacgaaaggaaaacaaaagaaaagtcgcgctgcgctcttttatcgctgcgttttattatctaatgccgcgataaacacccagagaagcgaatcgcgacgccaaaatgcctggtaagctgtcggcgcgctcaggtgtcatcagcttggcgtgccacgggccattgagccagatgacctcgccaccagtcaattggccaggaggaatgacgacaccgacaaatcgatggagttgggtggtgctctgtggggcagcgcggaagtcgggcggcggaagccatcaacctacgagcgatgagccgtccaatcattcaaacagcaaaactatagtccactggggcaattatcgcgataagattaagcggaaaatggtggtcgcacccagtcgacccgagtcggttttcacaccaccactttcgcctccaccaccatcactctctccagcggagcggtggcgccatgttcacctaccgctgcatccacgtttgtctgcctaatccctctaaccgctgtgcatttccccgcgctcttctaggctgctgtggatgctgctcagcgctcaggccgcgctacaagcgcttggtcgataacatcttcccggttaaccctgaggacgggctggtcaagtcgaacatggagaagctgaccttctactcgctgagctcgccggacaagctggaccggattggggagtacctgtaccaaaaggccaccaaggatattaaccgaaagcgctataagtaagtgggtcaagaacttgctacgtaatcagcttgttaatctttactcttgtttagactagccgaaattgccatggaggccatggacctgcttctgcaggcttgtcatgcccagaccacactcaacttgtttgttgagtccttcctgcggatggtgcaaaagcttctggaggactcgaaccccaaccttaagataatggccaccaattcggtaagtcttcacttagtggaacacttcactttactctactcactcctctgcccttgcagtttgtgaagttcgccaacatcaacgaggacacaccatcttaccatcgacgatacgacttcttcatctcgaagttctcttcgatgtgccacagcgatgcggctagcatgcgtgacagtctgcgtctggcgggaatcaagggattgcagggcgtcatccggaaaacagtgtccgacgatcttgtggagaacatctgggaggcggagcacatggaaaagattgtgccctcgctgctattcaatatgcaggtgtgtattcttagggtcttgagccttgtccagcccttcggcgatggatacagtcatccatcccagttgcctgtcttattggccaattattgtactaatttcgatgtattttgcatttcgttttcgtgtattttgttaatgcaaaccaaacccaaaccaaccacaacacaaccaacacacaacaacaaccaaacagttttgtgtaaacgttatgttcgtgaagaaaaatttactggcggtaatgatcaaatcgaattgttccattacataaccatattagtaaactctgactagtaacctttagcgtctgtttcggtctcaatactaacacattttttatcactgtagtccggggatctaacgcccgtagaggacgccaccaatgtgacgccaccggccttggccgaggaagttctccgtgagctggtgggacgcgcctccttcggacacattcgcagtgtactaaagccgctgctgacgtaagtagcacccccgcgaagaatagcaactcgttgctaatcagaggtttactctttctgatttacagccacttggaccgacacgagttgtgggttcccaacacatttgccattcacacattccgcatcgtgatgatctccatacagccacagtactcgtataccgttgtggagacgctgatgcagcatctggacaacaacttcaagtcctcgccgaaaacgcgcacttcgctcgctgtcgttctgtcgaaaattatagctattgcagcgggagaaagtgtcggtccctcggccctggacatcatcaacaacctgctgacccacctgcggacgagtgtgagcactaccagcgagataacaccagaggagtcacaatatcaggaggcgctgatcaacgcactaggcgaatttgccaaccatcatcccgactatcaaaagatcgagatcatgctgttcatcatgaacaccgtgccagacctgtccaagaagagcaagggagatcaaatgctgcagaacattctgcttaaatcactgctcaaggttggcactcagtacagcaccgtctccttcgaaaaggcattccccgcctccttcctgcagccgctgctcaagatggcacgcgctccacacaatcccacgcgcatggttgtgatgcaaatattgcaggcccttctagatcgtcatcagaacgagcaggtgctcagtagcgtgagtgtgaagccatacccggctctctcccaagagccgccgtcgcgctccgacataattttcacgcacaaatacggcgccaacatcatgcaggcgttgatcgactccatggcattgtcggatcgggttgacgccctgacctccagttttaataccgctgctctactcatcgtggaaatgtcctgcaacgagaccgtgcaagagtttcttctgtttatcctcgggtatgattgctgtggtagtatctaaaaaacattcttatcgtgttgttccacctcctgcagaatccagcaggtagcctgcaccgtggacactctgggaaacgtgcacaaatgtagtctgcacgccatctcaattggcctgctggtgctaatctcgcgtgttagtggcatcaacaaccttctggagtatgctcaaaagatagtggacgcacggcgcgaggaggccagccatttccttcccccactgctcgagcccaagaagctagccggaaagacattcaatctacagctgccgcacttggccatagataagttggcgctgggcgagtgcttgcagaacgcgggcatggacgcccaacgcctcaacaccggtgctccgtactcgcttaaccagaccgatcacccaggtcaccgccactcttgggtggagtcggtaagcaaccagctgacgcagcgcaacagctcagcggatctgacggtgtacaacggcgatgtggacagcgttagcagctcgccgggagtgtgcaaaaagctccttgcgccggagttcaacttcgatgccatgaagcgagcactggcggagccaactgaggccgctaagcgggagcaacgcgagcgccagatgcagatagtgcgcaccttccgcgagggcgagtttgacgaccttatgagacgcacagaacctaaggtgagtgaagaaatcagatctcttctttacaacatagtgctgtgtctaactgacactgctaatcgagttagaaaacaaatgcttgtgcttttagtgttctagcactaaacaacttcgtacgtaaggaactctagatatctggtgcagtgagctaaaacattgtcatgtttccattcatttacagcacgatctcatccagaaccgccttaacgagcttttcaactcgctagccgtggagcgtcagatcacgcaaagcgacaccaagtccagtcagttgcaagccagcaatgagaagcccatctacgagacgaactttccggaactcttctactactaaaccgtatccctcgaaccgaaaacgatatgcggcgaatattctctaatcaattcatgtatatctatagctgagaaagcgaatttgtttggtgtctgtatggaactaggtaaatcttattaaattttttgttgttaattgcaaacaattcaattgttaaacgaccccgaatatgtactttgatttaattgttagacaaatacatatatgtatacatatatattttagactcgtgtattcagatgatttcaaatttctcccaaaatgggacgtgctgtaaaaaataatagagtaaggtcggcccattgcaacagtgccgccaaggcgacgtcaatcagtggacattcgatgctaaagcaaaacaacgattgcaatggacgcaacccgttctttcagtttctggcctactttcgaaaatgttccaacaactgccttggccacttgccgtcggatcgggtaactctaattgccggcaaggtgtggaattacatgagtctgtcggagaaagaaccctttatcgctgctgcgcgaagatttaactacacgtatcgatcgcggagcagaaaagtcaactgggtcctggcgcaactgcgaaaatccgctgctggggaagaatgccgaccacaggcacagtggatgttgatgaactttttaaagtcttggcaggaatctgtggtgaggaaccttctcgacctggatcacaatcaaaactaaatcagagcagatttttattaagtgtaatctttaataaatgatcactcaaggtaatagttactgtgcgtacatttagcgagtaaaaatgtgttagggacagtaattacatgcgttgaacttgcaggattcgaagacgcttaaaccataatttctttgccgcgttttttcttgttacttaaacataacaattaatctttaaattccaaatttacaaactatttgcaacgcctacatattgtgcgagggcactagagtgtgcgtctactccatttaagtagatgacgtaaagcgtcattacatgatactagtgatgtaaacgatatacaaaaatatagatctgcgcattccaaaacgattgcggatatgcttatactcgatgtacaaacgtctagatggagtgatcagccgtagctaatcgcgatggcgataaacgaatttacaaaacaactacaacgagcccgaactgctgcgggtaaatgaacaaaaaaatggtggtagtggtggtactggtattggtttggt

SEQ ID NO: 27974 - DNA, 2751 bp, DROSOPHILA
cctatcgataagtcggccgagagtgtctcatccacgaaaggaaaacaaaagaaaagtcgcgctgcgctcttttatcgctgcgttttattatctaatgccgcgataaacacccagagaagcgaatcgcgacgccaaaatgcgctgctgtggatgctgctcagcgctcaggccgcgctacaagcgcttggtcgataacatcttcccggttaaccctgaggacgggctggtcaagtcgaacatggagaagctgaccttctactcgctgagctcgccggacaagctggaccggattggggagtacctgtaccaaaaggccaccaaggatattaaccgaaagcgctataaactagccgaaattgccatggaggccatggacctgcttctgcaggcttgtcatgcccagaccacactcaacttgtttgttgagtccttcctgcggatggtgcaaaagcttctggaggactcgaaccccaaccttaagataatggccaccaattcgtttgtgaagttcgccaacatcaacgaggacacaccatcttaccatcgacgatacgacttcttcatctcgaagttctcttcgatgtgccacagcgatgcggctagcatgcgtgacagtctgcgtctggcgggaatcaagggattgcagggcgtcatccggaaaacagtgtccgacgatcttgtggagaacatctgggaggcggagcacatggaaaagattgtgccctcgctgctattcaatatgcagtccggggatctaacgcccgtagaggacgccaccaatgtgacgccaccggccttggccgaggaagttctccgtgagctggtgggacgcgcctccttcggacacattcgcagtgtactaaagccgctgctgacccacttggaccgacacgagttgtgggttcccaacacatttgccattcacacattccgcatcgtgatgatctccatacagccacagtactcgtataccgttgtggagacgctgatgcagcatctggacaacaacttcaagtcctcgccgaaaacgcgcacttcgctcgctgtcgttctgtcgaaaattatagctattgcagcgggagaaagtgtcggtccctcggccctggacatcatcaacaacctgctgacccacctgcggacgagtgtgagcactaccagcgagataacaccagaggagtcacaatatcaggaggcgctgatcaacgcactaggcgaatttgccaaccatcatcccgactatcaaaagatcgagatcatgctgttcatcatgaacaccgtgccagacctgtccaagaagagcaagggagatcaaatgctgcagaacattctgcttaaatcactgctcaaggttggcactcagtacagcaccgtctccttcgaaaaggcattccccgcctccttcctgcagccgctgctcaagatggcacgcgctccacacaatcccacgcgcatggttgtgatgcaaatattgcaggcccttctagatcgtcatcagaacgagcaggtgctcagtagcgtgagtgtgaagccatacccggctctctcccaagagccgccgtcgcgctccgacataattttcacgcacaaatacggcgccaacatcatgcaggcgttgatcgactccatggcattgtcggatcgggttgacgccctgacctccagttttaataccgctgctctactcatcgtggaaatgtcctgcaacgagaccgtgcaagagtttcttctgtttatcctcggaatccagcaggtagcctgcaccgtggacactctgggaaacgtgcacaaatgtagtctgcacgccatctcaattggcctgctggtgctaatctcgcgtgttagtggcatcaacaaccttctggagtatgctcaaaagatagtggacgcacggcgcgaggaggccagccatttccttcccccactgctcgagcccaagaagctagccggaaagacattcaatctacagctgccgcacttggccatagataagttggcgctgggcgagtgcttgcagaacgcgggcatggacgcccaacgcctcaacaccggtgctccgtactcgcttaaccagaccgatcacccaggtcaccgccactcttgggtggagtcggtaagcaaccagctgacgcagcgcaacagctcagcggatctgacggtgtacaacggcgatgtggacagcgttagcagctcgccgggagtgtgcaaaaagctccttgcgccggagttcaacttcgatgccatgaagcgagcactggcggagccaactgaggccgctaagcgggagcaacgcgagcgccagatgcagatagtgcgcaccttccgcgagggcgagtttgacgaccttatgagacgcacagaacctaagcacgatctcatccagaaccgccttaacgagcttttcaactcgctagccgtggagcgtcagatcacgcaaagcgacaccaagtccagtcagttgcaagccagcaatgagaagcccatctacgagacgaactttccggaactcttctactactaaaccgtatccctcgaaccgaaaacgatatgcggcgaatattctctaatcaattcatgtatatctatagctgagaaagcgaatttgtttggtgtctgtatggaactaggtaaatcttattaaattttttgttgttaattgcaaacaattcaattgttaaacgaccccgaatatgtactttgatttaattgttagacaaatacatatatgtatacatatatattttagactcgtgt

SEQ ID NO: 27975 - protein, 793 aa, DROSOPHILA
MRCCGCCSALRPRYKRLVDNIFPVNPEDGLVKSNMEKLTFYSLSSPDKLDRIGEYLYQKATKDINRKRYKLAEIAMEAMDLLLQACHAQTTLNLFVESFLRMVQKLLEDSNPNLKIMATNSFVKFANINEDTPSYHRRYDFFISKFSSMCHSDAASMRDSLRLAGIKGLQGVIRKTVSDDLVENIWEAEHMEKIVPSLLFNMQSGDLTPVEDATNVTPPALAEEVLRELVGRASFGHIRSVLKPLLTHLDRHELWVPNTFAIHTFRIVMISIQPQYSYTVVETLMQHLDNNFKSSPKTRTSLAVVLSKIIAIAAGESVGPSALDIINNLLTHLRTSVSTTSEITPEESQYQEALINALGEFANHHPDYQKIEIMLFIMNTVPDLSKKSKGDQMLQNILLKSLLKVGTQYSTVSFEKAFPASFLQPLLKMARAPHNPTRMVVMQILQALLDRHQNEQVLSSVSVKPYPALSQEPPSRSDIIFTHKYGANIMQALIDSMALSDRVDALTSSFNTAALLIVEMSCNETVQEFLLFILGIQQVACTVDTLGNVHKCSLHAISIGLLVLISRVSGINNLLEYAQKIVDARREEASHFLPPLLEPKKLAGKTFNLQLPHLAIDKLALGECLQNAGMDAQRLNTGAPYSLNQTDHPGHRHSWVESVSNQLTQRNSSADLTVYNGDVDSVSSSPGVCKKLLAPEFNFDAMKRALAEPTEAAKREQRERQMQIVRTFREGEFDDLMRRTEPKHDLIQNRLNELFNSLAVERQITQSDTKSSQLQASNEKPIYETNFPELFYY

SEQ ID NO: 27976 - DNA, 4330 bp, DROSOPHILA
gtccatgtgtactcgggccggcaaaggcccacctgtccgacaggtgctgcaaaaagtgcacaaacattttttattaaaattgataataaaatcagctacgtgggcggctgcgatggctgtggtttcgcaggggcgtgtttgcatacacaaatatagggaatacgctcaaatcatttttgcgaaactgattaaaaaatggcaaaaacatgcaatatgtatacgcaaacagacatcaagtgattattatttttcgcgtttttatcaattctgctcgttttgtacggctagtgctgagtggcagatgcatcagacagacgtactatacatatctgaatgggggcagtcggattaaatgttaatgtttgggtagggaaatcgagggtcggctgccgggatttggagtgcggatgcggaatgggcaaagtggattctttttgtatttgatgcactcactttgcggtgcagtggctagatagacttatatgggaagtaaatgaataaccaattatattgtaactctatgtattttgtaataaagttaatggaaaaccttttcaaatagtattgtttattttctgatctatagcatgcaatatacatacaatcacgttgaaaatgaagcattggcttaaaggtagaacattttataatatttaacaacaaatttgttttgaaataatgtgagtgggtaaggaaagtttaaatttcccgcacattatcgatagctctttcgatagaatcggtcggcaatcggctcgcaaactcgctagagaactgttaaccaactgtcatagtttgagttcacgctacgctccattctaaaagttatcaatatctcgaaataaataaactgtgggttatagcaggctttgttttattatttgcaattaggaacagtgcaaagataacaaagatgtactaacaattggtcaataggcgcagaagcgaccctgaaattggagtgtgacctcgctaatagccagatgcggcggggaattcgccaagcccgcaacactgtaccctgaaggccagctgccgccgcttcccgcgcattttcttcgacccaggtaggtcgcattgggattcgcttgcatttggtgttttcactcgcctccaaaccgccgtagcaacaccatctagacaacgtggaactcccgctgaaccagagaccggcattatttccattgtgagtgtgagcagaactaagctgcatcaccggcgtccctaaccttatatatatttcttacacacacacacaaacgcactatttccagtttcggtgacaaaaaattgtgaaaatacaagctaaaatgccgcgcagaaaggccctgactaataacaacaatgccggcgaagcggagcagcagccaccgaaggcgaagcgcgccagaatcgcttttcatctggagctgcccaagcggaggaccgtgctcggcaacgtgctagtctgcggcaacggcgatgtgggccaacttggtctcggcgaggacatactggagcgcaagcgtctcagccctgtggcgggcatcccggatgccgtggacatatccgccggtggcatgcacaacctggtgctgaccaagtcaggggacatttactcattcggttgcaatgacgaaggtgctctaggccgtgacaccagcgaggatggcagcgagtcaaagccggatcttatcgatttgcccggcaaggctctgtgcatttcggcgggagactcgcattccgcttgtctgctggaggatggccgtgtcttcgcttggggctcgttccgggactctcatggcaacatgggcctcaccatcgatggtaacaagcgtacgcccatcgatctgatggagggcactgtctgttgtagcatcgcgtccggcgccgatcatttggtcatcctgaccactgccggaaaggtctttaccgtgggctgcgctgagcagggacaactcggccggctgtcggagcgttccatctccggagagggtaagtcttggcattcaaattttcaacgaaattcgtattaaaaaaatgttaacccccaggtcgtcgtggcaaacgcgacttgctgcggcccacccagctcatcatcacgcgggccaaaccttttgaggccatctgggccaccaactactgcacattcatgcgcgagtcacagacacaggtcatctgggccacagggcttaacaacttcaagcagctggcccacgagacaaagggcaaggagttcgcactgacgcccatcaagacggaactcaaagatatccgacatattgccggcggtcagcaccatactgtcatcctgacaacggaccttaagtgttccgtagtgggtcgtccggagtacggtcggcttggtctgggcgatgtcaaggatgttgtggagaagccaacgattgtaaagaagctgaccgaaaagattgtgtccgttggatgtggcgaagtctgttcctatgccgttacaattgatggcaaactgtattcctggggctccggtgtcaacaatcaactaggcgttggcgacggcgatgatgagctcgaaccgatcgtggttgtcagcaagaacacgcaggggaagcacatgctgctcgcatctggcggtggtcagcacgcaatctttttggtcaaagcggacaaacaggaccagaaggagaatgttccagtgaaggtgtctggcagcagcagcatcagtaaaaaggacaagaccccgccgcaggataatgtcgacaaggaagccgagaatgtagataagcaggagcagaaggaaaacttgccggcgaaggcgtcaaccagcagcaaaaagaacaagacgccgccgcaggataatgccgacaaggaagccgagaatgtagataagcaggagcagaaggaaaacttgccggcgaaggcgtcaaccagcagcaaaaagattaagacgccgccgcaggatgatgccgccgaggaggtcgaagaggagtctgctcaggaaccgactcccaagaaggccaagaagcctgctgccaagcggggcggtaaaaagacataagattgagtataaatacgctgactttcccactttgtttttggtaacactaagttacgaacccgtacgcttaccctacgcttaaggaaggcaatgagtagcccagattcgtaagatagatcggaaattttgcttattgtacgttaagatctacgaactgaatcctgttaagttctttttattttgataaatagatgcccgcttatatcttacaagtctgcctaaagacgaaaacttctttatcaatccaactaagtgtttattatatatattcgttcgcaatacgaagccgtagtaaatttgtatttgaacgcaaaaggaaactaaatgagatttatttacaaactaattaacttgattatatcatacacaaagatatacatcctactcacagtgtattataaattcttggctcaggcggggcaaatgggagattaccggcaaaaaagctacaaaagattgggagattgtctcgtaagcgcgagacatcatttactcaataatatcaggaaacacgaaattgttactcttatggtaggtcttaagatttatacaaaaatatgtatttgcttggagggtggttcgatttgcaatgaagggaaacatcttaaaattacctttaaaagcaaaggtgtctaaacaattcgcaggacccgggaattcatgaatgcaagccattgaagtatgtaagaaggctttaatatttgtagttttcatacctggcaagggtcaaaatggattattacgtgtacagaggtgaacaagttgcatttactgctgaacaaatcgaaccaccctggcatgcacagttgagggttttggcttcactacgagtagtaacacggctgacgattgcctctgcctgagtcgactgtggctagggaggtggttatggtagtggtggtggagtttccgccgtagttgcttcccaggtagaagctcacgaacaagatgccgcacagcagcgatagcgaaagaacgacgcgcaccatcttccttgcgaatgcgatgaatcccagcaaatggccgccggcagcaacgccgcccagctgccaatcaccagtgccctgacagctgaggcacagctgcagatgcgcctgtatcagtgcctcgaggcattcgccatcgtattggtccatcgtatcggcacagtccagacctagattcatcaaatcaacagcacaggcacagttctccagctctggacagtcgcagtcgtcttcgttattgttgtggctatcgcgagcggcaatgtctagctcctgcctggtcaaattgcacgggctaagtaaatattatttgcgcttagcgcacgaatac

SEQ ID NO: 27977 - DNA, 2123 bp, DROSOPHILA
ccaagcccgcaacactgtaccctgaaggccagctgccgccgcttcccgcgcattttcttcgacccagcaacaccatctagacaacgtggaactcccgctgaaccagagaccggcattatttccatttttcggtgacaaaaaattgtgaaaatacaagctaaaatgccgcgcagaaaggccctgactaataacaacaatgccggcgaagcggagcagcagccaccgaaggcgaagcgcgccagaatcgcttttcatctggagctgcccaagcggaggaccgtgctcggcaacgtgctagtctgcggcaacggcgatgtgggccaacttggtctcggcgaggacatactggagcgcaagcgtctcagccctgtggcgggcatcccggatgccgtggacatatccgccggtggcatgcacaacctggtgctgaccaagtcaggggacatttactcattcggttgcaatgacgaaggtgctctaggccgtgacaccagcgaggatggcagcgagtcaaagccggatcttatcgatttgcccggcaaggctctgtgcatttcggcgggagactcgcattccgcttgtctgctggaggatggccgtgtcttcgcttggggctcgttccgggactctcatggcaacatgggcctcaccatcgatggtaacaagcgtacgcccatcgatctgatggagggcactgtctgttgtagcatcgcgtccggcgccgatcatttggtcatcctgaccactgccggaaaggtctttaccgtgggctgcgctgagcagggacaactcggccggctgtcggagcgttccatctccggagagggtcgtcgtggcaaacgcgacttgctgcggcccacccagctcatcatcacgcgggccaaaccttttgaggccatctgggccaccaactactgcacattcatgcgcgagtcacagacacaggtcatctgggccacagggcttaacaacttcaagcagctggcccacgagacaaagggcaaggagttcgcactgacgcccatcaagacggaactcaaagatatccgacatattgccggcggtcagcaccatactgtcatcctgacaacggaccttaagtgttccgtagtgggtcgtccggagtacggtcggcttggtctgggcgatgtcaaggatgttgtggagaagccaacgattgtaaagaagctgaccgaaaagattgtgtccgttggatgtggcgaagtctgttcctatgccgttacaattgatggcaaactgtattcctggggctccggtgtcaacaatcaactaggcgttggcgacggcgatgatgagctcgaaccgatcgtggttgtcagcaagaacacgcaggggaagcacatgctgctcgcatctggcggtggtcagcacgcaatctttttggtcaaagcggacaaacaggaccagaaggagaatgttccagtgaaggtgtctggcagcagcagcatcagtaaaaaggacaagaccccgccgcaggataatgtcgacaaggaagccgagaatgtagataagcaggagcagaaggaaaacttgccggcgaaggcgtcaaccagcagcaaaaagaacaagacgccgccgcaggataatgccgacaaggaagccgagaatgtagataagcaggagcagaaggaaaacttgccggcgaaggcgtcaaccagcagcaaaaagattaagacgccgccgcaggatgatgccgccgaggaggtcgaagaggagtctgctcaggaaccgactcccaagaaggccaagaagcctgctgccaagcggggcggtaaaaagacataagattgagtataaatacgctgactttcccactttgtttttggtaacactaagttacgaacccgtacgcttaccctacgcttaaggaaggcaatgagtagcccagattcgtaagatagatcggaaattttgcttattgtacgttaagatctacgaactgaatcctgttaagttctttttattttgataaatagatgcccgcttatatcttacaagtctgcctaaagacgaaaacttctttatcaatccaactaagtgtttattatatatattcgttcgcaatacgaagccgtagtaaatttgtatttgaacgcaaaagg

SEQ ID NO: 27978 - protein, 547 aa, DROSOPHILA; identical to SEQ ID NO: 22062

SEQ ID NO: 27979 - DNA, 2043 bp, DROSOPHILA
cgaatcgggctcagatgttcgccgtcagttggggcgactttattgccaacgagtccatgactgatgatgagtcagtcgccgtcgccgtcgccgatgaataagttggctgggaaaacacttttgaattatgcatttatctggctaccagatatctggatatctggctatctacgtacgcggaaaatgtctgcacctttgcgtattttgattgatgctcggcgaacgaaaacaaaaacaaatcgaaatggggtaaatgccaatcgaaggaaaatggtaaatgagttttggggcagcaggaggaggaaaaaatgaaaaaaaaaataatgaagagcgagggcataaatgcctgggcaaaacaaacaaacaaacaaataaataaataagaaaacggaattattacaaggtaaatcaaagggcggggcaggaaaaacacgctgcagacattgtggatggaaaaataataaaatgagctagatgtggaattgatatagtgttagtattaagcgagctcagttcccaagggtaaatgccaatttttgtaagcaatcctggcgattaacgaaacagttgaggtccttgatttaaggggataaggtataacaacatgaatttataaagtgttatttaagctaccatttaaaggtgtgccattatatgttataattgggtagtttatttttatatttactctgtgtcatttggatgccatttatatagctttatatatattaattgaattcattgcgaaaattaaaatttattattaatatgccacatgtgctttaattaactttaattaaatgtgcattaaaatggtaggtttatctattttttcatattactgcctaagtctgctgaaacgcacagtcactagataattaagtacttttgctgctgaaacgcactgtaccactagttaattgagtacttatgctgctgaaatgcactgtaccatttgatatttgaatattgagacattttagtgttgcgatttacttacagtatgtgtccgttgttaagcgatcgatggtatcctgtttcaacttggagctcttttttcccatggacagcagccgcaatcggaggacgagaacacgccgcagaaacgagtggacaagatcttcgatcagatggacaaaaaccacgatggcaaattaacattagaagaatttcgtgagggtagtaaagctgatccacgtatagttcaggcgttaagtttaggtggtggttaaatcgattaacaatggccgattaccgataacagacccgattccaattccacaaaaaccaagcgcgcaataaactgaaataaaaagatattgatactgcaagttgatcgaaacccgcttaaacaaaaaaaaaaaaaaaacaacaaattaaataaaaaagtatggaagtttgtgggtgggggcaggctggtacggtgccacgccccctgccgcttcgtttgcattcgcttctccactcttcactttctcttctctccacgcttttctcaattctcaattcttgattctcgattctccgcgcgtcgcttgcgacactgaagatgataataattttttgatatatggataaagaataactaacgagatggaaatccaaacaaacgaaccgaaaagaaatgaaaatgaaaagaaaaaacaaaaatcgaaaaaataccgaaaatgaaattaatttttaaatatacaccagaatataaatatataggaaatcatggcgtagtcagagcgcagttcatagcaataatggaaaaacaaaacgaagaaaaaaatgtcgaaagataaataaactaatactaattttaaattaaatcgaatggcgcggaggcgcaaatcaatttttgaagcatacaccaattacgagtaaactaattaaacctacgactaaatcagcataactatactaaacaattaaacgatacaattagagccgaactaagcctacgcatcaattgtgcagccttcgaagcaaagcgagttatataaactcgatccgagtcagctaattccactcacgacagccaacagcacgccactatat

SEQ ID NO: 27980 - DNA, 705 bp, DROSOPHILA
atgggaaaaaagagctccaagttgaaacaggataccatcgatcgcttaacaacggacacatacttcacagagaaagaaatacgtcaatggcacaaaggattcctgaaagactgccccaacggcctgctcacggagcaaggcttcatcaaaatatacaaacaattctttccacaaggcgatcccagtaaattcgcatcgctcgtctttcgcgtcttcgatgagaacaatgatggctccattgagtttgaggagttcatacgcgccttatccgtcacatcgaagggcaacctggacgaaaaactgcagtgggccttccgtctctacgatgtggacaacgatggttacataacgcgggaggagatgtacaacatagtggatgcgatctaccagatggtgggacagcagccgcaatcggaggacgagaacacgccgcagaaacgagtggacaagatcttcgatcagatggacaaaaaccacgatggcaaattaacattagaagaatttcgtgagggtagtaaagctgatccacgtatagttcaggcgttaagtttaggtggtggttaaatcgattaacaatggccgattaccgataacagacccgattccaattccacaaaaaccaagcgcgcaataaactgaaataaaaagatattgatactgcaagttgatcgaaacccgcttaaacaaaaaaaaaaaaaaaacaac

SEQ ID NO: 27981 - protein, 187 aa, DROSOPHILA
MGKKSSKLKQDTIDRLTTDTYFTEKEIRQWHKGFLKDCPNGLLTEQGFIKIYKQFFPQGDPSKFASLVFRVFDENNDGSIEFEEFIRALSVTSKGNLDEKLQWAFRLYDVDNDGYITREEMYNIVDAIYQMVGQQPQSEDENTPQKRVDKIFDQMDKNHDGKLTLEEFREGSKADPRIVQALSLGGG

SEQ ID NO: 27982 - DNA, 4804 bp, DROSOPHILA
caaataaagagaatctatatgtgtaaaactagacaaacgaaattcctccgccgtaatattccaggcgtgtctgaggctggacaaatgccaaccaatcggaggcgtgggtggggaggagccccatgctctggcacttgtagagggccaaagccacgtttgctaggttgcccaggaagtagacgatgcgctggccagttccctgggccccctccgccattttggaagtcacctgggtggtgaagatggccttgataggccggatcagcatcatgccgaccatcatgatgggaaaaatggaaatcgagtttcctgacatgtacatgatgaatagattcatgggaatctgagggaatccaaaggttaagcacgggtctttccaaagggctgctactcacgttcttaagaggtcccagggcaaggtcccacgacttcttgatgaccaggcgctggtcgcgcaccacttcactctggttcaccaaagcagatggattgtagcccagcggcgaaggaatatcagcatttttgctgcaggaaaaagcaaaagtggtaagaacttgagtcaccgcgcaggctagcaatccttacctcccgttaaagtccagcgcccactttaacttttttgggttttgcttggcggacatgctgtgctttcttttatttaatcttttgccaatttataaaacaaaatgacgattttttctgacaattggtcgctgagtgttgttcaacgttaaattccgaaattattgtagtgtagacaattcgataggcaactgatgtgtatggcaccagggtatcgataggcagttacgattttgcgcggactttttgaaacgcatgtgcaaaaatcgaacagcgcagtagttttcattaatatttaaattttatttcaaattaccttttaagtagtactttcctttttaatatggtcttatatatatgcgtgatttttaatggattttgcgtgaccaagcgacaacaagaaacagaagggttaaaaattaaaatggtatttgttgtatttttaaagagcaattacaattacagttttttctcattaatattactttaatattataaaattaaaaagaaatatatattttgatgaggggtagggagaggacaaaaataacttaaaaaagacatttttataccatatactatagtttcctttcttgtgtgattggttgggcttttcttttactcgatttgcttttaaacatccaataattatgtatacgaatttaaattatattatagcgttctttatatgctgcttgaaaggttatgtttttgcaattcaataaacaatttcagtttcttgtttggaaatacggacatgcggagccctttaagttatgcgaagatctgctgctcttgttgttggtgttggtgccgctgctgctgttttgtgaaaattccttctgatgtcgatttccaccgtttaccgctggatgttggatgtccttcagccgctctttctatggttctggttgctggttaactgcttcggctcgcttgaaatcagagttagttgtattcatattgttgctttaattttagtgtttaattagcgattagcgttcttcaattggttggacagccagtcgagtccctcgtacagcccatcaccgctagttgcacacgtcgcctggatgtaccagttgcggtttctgagtgagtgcaagccgagcttgtcggtgatttcggccgcgttcattgcatttggcagatcctaaaatgatcccagaaaagagcgaggtgcaatattagtatgacaatataaggaccgagcaactggctactgataacgacaacctttgcttggacctacctgtttgtttgcgaagattagtaagactgcatccctcagctcgtcctctgccagcatgcgcatcaactcctctctcgcctcaccgatacgctctcggtcattgctgtccacgacgaagataagaccctgtaacgattcaaatgaaaactttattccaattgtcctggcttgaatcgtaggagatagatctctaagataatatagtcagtcccgtcttgaaacaaaataaacttgaataatcacaatgcataatcattacaagctgttaacatcatatagaattttctggaatctgtggaaaagctgaaatcacacttacttgtgtattctggaagtagtgcctccacaggggacgaattttgtcttggccacccacatcccacactgtaaagctaatattcttgtattctacagtctccacattgaaacctagggggacaaccattagatattagatttggacaagatacattaaaggtgctaataagatacttaccaatggtaggtatcgttgtaacaatttcgcctaatttgagtttgtacagaattgtggttttaccagcggcatccaaaccgaccatcaatatcctcatttcctttttgccgaataggcctttgaataagttcgcgaatacgtttcccatggctgctgtttgtctttcggatgctcggtagtcgtaggaagttggatctctggttggcctgctcgctgtctgctggctggaattatgacaagttcaaatccgagttgctataccgatcagaatatgcaaactgcacacttgtgtgcatggagtgggagaatctgtgaagagtccaaaaatagacagttgtaggcgagaatttttcgtggtaggaagagctatcacaaaggacggatgcgccgaagctcctctggtgtttgtttcacttatgatcgcgcttacgtgttgaatggcgcttacccactctgagtcatacaaaaaccggaagagcggaaaaaccggaaaaagaaacgaaattcgtttttgtttattgtaataaggacgtcttcaatgcgtcagcatgagaaaaacagaaaatttgtttatgtaattaattccacacttaaatacaacgcgaaatggaggatgtatgaaacacgagtcgcttgcttttagtgtttgccccgctagcggctgctgataagatatcgatttttagtatagaaccatgacggctgtcggcgctcagcgcctcccttccaacgtcctccacccactttacacagagtacgcaagaaacgtgcgggctgagaagtgcgtgaatgataaggccaggtaacttgcagttttcggcgaacttgctgggcggaggggaagctcccaaactctacagtgagtcaccgctgccgccttttgagccctgcaaccgagcaggctgcaaccgatggctaagcaattcatgttaaaatggaggaacgcaatgagcaagcccgtttcgcacgaacacaaaaagaaaaaaggttgccagcgaaacatacggaaacctttcgtttgacagcaatcggatatccaaaaacctaagtttgttacagggaactaacaccccagagacttcttctccggaccggtagtgcgcaaagataggtgctccacgttactgagaagatgctgatgccagctgacgatagttggcttggaagcagccgaaatcgaaaactacacgtagcagcttttaatttagcgctgagggaagcgaggcagcccaccaccgcacactcacgcatacacccgcaggcgccagggttgccaactgcgttgagccgccctgcctttgctgcctttaatgcgtttaaatagaagctccaggcggagggcgtcactgctcgaagatgaacgcttcgccagcccacgccccatgttcagacatttcgcaactaagcccactttcggatcgggatcagacaactttgaactttatacgtggttgcctgcgtctgtgtgagtgacgtacgctgtttttcttatgggttggtgaaatgcggctgccgccgtcccttgtttttacaagaatacagagaccggtccgaagttacttggacttcttttaactgagatccttttagctcagtgacactttacacgtccatttaccgattattctgccttttttcgtggacttttctttgattgaattttctatgctgccaaacacaccacacaccgaattgcgaatagaaagataatggagagaaatgtatcgatagcatccgctaccgatagtcgatgagcacaagtcactattgtctgccgaacagagattgtaaaatgttcccaattatataatttagctatcacttttgtaattaaaggagagcttgtccttgtctcctgttacgataatgctataaacaaagcaccgacgattaattcgtgcggcttccaatactaatacttccactattcaccacagccgcgtacgttgcgcgagtgttcgtggatagcccacactaaacactcacacgaacatctacattactgcggaacttcttaaaatcaagaaaagtatctctgccttgacataccaccccctttttcgactgaaaacgcatacgcaccaactaattgaatcaaatgcacacggctaggagcggaaattttaaaaacttctgcttggaaatgtctaaaatcacagagcaaaataaaacttgaccgagaatacacttgctgttgaaaaaactgcaaactcaccaacataaacgttgccgatagagatgggcgcagcgcatgagctagagcgggatgccgatgttgtgtagtcccgtggtgaaaactcgggaaatgctgccacgtctcttctccgccacctcggctagagttgccaacgatttggattaatcgattcatcattgtcgcacaatgctcactcgataaagttcactatccaggtgatttgaactaagttaaatgttaatatgttttacccaaaaacaccatttttggtgaaccc

SEQ ID NO: 27983 - DNA, 1749 bp, DROSOPHILA
gtcactcacacagacgcaggcaaccacgtataaagttcaaagttgtctgatcccgatccgaaagtgggcttagttgcgaaatgtctgaacatggggcgtgggctggcgaagcgttcatcttcgagcagtgacgccctccgcctggagcttctatttaaacgcattaaaggcagcaaaggcagggcggctcaacgcagttggcaaccctggcgcctgcgggtgtatgcgtgagtgtgcggtggtgggctgcctcgcttccctcagcgctaaattaaaagctgctacgtgtagttttcgatttcggctgcttccaagccaactatcgtcagctggcatcagcatcttctcagtaacgtggagcacctatctttgcgcactaccggtccggagaagaagtctctggggtgttagttccctgtaacaaacttaggtttttggatatccgattgctgtcaaacgaaaggtttccattctcccactccatgcacacaagtgtgcagtttgcatattctgatcggtatagcaactcggatttgaacttgtcataattccagccagcagacagcgagcaggccaaccagagatccaacttcctacgactaccgagcatccgaaagacaaacagcagccatgggaaacgtattcgcgaacttattcaaaggcctattcggcaaaaaggaaatgaggatattgatggtcggtttggatgccgctggtaaaaccacaattctgtacaaactcaaattaggcgaaattgttacaacgatacctaccattggtttcaatgtggagactgtagaatacaagaatattagctttacagtgtgggatgtgggtggccaagacaaaattcgtcccctgtggaggcactacttccagaatacacaaggtcttatcttcgtcgtggacagcaatgaccgagagcgtatcggtgaggcgagagaggagttgatgcgcatgctggcagaggacgagctgagggatgcagtcttactaatcttcgcaaacaaacaggatctgccaaatgcaatgaacgcggccgaaatcaccgacaagctcggcttgcactcactcagaaaccgcaactggtacatccaggcgacgtgtgcaactagcggtgatgggctgtacgagggactcgactggctgtccaaccaattgaagaacgctaatcgctaattaaacactaaaattaaagcaacaatatgaatacaactaactctgatttcaagcgagccgaagcagttaaccagcaaccagaaccatagaaagagcggctgaaggacatccaacatccagcggtaaacggtggaaatcgacatcagaaggaattttcacaaaacagcagcagcggcaccaacaccaacaacaagagcagcagatcttcgcataacttaaagggctccgcatgtccgtatttccaaacaagaaactgaaattgtttattgaattgcaaaaacataacctttcaagcagcatataaagaacgctataatataatttaaattcgtatacataattattggatgtttaaaagcaaatcgagtaaaagaaaagcccaaccaatcacacaagaaaggaaactatagtatatggtataaaaatgtcttttttaagttatttttgtcctctccctacccctcatcaaaatatatatttctttttaattttataatattaaagtaatattaatgagaaaaaactgtaattgtaattgctctttaaaaatacaacaaataccattttaat

SEQ ID NO: 27984 - protein, 182 aa, DROSOPHILA; identical to SEQ ID NO: 23463

SEQ ID NO: 27985 - DNA, 3246 bp, DROSOPHILA
tcgcaatgggagtaaaacaagccgtgttcactgtgtcgctggggtatttatatatatatgtatatgccctataaggcaaccgatatcttcgggtatttccagtggccacccaaccgtcaagagtctgcatctgcaataatttcaaagaccggttgcatgactttcggttatcgtctaactacaagctaactccaaacacaagtgggccaattggtagtcaacattttggcgccaccaactgagccagttgaaggttgattctcaggtctgctacgttagatttttaatttggcaatttagattcgaagcgcactacttgggtttcatacgcatgcggtgagctcaacgccgcgaacaggaaaaatagttgaagctatataaaggtcgtttaaaaagagatagaaattgtttactacatggtatttcattatagaaacatatttgtctctctcgttaagaacttttaagtgctccgcaattattgcgaagctataaattatgaaaaaaactacagtcaattttgagtgaacaatatctgtagcattttgtacctcgataccctaaattaaagattactaaattaattgtaaaaattattgatgcataaaatatgcagtaatctaataaccaggcaacctaaccatgcatgtgaacccatccatcacgattgcgaatccgaaccacttggcgcatatctgttcgcgggcaacgagccaggtgtcagataagccgatctcaaatgggctccttcccccatgagtcgaatgaataaattacgcatactcattccgcatccagctccagttatatcatgagcggcgcgttttgtcaaaaataaacccagtcgttggtggcaaattgcaaacaaagagcaggaggccacagaaaatagcgtcacttccgtttgggcctgacttttactttctgcaaccgaatgttgctgctgcaactgcaacagcaatcgcatgacatttgcagcgtgccaaattgcaagcattcaatgtcgctgccagcggcttatgtaattaaatgtaatatctcgcagagcgaaacaagtttgtcaactaaaatcttgtatcttgaatctcacatcctccatacagcggcccaaaatgcgggagtggtggcagctgccgtggcggctggacaaaaccaaacgcaggtctatgtgacggattcttgcctgcaaaagccgtaccgctgtcctcatccgaagatccagttctatttgtacacgagacgcacccaggagcagccggagttcatagatgtcctggatccgaacgccctgtactacacgcacttcaatccacgccatcccaccaagatcataatccatggattcggcggcggcaggactctgagtcccagtcccgatctgcgggaggcctacttcagtgtgggcgagtacaacatcatcatagtggactacgcggatgccgttaaggaaccttgtctgagtcagatggactgggctcctcggttcggcagcctgtgcatctcccagctggtcaaatacctcgcccgacatcctcgtggcgtccagccggacgacctgcacttcattggctacagtgtgggtgcccacatcgccggtctggtggctaactatttgaagccggaggagggcaagctgggcaggatcaccgcgctggatcccacgatattcttctatgccggggccaacaactccagggatctggattcgacggatgcacacttcgtggatgttctgcacaccggagctggaatcctggggcagtggcattccagtggtcatgcggacttctatgtcaacggcggcacgcggcaaccagcttgtgtgggttcggcaaccttgtttcgtaagtaaaacttgattcaattaaatattactattaattaatattattatccttttatcacccagaaacgttggcttgtgatcacacaaaagtcacgccgtactttattgaatccatcacgacaactcgcggattttatgcgggtccttgtcccaacttgttctcctatctaattggttggtgtgagcccaaggactcggagtatgtgctaatgggcgaacactgttcacacaagtaaggaatacatttgtcacacattcctatagatattggaataaaaccttgactttccacagagctcgagggaattattatgtgaccaccaatgccaaggcgccgtttgctcgcggttttccgggaaaaggacgatcgaatggggagtaccagggagtacggagataatgcaatattgtataatgattttttcggaaaaatgcctcgattaatgcatcttctacaccgtagcactcatgtgattttagcttgtttcctaatcgatacctatttatttcatatttttgttattagttctaaatgcagccattttttcgttgggacttgtacaaataaatagttaagttttatgccaaaagttgatgctggaataaaaaactcacttgtttggcataattttaacatgttcgttttattgaattccaaatacatttcattaggcttaattttgttgtggtttaatgaccttcattatggtattcatatggtaatctcatgcaaggactttatatcataacttctggtaacgaaattcaagtgttattggtgaagactggtacatttattctgtctttaaatgaataggggcgttaactctcctttattcggttatgtttttaaatattcgttttggtttctttaatgagcatacactgaaatatataagttttattcaaatttggtttagctaccatacaaattatacaacatgggcgggtgttgccagaaaagggatctccgattgcgtttaatattcataattttgattcaatactttatatcgtgtatacagaactcttagtgaacacaaagaatatgttgttactaattatatacacggcttaagtatagcggtaaatatcattctacatcttttaaatattctgaagattttgtggaggcaattccgctgcctctttgtcatttgattaatgaatatagtaatgatttattttaatagcatatatctggtattgtgcgcctatatttctgtacgaaagtttatgcatatccttcacactttcaattcatctccatgcacaactttgatgtattgtagttaaaataccctagatgcgacctgttcttctgtgactggttatagccaaaactgatggtttaacactattaaagttgcgctcgtttaggttttagttatgcttttcgg

SEQ ID NO: 27986 - DNA, 1047 bp, DROSOPHILA
atgtcgctgccagcggcttatgtaattaaatcggcccaaaatgcgggagtggtggcagctgccgtggcggctggacaaaaccaaacgcaggtctatgtgacggattcttgcctgcaaaagccgtaccgctgtcctcatccgaagatccagttctatttgtacacgagacgcacccaggagcagccggagttcatagatgtcctggatccgaacgccctgtactacacgcacttcaatccacgccatcccaccaagatcataatccatggattcggcggcggcaggactctgagtcccagtcccgatctgcgggaggcctacttcagtgtgggcgagtacaacatcatcatagtggactacgcggatgccgttaaggaaccttgtctgagtcagatggactgggctcctcggttcggcagcctgtgcatctcccagctggtcaaatacctcgcccgacatcctcgtggcgtccagccggacgacctgcacttcattggctacagtgtgggtgcccacatcgccggtctggtggctaactatttgaagccggaggagggcaagctgggcaggatcaccgcgctggatcccacgatattcttctatgccggggccaacaactccagggatctggattcgacggatgcacacttcgtggatgttctgcacaccggagctggaatcctggggcagtggcattccagtggtcatgcggacttctatgtcaacggcggcacgcggcaaccagcttgtgtgggttcggcaaccttgtttcaaacgttggcttgtgatcacacaaaagtcacgccgtactttattgaatccatcacgacaactcgcggattttatgcgggtccttgtcccaacttgttctcctatctaattggttggtgtgagcccaaggactcggagtatgtgctaatgggcgaacactgttcacacaaagctcgagggaattattatgtgaccaccaatgccaaggcgccgtttgctcgcggttttccgggaaaaggacgatcgaatggggagtaccagggagtacggagataa

SEQ ID NO: 27987 - protein, 348 aa, DROSOPHILA
MSLPAAYVIKSAQNAGVVAAAVAAGQNQTQVYVTDSCLQKPYRCPHPKIQFYLYTRRTQEQPEFIDVLDPNALYYTHFNPRHPTKIIIHGFGGGRTLSPSPDLREAYFSVGEYNIIIVDYADAVKEPCLSQMDWAPRFGSLCISQLVKYLARHPRGVQPDDLHFIGYSVGAHIAGLVANYLKPEEGKLGRITALDPTIFFYAGANNSRDLDSTDAHFVDVLHTGAGILGQWHSSGHADFYVNGGTRQPACVGSATLFQTLACDHTKVTPYFIESITTTRGFYAGPCPNLFSYLIGWCEPKDSEYVLMGEHCSHKARGNYYVTTNAKAPFARGFPGKGRSNGEYQGVRR

SEQ ID NO: 27988 - DNA, 3343 bp, DROSOPHILA
agaagcatttcacccgcgacgatctgaaggacttgtttacatttgatgcgaacattctgtccgacacacacgacaagtaagaactggctttggataccctttagatcatgatcgtgtaacatatcttttcaggctcaagtgtaagcgctgcgttcaaaatatacaaatgaagccaccgcccgaggacacggactgcacctcgcatttgtcacaatggtaccattgctccaacaacagaggcctgcctgacaatattctcgcccaggcctggatggattgcaagtgcgtgtcctttgtcttccaccaccgatcgcaggctcaggaaattgtgccgagtgctgaggaggaagcaacagatcagccagaggaaaaaccagaaagccgcaaacgatcatccacgcccgccagtgatgacagtgccgatgaggacttccgtggattctagcaattgtttgcagtttattgtttctcgaatttcctttttcttcgcacttaagtctaaacttaagataactttttctggcttcctttgcaatcctaacaagttattaatttaacatttcaaaaatggaaccagcacaaaatgttaacgtgctaggggtgaaggcttctataaactaatctggcaatgtaggagtcagtccagaaaatagtttacttttttgtgaaatactgatcaatttctatactcttaactggccgccaatcgggcaaagtagtaggttaacatagcttaggacaaatacaagcaaacatcgaaattcggattctagtgtgtattcacttgcttaagcgcaaagttatttaagttggttacttaaaatcaacagccatctccgctagcacgttattctctgcacataaaaagcaatttggcgtatagcaacgtccggattaaaaccctgtcagatacagattaatattatgcgtgtgtatatgtataagtattaaaccattcgcagtgttaacacagtcaattgaacacttgatgtattcgggtctatacatcaataattttatgctccagctccacccagacgttgctcttctccggcgccttgaggagcggctgttgctgcagctcggccaaaaacccaccgatggcctgatagtacctaaaaagcaagcacacccatggataaatgggaaagtgaagattaattgccggccatacccgtccactatccaagtgtcgttgtgcgatccgccggggaattcgagcaggcgctttatctcgctgccgcatttggtatacaaggcacgcatcatgcgcggtggcactaagttgtccgcaaggcccgaaataaacaaaaagggaaccgaacacttgcctatcttgctcatggagtgatactgcatgtgaaacaacaaacaataatgtggtaatgagataaagtaaacagagggctcaaccggcgacgactacccaccttattcttaaataatagatttggtatatacttcacagcgggatgcaccagctccacggccatttccggtatgctgctaaaagtgttctccacaatagcgcacattagcttctgtccatatacggtatcggctgcaacgtcgaccaccacagctccgcccagggagcgtccgaaaagtatcagttgcgagtggtccaggtcgtggcgggtgtgcaggtagtcaatggccgctctggcgtcggtgaccagaccccgctcggtgggtacaccggtggataggccatatccgcggtattccaccatcagaacattgcagtgcagatggtggtagatgccccacacctgagaagcgtgtcagagaattgtaaagtaatgtcgttatcagaattggcgctccccttacgttttgcatgcggtgtcccatgttgccagcgttgccgtggaagtagagcagcgtgggcgacgacttggagcgctcctccggttgggtaacccagaaggcgtgcagagtgacatcgtcgggtgtcttgatgctgaccgtaatgtgcggcaggttgtgcattgtcggaatgggtatgtaaatgcgggagttggctggcaagtccggatggtagagaagcaggtcctgggcatagtagaatatcactgcaagggcaggcacttagtgacgaatgactggtctgaagcagaatacgtacgcaggatgatcccagcgaagagtgccaacgtcatgtaaccgccgtagaaatagtagaaaatgaagcacaacaggaaggcagcgagtactcccacgcccacgccgcgggacttgggcagagcgatgcccacttctttcatgttcgcctgtggtccagctgcgctacatgtccaacgctctaatttaattaaattgcatcaattccagcgccagcaacacaaacgatttgtaattgtacaccgcccacagctgatttccaagacacctgtgcagtgcgaaaagttatcgataacgcagtacagtaactactgacgatcagcgaccccgataaggttgtgatcatgtggctataatgaactactactactaaaattattaaatatcgttcaactcaacattcaactcataaaataaaatcagtcaagtaattaagtagtttatttctttttgacatattctggataacttgaaacgctacatttaataattttatgcctatgaaaaggaatatataatatcaatataaattcaattcatgactctatttactttattttatatttatataaatgttgtacatgttttatattattatgcaagcgatatatcccgcatcatcactgtcgcgcggtgtgccatctctactgcagcacgcacggtcccactaattcaagatggtggaaagatttctgctgcgtcgcatgagtaaaacgtgaaaaacgatcattttgtttcgaaaaagtgcatttcaaaacaagtgggcagcgggaaaaacataaacattcgccagcgaccgcatgcaagtgagccccctgtatttaatgagcgctacaaggcaactgtgtgtgctaccacgacaatataatgagccaggtgagtaggccttgaaaaagctgtggttgtcaaacatcggtgtgtgtggaaaaatcggaaaaactatgaatttcttatatcatttgaaaccagacaagtcaaaacagtttgatccaggctgtcgtgtgagtaaaaacgtaaatcaaatgctacacacaaggcaatcgctcagttttgtgggcgtggctgctcagcaacgaagtctgtagaagtcccctcgtcgcgagacacctacactttgatgactggccgtgcggctgctggcggagcatttggataaaaggatttatttctccactattccgagagtgtttcatccttccgacagtgcctgacagttccc

SEQ ID NO: 27989 - DNA, 1093 bp, DROSOPHILA
ttgctggcgctggaattgatgcaatttaattaaattagagcgttggacatgtagcgcagctggaccacaggcgaacatgaaagaagtgggcatcgctctgcccaagtcccgcggcgtgggcgtgggagtactcgctgccttcctgttgtgcttcattttctactatttctacggcggttacatgacgttggcactcttcgctgggatcatcctgctgatattctactatgcccaggacctgcttctctaccatccggacttgccagccaactcccgcatttacatacccattccgacaatgcacaacctgccgcacattacggtcagcatcaagacacccgacgatgtcactctgcacgccttctgggttacccaaccggaggagcgctccaagtcgtcgcccacgctgctctacttccacggcaacgctggcaacatgggacaccgcatgcaaaacgtgtggggcatctaccaccatctgcactgcaatgttctgatggtggaataccgcggatatggcctatccaccggtgtacccaccgagcggggtctggtcaccgacgccagagcggccattgactacctgcacacccgccacgacctggaccactcgcaactgatacttttcggacgctccctgggcggagctgtggtggtcgacgttgcagccgataccgtatatggacagaagctaatgtgcgctattgtggagaacacttttagcagcataccggaaatggccgtggagctggtgcatcccgctgtgaagtatataccaaatctattatttaagaataagtatcactccatgagcaagataggcaagtgttcggttccctttttgtttatttcgggccttgcggacaacttagtgccaccgcgcatgatgcgtgccttgtataccaaatgcggcagcgagataaagcgcctgctcgaattccccggcggatcgcacaacgacacttggatagtggacgggtactatcaggccatcggtgggtttttggccgagctgcagcaacagccgctcctcaaggcgccggagaagagcaacgtctgggtggagctggagcataaaattattgatgtatag

SEQ ID NO: 27990 - protein, 338 aa, DROSOPHILA
MKEVGIALPKSRGVGVGVLAAFLLCFIFYYFYGGYMTLALFAGIILLIFYYAQDLLLYHPDLPANSRIYIPIPTMHNLPHITVSIKTPDDVTLHAFWVTQPEERSKSSPTLLYFHGNAGNMGHRMQNVWGIYHHLHCNVLMVEYRGYGLSTGVPTERGLVTDARAAIDYLHTRHDLDHSQLILFGRSLGGAVVVDVAADTVYGQKLMCAIVENTFSSIPEMAVELVHPAVKYIPNLLFKNKYHSMSKIGKCSVPFLFISGLADNLVPPRMMRALYTKCGSEIKRLLEFPGGSHNDTWIVDGYYQAIGGFLAELQQQPLLKAPEKSNVWVELEHKIIDV

SEQ ID NO: 27991 - DNA, 3373 bp, DROSOPHILA
gcacgcgggagttggtgctctcgctggtgtgacggaaccgctcctcgcggtatcgctggtagttctgctccttggtgatctgctccacctggtcaagtagctggcggatgcgcagctgcagctcagtcagtttctccttctgcgccacatgggcgtagtcgatagcgtgctctcccacctggatgtccaggtgaacacgcagctgggcaccactgaaccacgcggtgctgttcgagaacatgcagatgacgtgctcgccaggagtgtgcgaggtgaacgagatgcggccctgtgagctgtacacgcgggacagcacaatcttgtcgtcgctgtcgcgtacttccacatgcatgccgattccgggcgacgagggcatgaatccattagagcgcggatcatacagctctaccttgtagttaactgcaggaggacaagttagtcgattggtaaaacttccaagttggcactaggctctggctcaccaatcacagttgtctcgtcgggaacctcctcgatgaagcacttgcgctccgtctgcgatatgtggaagtacaagccgcaggcgctgtgcaggacgcacagaatcagggccaggctgatgaattggtcgcgcattttcggctatttgcagtgactttttcgagtagttctttaataaagttaagctcgccgacacgtcatgagaaaaagtgccagatcaaagtcagagtgtttggcatgagagatggcaccgtgattgggctagctcacggcaagctcacgaaagcgattcttttaaataaatggaacaaacgataaattaaaatagttattcaaacaggtgtacatttaaaaaataagagttgaagactaattttcaaacattgtaaaatattatatctaataaataaacttcttgcgatagttattctcacgctatcagtcttgagttctctttgccgatatctgtctcgagtggcaacaccgcagcaacagctgttttgccataagaagtagtggattttgcatcgctttggacacactgattgatcggtgtttttatttttttttggttcggcttatctaataatttaataacacattaatgcagccatttattgtcattcgcaactacacgcaagatgatgagctcaagtgccaggagctggtgcgggactacatcatgtcgttctcgaataagtccttttttgtctattgctttcgagaggtgagacatctttatctagatccccaaactctatgaactatttggatttcaacttttttcagatcaccctgcagttcatagtcatcacgtgggccatattcttcatatttctgggagtgcccctgcttttttgtgcactcactgtgcccgcttgcatattttgcctatttaccggcacctacttctcgttttactccaaggcagtggagttgatgagggtaagtgttaaagcatcggcagcaaagtatctcaaactaagaacgtttactttccagaccaaaccatcgcagtctttggtggccgagtgctatgaacccttcattttccgctgctcaccgaaggaagctagctaccagatatttaccgagaactgtccatacgaggaaacatacacgaggaaattccggcgcaggattgtggccgctattagtgtgaagaatcaccacgccgtatacaatgctgcatggatctatcgctttgccatcgatccccattacccgtgtcagacgatcatggaccccatgataaaactggtggtcaagaactgcattatcggcgggtacgcctcactggagtgcactatctccgagtggcaggaaagtgagcgcgacttttatgatgattttgggttcgttacgcggcagatctaccacaaaaagatcattggcagcagtttggcagtgatgaaaacccagctgacctatgggttacgtaccgacggagcagctttgcacaagcaaaactagtgcgttaccaatggtgcaatatagatgatagataaatggattctgtggaatcttatttaatatttacgtatttattctgtgaactttacattccagtcacatattgcgtcccgaactcaaatcacaccgaattatgcccttgatggcgtttctttatcgattcgacaatgtttaaagccagtttagccaatatatagtaagctaatactccacaaacattcctgcatgtcgacagactttagccgttgtcggctcgacaaagagtaaattccgtctaggattaagaagaaactttataatctccacactcgaagttttaataattgtaaacacgttgacactgcttttgtcctgttttattatctctggtttattctttgacatattctatttaaataaataaataaaatatttagtaataaataaaatttgcgtaatgatttagcgtaaatttgatgccacacatctaatgtttcgcattttgctgtgtgattctgctgtaggtacattaatttcttattctttgatgcatttctcggttctgtagcccgttacatggttgaattaaggtgtaatttggaaaaagagtccagtttatgtttgcgtttaaattgccatagcactgcgtataaaaagcctacatgccggggacatgcaatgtttaactaatttcatatatcatctgtctgtatacacttcgttttttattgggattttatgttcctttcatatagttgttctcagttacaattttgcgttagcgcaactaattcttaaaaaaataaacaggagctgccggctagttgctccgcactgtaaatgtaactatgtatttaaatttagtttagttggtttcacttgcatcaactatttaaagcgtgtttcaaaactggctgtgaaattagcatagtttcccgtttcgttttcattttatatattgattctcatctcctgccacgtgagttatagccatctgctgttaaggtaaattgaattcttttggtttcgtcgcaaacagcctcctcctccacttgggttgctatcctcgcatgctgcgccttccacttgcctcctagaagagcttcacacgccgcttcagctcgttgcgtcgccactggggtagccgatagaactccgacctggcgcactgcaagatgtgttcgaattcgatgtccgacagatggcgctgtggtgatagagagcgttatttgcgttctgtctgtgaagttggcttcataacttacctctaggttacagcgatccacgtccgagggcagacggtagtttgtgattagcagtaggtgatagggatagatcttggccggctcgtgcaccagcatcgaatgggacatgttgggcagactgcgccggatgagtccggcctgcggatagtggtaggagagtgctcctgagtaagtgc

SEQ ID NO: 27992 - DNA, 1254 bp, DROSOPHILA
ttttgcatcgctttggacacactgattgatcggtgtttttatttttttttggttcggcttatctaataatttaataacacattaatgcagccatttattgtcattcgcaactacacgcaagatgatgagctcaagtgccaggagctggtgcgggactacatcatgtcgttctcgaataagtccttttttgtctattgctttcgagagatcaccctgcagttcatagtcatcacgtgggccatattcttcatatttctgggagtgcccctgcttttttgtgcactcactgtgcccgcttgcatattttgcctatttaccggcacctacttctcgttttactccaaggcagtggagttgatgaggaccaaaccatcgcagtctttggtggccgagtgctatgaacccttcattttccgctgctcaccgaaggaagctagctaccagatatttaccgagaactgtccatacgaggaaacatacacgaggaaattccggcgcaggattgtggccgctattagtgtgaagaatcaccacgccgtatacaatgctgcatggatctatcgctttgccatcgatccccattacccgtgtcagacgatcatggaccccatgataaaactggtggtcaagaactgcattatcggcgggtacgcctcactggagtgcactatctccgagtggcaggaaagtgagcgcgacttttatgatgattttgggttcgttacgcggcagatctaccacaaaaagatcattggcagcagtttggcagtgatgaaaacccagctgacctatgggttacgtaccgacggagcagctttgcacaagcaaaactagtgcgttaccaatggtgcaatatagatgatagataaatggattctgtggaatcttatttaatatttacgtatttattctgtgaactttacattccagtcacatattgcgtcccgaactcaaatcacaccgaattatgcccttgatggcgtttctttatcgattcgacaatgtttaaagccagtttagccaatatatagtaagctaatactccacaaacattcctgcatgtcgacagactttagccgttgtcggctcgacaaagagtaaattccgtctaggattaagaagaaactttataatctccacactcgaagttttaataattgtaaacacgttgacactgcttttgtcctgttttattatctctggtttattctttgacatattctatttaaataaataaataaaatatttagtaat

SEQ ID NO: 27993 - protein, 249 aa, DROSOPHILA
MQPFIVIRNYTQDDELKCQELVRDYIMSFSNKSFFVYCFREITLQFIVITWAIFFIFLGVPLLFCALTVPACIFCLFTGTYFSFYSKAVELMRTKPSQSLVAECYEPFIFRCSPKEASYQIFTENCPYEETYTRKFRRRIVAAISVKNHHAVYNAAWIYRFAIDPHYPCQTIMDPMIKLVVKNCIIGGYASLECTISEWQESERDFYDDFGFVTRQIYHKKIIGSSLAVMKTQLTYGLRTDGAALHKQN

SEQ ID NO: 27994 - DNA, 12676 bp, DROSOPHILA
aagaatcaccacgccgtatacaatgctgcatggatctatcgctttgccatcgatccccattacccgtgtcagacgatcatggaccccatgataaaactggtggtcaagaactgcattatcggcgggtacgcctcactggagtgcactatctccgagtggcaggaaagtgagcgcgacttttatgatgattttgggttcgttacgcggcagatctaccacaaaaagatcattggcagcagtttggcagtgatgaaaacccagctgacctatgggttacgtaccgacggagcagctttgcacaagcaaaactagtgcgttaccaatggtgcaatatagatgatagataaatggattctgtggaatcttatttaatatttacgtatttattctgtgaactttacattccagtcacatattgcgtcccgaactcaaatcacaccgaattatgcccttgatggcgtttctttatcgattcgacaatgtttaaagccagtttagccaatatatagtaagctaatactccacaaacattcctgcatgtcgacagactttagccgttgtcggctcgacaaagagtaaattccgtctaggattaagaagaaactttataatctccacactcgaagttttaataattgtaaacacgttgacactgcttttgtcctgttttattatctctggtttattctttgacatattctatttaaataaataaataaaatatttagtaataaataaaatttgcgtaatgatttagcgtaaatttgatgccacacatctaatgtttcgcattttgctgtgtgattctgctgtaggtacattaatttcttattctttgatgcatttctcggttctgtagcccgttacatggttgaattaaggtgtaatttggaaaaagagtccagtttatgtttgcgtttaaattgccatagcactgcgtataaaaagcctacatgccggggacatgcaatgtttaactaatttcatatatcatctgtctgtatacacttcgttttttattgggattttatgttcctttcatatagttgttctcagttacaattttgcgttagcgcaactaattcttaaaaaaataaacaggagctgccggctagttgctccgcactgtaaatgtaactatgtatttaaatttagtttagttggtttcacttgcatcaactatttaaagcgtgtttcaaaactggctgtgaaattagcatagtttcccgtttcgttttcattttatatattgattctcatctcctgccacgtgagttatagccatctgctgttaaggtaaattgaattcttttggtttcgtcgcaaacagcctcctcctccacttgggttgctatcctcgcatgctgcgccttccacttgcctcctagaagagcttcacacgccgcttcagctcgttgcgtcgccactggggtagccgatagaactccgacctggcgcactgcaagatgtgttcgaattcgatgtccgacagatggcgctgtggtgatagagagcgttatttgcgttctgtctgtgaagttggcttcataacttacctctaggttacagcgatccacgtccgagggcagacggtagtttgtgattagcagtaggtgatagggatagatcttggccggctcgtgcaccagcatcgaatgggacatgttgggcagactgcgccggatgagtccggcctgcggatagtggtaggagagtgctcctgagtaagtgctcgaggcgggcaggtcgccgcccatcagagctcgcctatcgccctcggtgatcgagtccacagaagctgccagaggagaattatgttattctttcgccgagccgggttttcaaaatatatttcacttaccctccgatttgccgcagctcaaatctgtgctgtgggtcttgtcgcccagtcctccataggagaagtcctgttttcgaaaagggcatgggattagttttctgatcaaattgagggacacatgcaacaataataaacgaaaaaccagtgcaagttacaggtgataccaacgggcatccaaacacaagacggggactcaaaggactctacggcatagcaacaacgaaagcggtcttacagtggcaccatgcatcgtggccgcagcggatgtggtggagctgaatgtgtgggagcgtggtgctagcccgtatcctggcttgggcacatggcgcagcgcactcaccactgagcagatgtggatgtagatgtacatgttgatggtgttcaagtgatgttgatatgttcatgatgcaaatgttcgagttttagttggtcaagtgtggatgggtgttagttttttgagttatttgttgtcaggtgtcagggcaacaatagcaaacacatagttgttaggagtggcgcaggatgggtggatgggtgggattgggttttcagacacgcaatgaagcagcagaccaaccagttgagacatatgcgaaacagttgttagttcatccaggtgagcaaaccagtggcggcattggaaagtgagagaaacaagaaacaaataccgtcgtaactattttgggattacatataagcggataggttcgtgtggtagtgggtaagctataagctacataaccgacagcccggcaccaaggatataatctgatctgatcggatcggatcggatctgatgcgatctatgccgatctgagcaacaggcagcacttacggagctgaagccattgcgtatatagggcagagtcgtcgttttgaatccgtatccgggcttgggcggcgatcggtaggaatgtatggctataaacgtaagtgggctaatatataatatcggtatcgaatcgctatttgcctgaaaatcgaaactaggacaatgctctctagaggattaccattgtagctgggcgcgtttccaagcgatttgccaagcgagccacggtagctggtggagcgatcgaacatctcgtcctcgtagaagggcttctggtggtccagattgcgcgatggcgatgctccaatgggcgattcgtatctgtgtaatcaagatgtcataggattagtattactacactatactatatactataaccatatgttttgctatcttatcgttctatttttaaaacaaataataatagatttcttcaagtgcaaaatacaccgagcacgaactagaagatacatttttcaattttcttataacgatcaattttcattatcatcatttttcaattttcttataacgatcaatatcttacctcaatttgtagagtggctccttggaagcggagggcgtcctggatgcgttgcgcggatccaaattgttctgcttccacttcctgtacttggcgtgctccttgaggtccttggcaatcgccgatccgatgcccgagttaagcttttccagctgttcggcttcgcgttgaaggcgtctgtatttttgggaagagatttaataggatctaggatcatagcatgcacaagagattccaatactcactgctgctcctcgccattcttgaccttgccattcggcttgccattctccacattctcgtcctcatcatcggaggcgggcactcccttgtaggtatcactgtatcgccgcctacgctccggatccgtgtagggatacggcggagcgggaaagtcatcccgctcgatcttgggctgctcacctggcggcggcttcttggcggccggatagtgagacagttcaatcggctcctcgttgttcatgccaggactcttgggacgcggcgtctccgagcggatggcgtccaccagcaccttcatggcgctgcgggtccgcgagtggggacgcgacggcgggcggcttccggccacggatcccgcattgctggcggtggtcgcgtatgaggagggccgatggaagtgcggcgacagcggcttcttgtcatacggatcgatcggcttgcgcagatagtgcggcgcatccgtcagatagctgtaggtgtagatgcgcgagatgtcctcggcattgggtcgtccgtactcccggagtatcagacccggactcaccgttcggtagtgctgcaaattaagtgggattagtcctgggctctcatttcaaagtttaaatacatgcagtgccgtgtgtttttcttttcggttttagtattttcaaaaacgatggcagaaaatgaggggaaatcataaagtaaaattataaaacaaaccttgcggctagaggaataaagtgaaccattaaagctcggagttctggagcggatgtactgaaaacgaacgaaaaaataaaaacgcaagctcaaaacaactaaaatgcaagtaactgaaattataaaatcataagtgctgtgtgtaggtgcaaaaagggggtggtaaattgagatgggtgatattttcagggtgcctatataaatataatatataaggttctaaaatagttctaaaatatcacccattctagtatgaaatttgattttaaatgcgtgtgcctttcgtgaattttgcagcattcaaattagttgcaagctcagcagcctctttaaactcgggattgttgtgttggagtctcgagaattatctcagtaccagcggtttatcatctgtagatccgactacttaccatctcgctaagggcactggagctcatccggtcgcattcagtgtctgtgaagttgccattggaggcacctccgaccaccgacgaagtgcctccgccgccgttcaaaattatgccggactcggagggacccggaccgcatcgcggatgccagatggcactgccctgcaggtacatctcctcgccgtcgccgaagggatcgccgcactttgtgcagcgggcacaggtcggatggaagtggtggttgtcgcccgcctggagcaccttgccgctaatgaagcgactgcagtaggcacacttcaccccgaatcccttctggtagcacttctcgcagtagggcaccgcgtctttgcccatgtactccccattgagcaccgcctggcaggccttgcaccggaaacaagagacatgccactgccggtccaacgccaccagtgcctggccctccttcagcagctccccacagccggcacagtcattgggatcgtagtcctccttgaggtgcgccttatgagagatcacactgccgtgctgctggtgggcagtggctctcgtcggactctccgccggaggagctggcgaggagacgcctccacccgtcgcctggcgactgggcgacactggagcacccgtgacgcattgctcgcaaagcacctcctttccggtgttggtcacctgtgaggaggaatatgtgattagttacttatcactcgatctgtggagggtttcagctcaccttactgcccgacttgaagggctgcttgcacttggagcaggtgaagcacttctggtgataggtcttgcccatggtgctgaccacctcgccctccacatactgctggcaatttgcgcacttggtgccgtacagccgctgatagtccggtatgcaatagtaggcgttgtcctttgtgaagaatccgccggtggccagggacttcttgcactggcagcactggaagcaggccttgtggaagtggttgtccgccacgcggagcacctcgccggagcacttcttcgtgcatttcgcacagtagattttttgtttacctgtttgcggggaaaaggggacgaaaacgaagggagaactacggttagtagagcctgacattaaattcattcaatcagtactatcgccagattacgtatacgcagtgttgcgctgatgtcatatgcatgtgatgcgataatgccccaaccttgccccgttttaccgagctcagttcgaagctccgttcccaatgtgctagggtatatcggtctggtcttgtctgtttgtggatgtttcggaatggatatatatattaatatatacatcacaacttatcgtatatcgtatgttgcgagattcgttgtatgtgtgtgtgcgttgtttcccccacacttgtgtgcctatgtaagcacttgtattgacagtcacaaccaggccaactcttctacacaccccgacatggccgtaagtcgtttgtagtctgactcacgggtctggcaagccattaatcttatcattgataaggccaagggcagatattttctttatataaagacagcacacacacaaacactgctcgttaatgtacacacaagtgtggaacaggttaaatagatgtgtgacatggagcccccagttttgcatatgtccatgggggtagcatgcacatgtgtacatagtgtgagaaatatcccaaccaactgcaaataaactgcaaggtagaagcaaagacactagaataactagtgtctttggtagaagataacaagcattcataaagaattacttggaatgcgaaagggggacaaaactgccaccctttgagaatcactgaaagtaaagcgacttctgggaagactctgccgtattgaaactttagatacgtttgctttatcacctgttgaatcaataatctgaccagactcagatatttgctatctgatcgtttgtatctggttcaggagctatatattctcatatatattctcatgagttgacttacatgccaacacatagtgttccttattgcaagatcagtcatgaagggaacttggagctcggaactcggcaccatgacggctgaacgcatcgaaactaattgttggccatgactgatgtgctgatctgttctggcggctttcttgtccgccggaggcagaagtctgcggttgattaaatagacagcggaacatcccagccacaccacatcggctaaaagcagccgcttgcagtgcataacaagagtaaagatacatatacatacatacatatgcatatgtggataaatgtgtgtgtatgtatataagagcgaccgcattgtatcgcgctgtctgaacatttttcaccatctcactgttgttttttcaggccttttggatttttttgtttttccccaatttagtcggcagttgtgttgctttttcatatttgggttgcttccaaaatagaaattattgataagcccgtagctcaggttcatgtgtgccattagcttgttctataatagtgacgtatgtctgcgcactaacggtatcagccattatcttgtattaaattgtttatagcattctcttaatgtttcctattcatggagaactaatcaagaacattaaattgtgtgactagaataagaactattctgactagactcattaaaaactttaaaagcttcatttgtaagtagatttaaatgtgctaagtgataagaggaaaactaagaattatatagaatttagagggagagcaacggtctagatgttctttccactgtttattttgaatttaaaaccaatactattacttaatatacacgatcaatctaccaggttaccaacacatctcaatatggcgagaatagtacatacacaaaaattcaagaatgaatatttatttgtgcggtgacgccaccgaaatttttcacattcggcggtccagttggaatgaaagacgacctgataatacaaactcagatacagatacaccggctcagtttcagatacatttacggatacatgtgtatattgttcgacagagagcgggctttcgtcaccaacttggacttccgccccatagtttgtttaaagttcgtgtacgtgctctgcccgttttaattaatttcattatgtttcgctgactatctgccttgtttattatgcaatcacacacattttgttccacaatttgcatattgattttggcattttgtttattgactttccagcgcttcgccccacccccaccccctcacttctattagcgatcacccgctaattgacaaacaaaaccagcgaaaattacattttcatgcaacagagagccggcaaaacggcgactttgcctcatccaagttagtacaataaaagtttgagcgctcattttcagtgttgttttattgtaattgcgcagagcgattttagtgacgatgatgtcatcgtcatcgtcgtcaatgtggagctgtggagttgcgcgattgcgactgccagtatgtgccacaactgtggaccgcaaacaaactggttgctttgggctgctcgtatttgaaatatgtacaaacaaacaatacgaaaattcggaacgagaacatatacatatgtacatacatacggagtatggtacaataagaaaaaaaacccgtccggctgccagggggcaagtccaaggttacagtcgcacactccgaccagaccccatcgattcgatgtggaggggtcaagctgcagggcagcgaaaatattttaattaatttcagccgcgcccaaaatgccacaacgaccctaaccttaaacgaagaaatcgaaactaaaccctaaagcactaagagggtcataaacctgcacgcagaaaaacgattaaaaattcgttatcttttccatatattaggagatcttccaacaataggatatcaagacagctcaaataaaatatttatattactttaccaatatggcattgaaattaaataaacgagaaaatgtgtatttaccataattatctaaaaatggtgtgaattttaaaacatttacaccattaacattattttccgtgcacggaaaatcgcaaattaaagctagaggcaggagaagcgaccttcgtcactagcacggcatgcactcaaaagcgcacggtgccagttcaagcggagcaagtgcgtcaaatccttgactgactgcgggcaggataatgtcgaggacaatgcaggtcaaggcgacgggcggaagcaggtgaaacgccactccagctggctggcagacaataaataagcccgaaagcaaacatcgctctcttgtgcattccacgcccacgacaacgattcacccacgaatggttctgtttgtacgcacaaacatttctagtttggaagagcaacaacataatatacacaaatgattatttggcaaggcaaatcaacagcagcggccacataaataggaagcttacttttgtacctacatacaaaggtggttcagttgagaatgtaaacattggtggaaggtgggaagtttacatttgtttggcaaaagaaaacctgtttaataaatacatatataatatcctcagttttttcattttcggttggtatttctttgactgctgctatacacaaatacgcgttggtttctttcacggaattactcatccaattcaaaatgcttcgcaagtgttttttttatgctgtgctacctgacgcacatgtatttatatttaagcacatccacggtttagagttttcggtgcttcggtcgatttgaaagtgcttcctgtatgcttattagacgaaaagtgaaaagagcaccccacacaagtgcagctgatgacgctgcagctacgaaaatagcattcaattagacaagtgaaggggttagggggggggggggctgaggaggaggcggaaagtgggaaaataaggaaaatgaatggggggattggggcacaacacaagaggagatgccactttctatgcaagtgctctgacctatataaccccgcctgggaaacgccaacgaaatgccatgaaacaccacgaaatgcacggcgaagacgaacaaatcaacggcgaaataaatgagaaaaattccactaaatgaatgaggggatggtgggtggctggagatcggggataggggtctggggaatggggctcgttcgcccctttcgctttcatttgagcacgggcacagcggcagcgtagtcaaacgaaaaaggaaacccagtggaagtcaatgctcttgtcatgagttcatgtcgagcaattgctgccgcctttgccggaggcggagattcggatggctattgttaagccttttgcggcgggcgactcgacattatggggtacacatcgacgaccacttccacattcacatccacatccccatccccatcctcaccaagtccaagtcaattaggcattttaggcacgcatgcaactacttgtagacgggatgaatactgcactcggagaaatggccaatatccattccactattacaaacctatcccaccaaaaagtaatgtgtactttagtgagctataagggttatcaattccacgctaagctgttttccaaatagctaaatcgtagatttgtttatttatatgtattcactataatttaaattttttagctttcaaaataaccaaacatttgagtaagccatcaagtgatttttgcaaatttgagatcgtttcttaatgcctcaaaaagtgtgcaataagattgaatggataagattcaacttcggaaagctgtaaccattcttctttcccacacacacacacacagaaaacgagacccatttttagggcagtgcatgcatatgaacttaattagggccagtagcggagtagccgagtaattaatcattgacaacacaagtacacgtctcgaatagcggtatacgcaagccctttgcagcggcaactcgagaatggaaggcggaaaatgtaggaatccgacgccaaaaggcaggcccattcccattcccattcccattctcattcccattcacatgcacattgaagaacggtttcggtttggcaggcttacaggtttatgtttgcgggttattcgagagcggctctcacgacgggacgccctaacggtatcgtgtgtaattgcagttgcacaagcactttgaggtttattcggtcagcgtttcagatcccttcagcgacaatatcaccccgaattagtccgaaaagtgttatgaagttaaaaagtaaagaagcgaacacgaaacttgttcatacaacaacactgacgtcatcccagctgagaaattaaaatagggagtggacgtggactacaatcatatgcgagtggggcagtgttggtgagagcgatccgactctcagctggccagtattgattgatgatgacccaccggcagtggttgaagaaggtgcagggaaggggatggggaaggggaagagggaacatgcgagagaccacctgagctactatccctctgccctctcgctatatgaaccactcctacgatgcgataaggccgataatgccataatgctggtatcgcaccacccaccaccccctttcgataactttgcgcagacacacacacacacacacacaccttaatcgaagagagagagacagtatctgtgtttgtcggcagataacttacccatggcgagatactatatactgctgtgctcttcgctttttcgcctgcaaaacgggggagggaatcacgcacactagaacagagagacacacacggggaaagcacaaatactcgcgcacaggtcaccactacttcctcttcacttcactaacaaaatttttcttctgctaagattttttctatttgtatctttcgccgtatgcattcgcaatctgcgtagcacgattgttagactgtaaacatgtgtgagtctggataggagtgtggttaataatgcgttcgcagctcgaatgacgaatgtgcgatttgcttttggtgtggtctcgcactttaaatttgacgacaaagatcacagcggaaaatggtggcctttttgaaatgcctgaatgtctgattctcaaatcggagctgcgaccagcaaaaaaacaccgcaccgcaccagcaacgaaaccgacggcagcaaaaagacgactaagtatctgagagatacggctcggatggcaaaaacatcgtgcttccaagaatacactaaaattaaccccaaagataagtttcgtatggaaatagcggttgggtgttaaacttggctacaattggaaaggtggggagctcggctgtggaagagcatgtattagtgatgacaccgttcgtgccactgtaccgttccctataaatttgataatctataaaaataacaagtaattccataaatgatgctgcttataatttactttgtactttatagagacagaaataataatgaactacttttttttatctatctactagtaaagttagtttgggcaataaagtaggaaagtccatactttattaaaataaattcaactatagtcattttgtttccgtttaaatctttacttaaaacttttatttaaataagtgattttttttatgcgttttgcgtgtacatttgcacaataagctttcttagaagttaataataataattgtaataacattactaacaaaaataataatgagataaaattccatttataatacaataagaataaaattcattatgttattggccctttgttcaactgtctagaaccataggatttctatatatgttatataattatagatattatatttataggcatgaatgtataatgattcataataattccaaaaagtgttttaaaaactatcaataaacatttcaatgacgctttcattttcacccgctgcataattatgttgtgtgttcgccacccatttaaaatttaatagtacattgagatttgcaatattttaagtccggagcttgggtattcacattaactaccgcgtacataggtgtacaaattccaccgcttaaattcgcatctgcctttcgtacacgtaatcatttaatggattgtttcacatgtgagtgtaattaaatctaccagtgtatagcttcaatttcgtagtaaatgtggtctatattg

SEQ ID NO: 27995 - DNA, 2750 bp, DROSOPHILA
ccgtcggtttcgttgctggtgcggtgcggtgtttttttgctggtcgcagctccgatttgagaatcagacattcaggcatttcaaaaaggccaccattttccgctgtgatctttgtcgtcaaatttaaagtgcgagaccacaccaaaagcaaatcgcacattcgtcattcgagctgcgaacgcattattaaccacactcctatccagactcacacatgtttacagtctaacaatcgtgctacgcagattgcgaatgcatacggcgaaagatacaaatagaaaaaatcttagcagaagaaaaattttgttagtgaagtgaagaggaagtagtggtgacctgtgcgcgagtatttgtgctttccccgtgtgtgtctctctgttctagtgtgcgtgattccctcccccgttttgcaggcgaaaaagcgaagagcacagcagtatatagtatctcgccatgggtaaacaaaaaatctactgtgcgaaatgcacgaagaagtgctccggcgaggtgctccgcgtggcggacaaccacttccacaaggcctgcttccagtgctgccagtgcaagaagtccctggccaccggcggattcttcacaaaggacaacgcctactattgcataccggactatcagcggctgtacggcaccaagtgcgcaaattgccagcagtatgtggagggcgaggtggtcagcaccatgggcaagacctatcaccagaagtgcttcacctgctccaagtgcaagcagcccttcaagtcgggcagtaaggtgaccaacaccggaaaggaggtgctttgcgagcaatgcgtcacgggtgctccagtgtcgcccagtcgccaggcgacgggtggaggcgtctcctcgccagctcctccggcggagagtccgacgagagccactgcccaccagcagcacggcagtgtgatctctcataaggcgcacctcaaggaggactacgatcccaatgactgtgccggctgtggggagctgctgaaggagggccaggcactggtggcgttggaccggcagtggcatgtctcttgtttccggtgcaaggcctgccaggcggtgctcaatggggagtacatgggcaaagacgcggtgccctactgcgagaagtgctaccagaagggattcggggtgaagtgtgcctactgcagtcgcttcattagcggcaaggtgctccaggcgggcgacaaccaccacttccatccgacctgtgcccgctgcacaaagtgcggcgatcccttcggcgacggcgaggagatgtacctgcagggcagtgccatctggcatccgcgatgcggtccgggtccctccgagtccggcataattttgaacggcggcggaggcacttcgtcggtggtcggaggtgcctccaatggcaacttcacagacactgaatgcgaccggatgagctccagtgcccttagcgagatgtacatccgctccagaactccgagctttaatggttcactttattcctctagccgcaagcactaccgaacggtgagtccgggtctgatactccgggagtacggacgacccaatgccgaggacatctcgcgcatctacacctacagctatctgacggatgcgccgcactatctgcgcaagccgatcgatccgtatgacaagaagccgctgtcgccgcacttccatcggccctcctcatacgcgaccaccgccagcaatgcgggatccgtggccggaagccgcccgccgtcgcgtccccactcgcggacccgcagcgccatgaaggtgctggtggacgccatccgctcggagacgccgcgtcccaagagtcctggcatgaacaacgaggagccgattgaactgtctcactatccggccgccaagaagccgccgccaggtgagcagcccaagatcgagcgggatgactttcccgctccgccgtatccctacacggatccggagcgtaggcggcgatacagtgatacctacaagggagtgcccgcctccgatgatgaggacgagaatgtggagaatggcaagccgaatggcaaggtcaagaatggcgaggagcagcaacgccttcaacgcgaagccgaacagctggaaaagcttaactcgggcatcggatcggcgattgccaaggacctcaaggagcacgccaagtacaggaagtggaagcagaacaatttggatccgcgcaacgcatccaggacgccctccgcttccaaggagccactctacaaattgagatacgaatcgcccattggagcatcgccatcgcgcaatctggaccaccagaagcccttctacgaggacgagatgttcgatcgctccaccagctaccgtggctcgcttggcaaatcgcttggaaacgcgcccagctacaatgccatacattcctaccgatcgccgcccaagcccggatacggattcaaaacgacgactctgccctatatacgcaatggcttcagctccgacttctcctatggaggactgggcgacaagacccacagcacagatttgagctgcggcaaatcggaggcttctgtggactcgatcaccgagggcgataggcgagctctgatgggcggcgacctgcccgcctcgagcacttactcaggagcactctcctaccactatccgcaggccggactcatccggcgcagtctgcccaacatgtcccattcgataattagttgcgctaacgcaaaattgtaactgagaacaactatatgaaaggaacataaaatcccaataaaaaacgaagtgtatac

SEQ ID NO: 27996 - protein, 746 aa, DROSOPHILA
MGKQKIYCAKCTKKCSGEVLRVADNHFHKACFQCCQCKKSLATGGFFTKDNAYYCIPDYQRLYGTKCANCQQYVEGEVVSTMGKTYHQKCFTCSKCKQPFKSGSKVTNTGKEVLCEQCVTGAPVSPSRQATGGGVSSPAPPAESPTRATAHQQHGSVISHKAHLKEDYDPNDCAGCGELLKEGQALVALDRQWHVSCFRCKACQAVLNGEYMGKDAVPYCEKCYQKGFGVKCAYCSRFISGKVLQAGDNHHFHPTCARCTKCGDPFGDGEEMYLQGSAIWHPRCGPGPSESGIILNGGGGTSSVVGGASNGNFTDTECDRMSSSALSEMYIRSRTPSFNGSLYSSSRKHYRTVSPGLILREYGRPNAEDISRIYTYSYLTDAPHYLRKPIDPYDKKPLSPHFHRPSSYATTASNAGSVAGSRPPSRPHSRTRSAMKVLVDAIRSETPRPKSPGMNNEEPIELSHYPAAKKPPPGEQPKIERDDFPAPPYPYTDPERRRRYSDTYKGVPASDDEDENVENGKPNGKVKNGEEQQRLQREAEQLEKLNSGIGSAIAKDLKEHAKYRKWKQNNLDPRNASRTPSASKEPLYKLRYESPIGASPSRNLDHQKPFYEDEMFDRSTSYRGSLGKSLGNAPSYNAIHSYRSPPKPGYGFKTTTLPYIRNGFSSDFSYGGLGDKTHSTDLSCGKSEASVDSITEGDRRALMGGDLPASSTYSGALSYHYPQAGLIRRSLPNMSHSIISCANAKL

SEQ ID NO: 27997 - DNA, 2877 bp, DROSOPHILA
atgatcgtacaagtgctcaataaaccagatcgtattggaggtcagctcgtgcacggtggcatcctttggaacattgctttggcccacaatattggtgctcgattcgcccttgactacgtccaggaaatgctccaatgccttggcaccggtgtgctgcaacttttttagtacttttttcaactgttccctttgcgcaggatcgtatgtgcggtcaatatccggctgcagcagtataacccgctttagggcggagaatattcccaacgccgaggtccactccttgcgggaaatgcagcgcaggatgcgttgcgtaatggcctcagcgtccttaaccaccagatcgatggcattataggccaaggtggcgaatacctcgttgtgtttcgactggggaataatgtcgatcatgatggctcgctcccagttaagtaaccgctgcagtcccagcaacatgaccagatacttgtccagttcctgatcgccatccatcaaatcctcggaggtcaggtggtcgctgtgcgatgatgccttcttaatggagaaccctgtggactgctcaatcgtctgcgtcgcgcgtaaatataacttgttcgccttcttttcgaatctatgcagaataaattaaatatatcatatacgaaaacttggaaattaagtaatatttctcacatttgctgaagacgagcggaggttgtcttttttggctccgtttggcgtccactgtgtcgcggtctctgcaagaaaacattttaaaaacattaatttgaattgttaattgccattgcattaatgtttcttcggaataattaaggtactaaaatggtagcaaattaaaaactcttatttttgtaaccttttaatatgcatttgattcttatgagtttattaattttaaaaatgtgtgttttacaaaagcgtttataccccaatttttttttttttttttgacaaaaagtattatgcaatttgctagcttacgaaataaatttaaatttgtaaatgagcttcggagcaacattttaggaattacatagattcttaaagtgtactagagtttattatttaaggctaaaaacgacgagctttaagacaccaggtcttttacaataattctagaatacctacttaattatccacatatattaaaatcacaaagtttctcttcacataaaacattttaaaatcttagtgtatgataaaagatggacatgccagcgattcacttaaagagtgtggagcacatccatgatacggttgcaatcctcatcggtatttaggccgattttaacaagatcagcacgctccaaggatgccagttccaccagatcgatgtgagcctcttcgaaattggtcacatagttctccaggcccatgtgcatgagaatctgttccacattggcggcatggttaaccacgtacgagtggttcgatgctttgatggaacgacgacgcgactccaaggccagtgaggtctccatattcgagtcatccgaacaggtatccgggctgctgcagctctttatttctcgctccggctcgatgatctcctcctgcggcttgggcagcacgaatggcgggggcttaagctgagtgcgatggcagtgctgatgctgctgctgctgctgctgcttgggatgcaccttcgttggcactttcttgaaggtagcgaaccgcatgggcgacactggactcttccccttcgtgcccatattctcgatgggcgagagattgggcgaacggaagttgccaaagatcggagtagagcatcgcacgttggaggtgttcaccttcagggtgttccatctgcgctcctttagcgttggcgtgcgattaagcgtaattttggtcttgttcgtgggcgtgcgagaattctccattttttttagatactgtgacacagaaaatgatgcgttctttgcgaattcaagctggcaaatggcggtcatcgaattggacatgtaatgcttacatgcacaagctttttcgaacagacaccgttaaccgaaacgatcagagatgggaaaagcatacatatgctcatcatcgtacacatcgctattcatattctactacgtactatttttctccacataatatatatgtattaatactagttagaatatgaaagaactgtttactcaccagagcctcgtgaccccaactgttgctcttttggtgatccttgagcagctgcagcgatcggagaaccacttcgccccgttccgtcgcgtagatgtttgtgtactcccttaaattttgctccaaccagtgcgatatggtgtacagctcctcgcgcgtcgtttgcgaaagctgccggaatgaggtgtattcatcgctggaatcgtcctctatgtagataagatccagcaactccaccggcttcagcggagcactgtgcttcttgaggagcatactatagtgctgactcaggccttcgcagccggtgttaaacaaactggtgacattctccagctccacgctctgggaattgttgtgccggaagtaatcgttggcatcgcgcagtttggctagtgcgtcgaggaacaccgagatgtttccctccaccgggccttgatgaatcaactggcagacctcttgggagacatcgtagtgggacaggacgctttccagacaattgagagtagcttccagatctaaaaaaaaaaagaggcggtgacacattagttttttttttttgaaatcccattgagtttattttcatactctgctgccgtttctggagctgctccgtctcctggtagacgggcaatatggtctgctccaggtttcccaggcgcttctcgaagattgttagaatactggacatttgcgtggacagatcatggtatttatccactcgatctttcagcagagcta

SEQ ID NO: 27998 - DNA, 877 bp, DROSOPHILA
atggagaattctcgcacgcccacgaacaagaccaaaattacgcttaatcgcacgccaacgctaaaggagcgcagatggaacaccctgaaggtgaacacctccaacgtgcgatgctctactccgatctttggcaacttccgttcgcccaatctctcgcccatcgagaatatgggcacgaaggggaagagtccagtgtcgcccatgcggttcgctaccttcaagaaagtgccaacgaaggtgcatcccaagcagcagcagcagcagcagcatcagcactgccatcgcactcagcttaagcccccgccattcgtgctgcccaagccgcaggaggagatcatcgagccggagcgagaaataaagagctgcagcagcccggatacctgttcggatgactcgaatatggagacctcactggccttggagtcgcgtcgtcgttccatcaaagcatcgaaccactcgtacgtggttaaccatgccgccaatgtggaacagattctcatgcacatgggcctggagaactatgtgaccaatttcgaagaggctcacatcgatctggtggaactggcatccttggagcgtgctgatcttgttaaaatcggcctaaataccgatgaggattgcaaccgtatcatggatgtgctccacactctttaagtgaatcgctggcatgtccatcttttatcatacactaagattttaaaatgttttatgtgaagagaaactttgtgattttaatatatgtggataattaagtaggtattctagaattattgtaaaagacctggtgtcttaaagctcgtcgtttttagccttaaataataaactctagtacactttaagaatctatgtaattcctaaaatgttgctccgaagctca

SEQ ID NO: 27999 - protein, 217 aa, DROSOPHILA
MENSRTPTNKTKITLNRTPTLKERRWNTLKVNTSNVRCSTPIFGNFRSPNLSPIENMGTKGKSPVSPMRFATFKKVPTKVHPKQQQQQQHQHCHRTQLKPPPFVLPKPQEEIIEPEREIKSCSSPDTCSDDSNMETSLALESRRRSIKASNHSYVVNHAANVEQILMHMGLENYVTNFEEAHIDLVELASLERADLVKIGLNTDEDCNRIMDVLHTL

SEQ ID NO: 28000 - DNA, 2609 bp, DROSOPHILA
atcttctggcgccaccaaaagccaccgaagcagaggtaagcgttagttagtcgcctacaaataataagagtataaccaaaagtccttgctcctccgcagccacgtacgctctcgcgcaaattgtcgccacagccgccagtggtggacaagaaatcagccaaacagaagaagaaggggaagaagaagcaaaagccccaggaggcatcaccgctaaagagttccgatgaggagaaccacggccatcgtattcgaacaaatgctggctacgtgacggtggtcgatgagccgcccactaaagttcccataatcgagctgattaagacaagttcgggcatggttcgagttgagccgtgcacacccaaacagaagtattttccgcgagctgccgcccacacccgaaaatgcatgggttccgcgaggagccaggaccctccgggatgtcaaggaagcgggccaagcacgcagcaccaaaggtcgaacacaattccgccaaacaggcggcgctgcgcttcaaggagcagatctttgctcgcagatcttaggatacattacatttagagaaaaattagtggaaatgttaagtgtacacaatgcatacttcagtttttgtttcttttcattagcatttccccgattgaatttgattctattatttgttctattggttatttgttacgcaagcccttgctctttgccatatattattattttgttcaattgcacatcacttaaccacacttaacgctagcaagttggttgttgatccaatcaagatatgaaatcaattaagaaattttcgaacttgtcccattttttttttgagcatctgagaaatagaaaataaagcctacccatacaaatacaaaatgaaggaggaaactttttattaggggtccgaacattcggggacaattctctggaaaagtaggctggcggttgcctgtccgtcatgttgcacaaaacttttcatattttttcacatatggctcaccatttcgcaatgcgaacaatttgtaagtaaaatgctattctattctcaagatttagtatcctatttcgatttttgcttttagtcaatgcaaaaattggcgatgcagcctacatccaggatgaactgtcttcgtcgctatcctcttctgtggccagcaaattcaaagaattttcgaagcgcaaacgcatttcggacagtttctcggatctttcagaagaacttgagagaataggtttgcgacagatgaggaaacgcattaagttggagaaatcgttcgaaagaacacccaaaaagaaggtccagaccaagaagcatttaccaccggttcggaagaaggatacatctggaaatcgtggctcatttggcttgcgacaaatgaggaagcgcgttaagttggaggacaccgacgagaagtcttacaaaagatctcccaaaatgaaggtcatatcaatgaagcagtcacctctgaagggaccggctccaatcatattgcgtaaaaagtttggaatctacgtagctagtgtttggactagtgctggctacgtcttggtgatccgggaaccgtctgcagttgaaacaaccaatagcagttcggtcagttggcttggggagcagtaattttaccacaatatgaatactgaatatttagtctgtattatatatatagtaaaattgttgttttatttatgagtcgaactaatgtcccgtcagttgactaaggacaacgccaagaaataaaaaatagttttaggagaaatagtttcacgactttattctttggatctcagcttaagactaaaaatcaaatgcaaattggattgaggagaagcctcagtatttgaacaatatttgtatttcgggagagcctcgctcttgggttcttaagattaggtagccgttgaaagagggcagtcaaatctgcttaggtcaggctttaggatgtttacaagaacggctgcgctgccaaagataaacgaatgctgcgcagctgggatacgttatggaaaattactagagtgcattactgatttctttgaaataattggaagtggctggtttggaccacccaaataccgtcactccccttcccttaaagagaagcctatacttgggctgggattgatggatatagtgtgggaaatggagtttcttctatttctgtttgttgtggtgtgttttgattttgattttttcttattttaagttttgcatacagcatcataaatggtttaaatgatacatatcttaaatatgagtacaacaaaattagtgcgattattacaatgatcatttgtatgtaaagtgtaatattgttctctgaaatcatctcaacaatgtcgttgtgttttacaatttttatttttgttatattaagtggtgtgtatagtggtgtcaaatctatttctggttctaacagattttcacttaaaattatattattgatttctattttgcattgcgttactcttatcattttgtttccttctatttttattttattaattgaattttggcaattttggttaagaattgtttgggttaagttccaggttacaattgtgtttggttctatgtattttattatttcgttcgtgtgtactggcttaaaattacaaat

SEQ ID NO: 28001 - DNA, 549 bp, DROSOPHILA
atgcgaacaattttcaatgcaaaaattggcgatgcagcctacatccaggatgaactgtcttcgtcgctatcctcttctgtggccagcaaattcaaagaattttcgaagcgcaaacgcatttcggacagtttctcggatctttcagaagaacttgagagaataggtttgcgacagatgaggaaacgcattaagttggagaaatcgttcgaaagaacacccaaaaagaaggtccagaccaagaagcatttaccaccggttcggaagaaggatacatctggaaatcgtggctcatttggcttgcgacaaatgaggaagcgcgttaagttggaggacaccgacgagaagtcttacaaaagatctcccaaaatgaaggtcatatcaatgaagcagtcacctctgaagggaccggctccaatcatattgcgtaaaaagtttggaatctacgtagctagtgtttggactagtgctggctacgtcttggtgatccgggaaccgtctgcagttgaaacaaccaatagcagttcggtcagttggcttggggagcagtaa

SEQ ID NO: 28002 - protein, 182 aa, DROSOPHILA
MRTIFNAKIGDAAYIQDELSSSLSSSVASKFKEFSKRKRISDSFSDLSEELERIGLRQMRKRIKLEKSFERTPKKKVQTKKHLPPVRKKDTSGNRGSFGLRQMRKRVKLEDTDEKSYKRSPKMKVISMKQSPLKGPAPIILRKKFGIYVASVWTSAGYVLVIREPSAVETTNSSSVSWLGEQ

SEQ ID NO: 28003 - DNA, 2655 bp, DROSOPHILA
atgtcagctataattgttttatttttagcattatgcaggacttcaagctggctgcacttaaggtgtttggagccactgctaagtacctgtcgagaaatcagcgcttgggtgaggtagagcgtctgctggactgcataggaagcaacaacggcggagacatttccacggagtccgatgaaatactctcgattgccattaatgctgctgtgcacagcagtgcgccggagacgaaacagatgctggatcggttgatcaaacgcatcggcagcgtggagctacgagtctcctcctacatctacattgggcagcttaaatccgcctatctgctggccaacaagcacgatcgattggcggatatccggcgaatcctgcggcaggcggagcttaccggtcaggttcacatcaagaaactgtgcgatatgaagctccagctaagcgccgcgccaacgcctctgtgatatcccaaccctcgagcaataacacattagtaaccccttgtttctgggatttactagctgtgagaaataccaaatgatgaatttgtagctttgaaaactcctgcattctaaaagacaataacatatctaagcaaattctcaattttgagatttagatgaatatatattattcggaattggaattcatcttttgattattcacctagtgaaggcccaagttgttttgtaactgagctagcatagataatttgtttttagaatttaacatatatgtagatcaattttaatctttccaaagggccagcaagtattccaccctccagctcaaaaagactctcccagcatgtaaccaaattatattattgattgtactgtattttatatttattatgttatttttatattatactgttatatgtttattacccagaaaatgcgcgatatttttgaattcttggggcgacggtcaacactgctcgtgtcaagtttaccagcactgacaaagatctaaataagtggtaaataaatagaataattaagaaatgcgtgcggttatacaaagggttaaggctgccaaagtgacgggtatgcaggatcaaatagttaccatctatcatataattttatactgctcccctagtgttggatgagctggtgtcctccattggaccaggcctgtgcgtgctggtgggaatcaaggccagcgacaccgccaaggatgttgagtatctgtaggtaaattccactctggtgataaccaccttaggtttagaccacctaacacagcttaccattcaagtgtccggaaaatcttggctctccgtttattcgaggaggagggcaagcgttggcaaaagtccgtgaaggatctgaacctagaactgctgtgcgtctcgcagtttacactgtatcaccgccttaagggcaacaaaccggattttttggctgccatgaagggcgaggaggcgcaggagttgtacaatcaatttttggatcgcctaggtcaatcctacgatagcaccaagattaaaggtgagtgataggaacactccagctggtcatgttttaatctcacttactataatagatggcaaatttggagcatacatgcaagtgcacatagaaaacgatggacccgtaaccattaatttggagtcccccgaacaaaaggatactgacagagaagtggacaaatgatttgaaaatatataacaaccaaagacaacatttatgtaccacggggtttttatataatgtattttttagcagcaacttaaactaagaaaaaatcagcgtactcgtccttaggcttctaacatctcgagatcctcgacccccattccctcctccagtttcttctcgagttcgcgtgcatccacgtaggtgatcttctcctcgggcagatcctcctccatgagggcggcctcctctgccgcctcctgggcacgtcgttgcttcagccctgcggctggggagcgaatcagggacatgttgcgctgcacatccttgacgtccatctgaatctcgacctggcgacccttgcgcagtcgctccatgacaaagtggctggtgcgtttctccttaatctccgtcacccgcttgatggcctccagacccttctgccaggtctcgcggctgtatttcatgggcacgttgcggcgcttctcgaactcgaaactgggatcgatggccagctccttgccggcggccttgcggtacgccttcgtccatcctaccttgcggggattcttcttgcgcttaaaggccttgtgacacttgcctcggcagaacttgaagacctgcgacggaatatggcgaagcaatataaacatcggagcacatgtaaacaggaaagcaaatcgttcttaccttgcagtcatttcgcacgaattgcaccccgtggcccgggtatattttgctagagcaaaaatagcacgtttgaatgcgcattttcgcaatttacgacggataaattacgaaaacaaaacaaatgcgcaagctgctagcacgtgtgctgctgaagaagaagaaatatgaaaatgtatcggcagtcagcagtgcgaccagtcactgcttatcgataacactggctaacatggaaaatagctagatgtagacaaaaaatatccaagcaagaaatacgtataaattgcaagtgactgcgataccagttgacagttgtattgttttgataatt

SEQ ID NO: 28004 - DNA, 462 bp, DROSOPHILA
atgcgtgcggttatacaaagggttaaggctgccaaagtgacggtgttggatgagctggtgtcctccattggaccaggcctgtgcgtgctggtgggaatcaaggccagcgacaccgccaaggatgttgagtatcttgtccggaaaatcttggctctccgtttattcgaggaggagggcaagcgttggcaaaagtccgtgaaggatctgaacctagaactgctgtgcgtctcgcagtttacactgtatcaccgccttaagggcaacaaaccggattttttggctgccatgaagggcgaggaggcgcaggagttgtacaatcaatttttggatcgcctaggtcaatcctacgatagcaccaagattaaagcatacatgcaagtgcacatagaaaacgatggacccgtaaccattaatttggagtcccccgaacaaaaggatactgacagagaagtggacaaatga

SEQ ID NO: 28005 - protein, 153 aa, DROSOPHILA
MRAVIQRVKAAKVTVLDELVSSIGPGLCVLVGIKASDTAKDVEYLVRKILALRLFEEEGKRWQKSVKDLNLELLCVSQFTLYHRLKGNKPDFLAAMKGEEAQELYNQFLDRLGQSYDSTKIKAYMQVHIENDGPVTINLESPEQKDTDREVDK

SEQ ID NO: 28006 - DNA, 3630 bp, DROSOPHILA
accacacatatatagtgacatatatatatatagaaacagacacatatatatacatgcatatatcgtaacaaacactttagtgttatctgtgatttaagtttagtagctttactttgttgaaactctgcagaaagaacattttaaatcgaaattggtctaaaacaaacttcaattctttttatagcattacagataattctacactcaatgaaactgtttcgatgcttaatatgttattaatcaattaatttgtcaattatactagctgtacgataatttctcccttgattaactaccaataacaagcattttttataaataaacatttgaaaaatgaaatgaaatgcgttttaaatttatttgtgtgggtttcattggacttgcaaccatatcctaataatttgaatatattttttaaaaacttatttgcaacttattcgcggttatgttaaaatgataatttgaattcgatttattttcgatataagttggtagtcgattggaccgatttttcgtgcgtgatttgaatggtatccctggtcctagactatcgataacagtgcaaacagtgttttgggtcacctacaattttataaacaatccgcagcttaatttgtaagttacagcttaattgccgaattctaagatgtattcaaagtggttgtcaaattaaagaacccttttattttgagtatctggttaattgtcattttgtattcaaggtcaactagaaatgatcgtggaattaaagctcgtttgggtcgttatcaatctgtttaaaattgtgaaatctgtaattcgaacagaaagttgataatgatttttgtttcctgcagctaattttgggtgaatttcagatcaaacatatttatatgttgcggcattaactttagacgctcttgtttatttgcatatttcagtttgcatgtgtgcgtgagcgctttaaaacaaaatcgtgtcgcatatagatattccgctagtctaatcacaattcagtgccattatgcaacgtcaccgcgtagtgcaggcctccagcatttaactcaacaattgcatttaaaagtaaaccagtgatatagtttattgttacatttgagatcagacatcagacccgcagagacgacaggcaaagtgcgtgcttatcgcgcaataaacaatccagacacgcggtgataaggcgaaagggagcgatcattcactaaagtcacctttttacagatgctacgcagctgtcagttaaccctctccgccgctaagaggagccttcgcgagcagttccagttgcaagcccttcgtcaccagcagactgccattaaaatggagaaattcgatctgcccaagcgattgcagggtagcacgcccagcgtctggaacgagtacattgccctggccatgcaatataagcccctgaacttgggacagggatttcccgatgatgccgctcccgagtacgtgacccactcgttggccgacattgccaaggagcagaatcctcttctgcatcagtacactcgcggttacggtcacgttcgcctggtcaatgcgctatccaagctctatagcggtctcgtcggcaaggagctaaatcccctcagcgacatactgattacctcaggcgcctatgaggctctctactccaccatcatgggccatgtggacgtgggcgacgaggtgatcattattgaaccattctttgattgctacgagcctatggtcaagatggccggtggagtgccccgctttgttcccctaaaattggtaagaaccacaatagaaaaaaaaaatatatccctctttttaacatgtctaacttctagcgcaagacagagggaccaataagctctgccgattgggtgctagatgacgctgagttcgagagtctgttcaactctaaaacaaagatgattatcctaaacacgccccacaaccctattggaaaggtcttcaaccggaaagagctagagaggatagccgagctctgccgcaagtggaatgtgctgtgcgtctcggacgaggtgtatgagtggttggtgttcgacggagccgagcacatccgtatctgcacgctgccgggcatgtgggatcgcaccattactctgggatcagcgggcaagaccttctcagtaactggttggaaaataggctgggcctacggacccgctgaactgattcgaaacctgcagatggtgcatcagaactctgtgtacacctgtccaacgccgctccaggagggcgtcgcacgcagtttcgaggtagaactggcccgtttgggtcagccggagagctacttccttagcctgccgcgcgagctgaagcagaagcgtgacttcatggccaagttcctgtccgaatccggtatgcgtcccaccattcctgagggtggctactttatgctggcagactggtcaccactggcgggcaagattgatctaagctctgagccagacaagcatcgggattacaagtttaccaagtggatgaccaagaacatgggcttgcagggcataccgccaagtgccttctacagcgaacccaacaaacatctgggggaggactttgtgcgctactgcttcatcaagaagcaagagaacctggataaggcggccgaactgctgtccaaatggaaatagtcgccggacaataaacgaattgctatcagccgctttgtttatctctgcccgaatgcagttccctaacctgggtgttacgtaaccaacagggaaaacaaccttgtgctggtgtggtagccttactgcaatctccatttattagcaatccaacaacatgttcatccgcaccatacattggatagtaggtagctagtgtcgctgtaacgtgtatattgtgttctgtgtttttaaactagtgttctccgcttaggcatcgtacacggacttcagggccaattcgggcttgtcgtagcccagttcctcgatggttgggatgcccagctcctgcagtgtgggggtgatcttctccagcaagtagggatagagggtggccttttggtcgccgcacttgtccttgcatccctccagccacctgatggccagtgcaatgtcgttgacgcgacggctggcacgcagaccggcctcgatgatcttggggctgggcaccagatccatgcccagcagatcgttcatgcccttgcggatctcccagccatcgatgccctcacggctgaagtacttctcgtagcgcttgtcgaactcctccgccgattcctcggttccgtgcagacagcgcacggcggccacgcgcgacgatgtgccgacgaggctgctgcggagggcgcttgccaggttacgggccgtgatgctcaacatgctgccgttaaaaacagtaaaatgcttgttaattgcaaaaatttggttaagtaacagctcgactcacttttcttgttcttgctacttttcacacgggtatgacagatctgagtgatggttggcaacactggcttttccagggatggacacgtttataactgtcgctgtcacggaacagtgagatatttaaaatgtttctgcttcagtatatttcaaattcgggtaagatcacagttagtttatcattttccttatatttaatttcttctatcttgcccaaaaaaagcaaaaaaaaaatcaaaat

SEQ ID NO: 28007 - DNA, 1484 bp, DROSOPHILA
attatgcaacgtcaccgcgtagtgcaggcctccagcatttaactcaacaattgcatttaaaagtaaaccagtgatatagtttattgttacatttgagatcagacatcagacccgcagagacgacaggcaaaatgctacgcagctgtcagttaaccctctccgccgctaagaggagccttcgcgagcagttccagttgcaagcccttcgtcaccagcagactgccattaaaatggagaaattcgatctgcccaagcgattgcagggtagcacgcccagcgtctggaacgagtacattgccctggccatgcaatataagcccctgaacttgggacagggatttcccgatgatgccgctcccgagtacgtgacccactcgttggccgacattgccaaggagcagaatcctcttctgcatcagtacactcgcggttacggtcacgttcgcctggtcaatgcgctatccaagctctatagcggtctcgtcggcaaggagctaaatcccctcagcgacatactgattacctcaggcgcctatgaggctctctactccaccatcatgggccatgtggacgtgggcgacgaggtgatcattattgaaccattctttgattgctacgagcctatggtcaagatggccggtggagtgccccgctttgttcccctaaaattgcgcaagacagagggaccaataagctctgccgattgggtgctagatgacgctgagttcgagagtctgttcaactctaaaacaaagatgattatcctaaacacgccccacaaccctattggaaaggtcttcaaccggaaagagctagagaggatagccgagctctgccgcaagtggaatgtgctgtgcgtctcggacgaggtgtatgagtggttggtgttcgacggagccgagcacatccgtatctgcacgctgccgggcatgtgggatcgcaccattactctgggatcagcgggcaagaccttctcagtaactggttggaaaataggctgggcctacggacccgctgaactgattcgaaacctgcagatggtgcatcagaactctgtgtacacctgtccaacgccgctccaggagggcgtcgcacgcagtttcgaggtagaactggcccgtttgggtcagccggagagctacttccttagcctgccgcgcgagctgaagcagaagcgtgacttcatggccaagttcctgtccgaatccggtatgcgtcccaccattcctgagggtggctactttatgctggcagactggtcaccactggcgggcaagattgatctaagctctgagccagacaagcatcgggattacaagtttaccaagtggatgaccaagaacatgggcttgcagggcataccgccaagtgccttctacagcgaacccaacaaacatctgggggaggactttgtgcgctactgcttcatcaagaagcaagagaacctggataaggcggccgaactgctgtccaaatggaaatag

SEQ ID NO: 28008 - protein, 417 aa, DROSOPHILA; identical to SEQ ID NO: 15264

SEQ ID NO: 28009 - DNA, 3804 bp, DROSOPHILA
gaatgtggccacttaaattactgcaacaaaaccacattacacagacaagaacacaatttctttagatttagcggttttctatcttaactttaagtcagttatgggttctatgatttcaaagcaaagaaatcgtacgaaaggagaaggcaaagcgggcctgtatcaaccgatttgaccacacatatatagtgacatatatatatatagaaacagacacatatatatacatgcatatatcgtaacaaacactttagtgttatctgtgatttaagtttagtagctttactttgttgaaactctgcagaaagaacattttaaatcgaaattggtctaaaacaaacttcaattctttttatagcattacagataattctacactcaatgaaactgtttcgatgcttaatatgttattaatcaattaatttgtcaattatactagctgtacgataatttctcccttgattaactaccaataacaagcattttttataaataaacatttgaaaaatgaaatgaaatgcgttttaaatttatttgtgtgggtttcattggacttgcaaccatatcctaataatttgaatatattttttaaaaacttatttgcaacttattcgcggttatgttaaaatgataatttgaattcgatttattttcgatataagttggtagtcgattggaccgatttttcgtgcgtgatttgaatggtatccctggtcctagactatcgataacagtgcaaacagtgttttgggtcacctacaattttataaacaatccgcagcttaatttgtaagttacagcttaattgccgaattctaagatgtattcaaagtggttgtcaaattaaagaacccttttattttgagtatctggttaattgtcattttgtattcaaggtcaactagaaatgatcgtggaattaaagctcgtttgggtcgttatcaatctgtttaaaattgtgaaatctgtaattcgaacagaaagttgataatgatttttgtttcctgcagctaattttgggtgaatttcagatcaaacatatttatatgttgcggcattaactttagacgctcttgtttatttgcatatttcagtttgcatgtgtgcgtgagcgctttaaaacaaaatcgtgtcgcatatagatattccgctagtctaatcacaattcagtgccattatgcaacgtcaccgcgtagtgcaggcctccagcatttaactcaacaattgcatttaaaagtaaaccagtgatatagtttattgttacatttgagatcagacatcagacccgcagagacgacaggcaaagtgcgtgcttatcgcgcaataaacaatccagacacgcggtgataaggcgaaagggagcgatcattcactaaagtcacctttttacagatgctacgcagctgtcagttaaccctctccgccgctaagaggagccttcgcgagcagttccagttgcaagcccttcgtcaccagcagactgccattaaaatggagaaattcgatctgcccaagcgattgcagggtagcacgcccagcgtctggaacgagtacattgccctggccatgcaatataagcccctgaacttgggacagggatttcccgatgatgccgctcccgagtacgtgacccactcgttggccgacattgccaaggagcagaatcctcttctgcatcagtacactcgcggttacggtcacgttcgcctggtcaatgcgctatccaagctctatagcggtctcgtcggcaaggagctaaatcccctcagcgacatactgattacctcaggcgcctatgaggctctctactccaccatcatgggccatgtggacgtgggcgacgaggtgatcattattgaaccattctttgattgctacgagcctatggtcaagatggccggtggagtgccccgctttgttcccctaaaattggtaagaaccacaatagaaaaaaaaaatatatccctctttttaacatgtctaacttctagcgcaagacagagggaccaataagctctgccgattgggtgctagatgacgctgagttcgagagtctgttcaactctaaaacaaagatgattatcctaaacacgccccacaaccctattggaaaggtcttcaaccggaaagagctagagaggatagccgagctctgccgcaagtggaatgtgctgtgcgtctcggacgaggtgtatgagtggttggtgttcgacggagccgagcacatccgtatctgcacgctgccgggcatgtgggatcgcaccattactctgggatcagcgggcaagaccttctcagtaactggttggaaaataggctgggcctacggacccgctgaactgattcgaaacctgcagatggtgcatcagaactctgtgtacacctgtccaacgccgctccaggagggcgtcgcacgcagtttcgaggtagaactggcccgtttgggtcagccggagagctacttccttagcctgccgcgcgagctgaagcagaagcgtgacttcatggccaagttcctgtccgaatccggtatgcgtcccaccattcctgagggtggctactttatgctggcagactggtcaccactggcgggcaagattgatctaagctctgagccagacaagcatcgggattacaagtttaccaagtggatgaccaagaacatgggcttgcagggcataccgccaagtgccttctacagcgaacccaacaaacatctgggggaggactttgtgcgctactgcttcatcaagaagcaagagaacctggataaggcggccgaactgctgtccaaatggaaatagtcgccggacaataaacgaattgctatcagccgctttgtttatctctgcccgaatgcagttccctaacctgggtgttacgtaaccaacagggaaaacaaccttgtgctggtgtggtagccttactgcaatctccatttattagcaatccaacaacatgttcatccgcaccatacattggatagtaggtagctagtgtcgctgtaacgtgtatattgtgttctgtgtttttaaactagtgttctccgcttaggcatcgtacacggacttcagggccaattcgggcttgtcgtagcccagttcctcgatggttgggatgcccagctcctgcagtgtgggggtgatcttctccagcaagtagggatagagggtggccttttggtcgccgcacttgtccttgcatccctccagccacctgatggccagtgcaatgtcgttgacgcgacggctggcacgcagaccggcctcgatgatcttggggctgggcaccagatccatgcccagcagatcgttcatgcccttgcggatctcccagccatcgatgccctcacggctgaagtacttctcgtagcgcttgtcgaactcctccgccgattcctcggttccgtgcagacagcgcacggcggccacgcgcgacgatgtgccgacgaggctgctgcggagggcgcttgccaggttacgggccgtgatgctcaacatgctgccgttaaaaacagtaaaatgcttgttaattgcaaaaatttggttaagtaacagctcgactcacttttcttgttcttgctacttttcacacgggtatgacagatctgagtgatggttggcaacactggcttttccagggatggacacgtttataactgtcgctgtcacggaacagtgagatatttaaaatgtttctgcttcagtatatttcaaattcgggtaagatcacagttagtttatcattttccttatatttaatttcttctatcttgcccaaaaaaagcaaaaaaaaaatcaaaat

SEQ ID NO: 28010 - DNA, 1373 bp, DROSOPHILA
tttcctgcagctaattttggatgctacgcagctgtcagttaaccctctccgccgctaagaggagccttcgcgagcagttccagttgcaagcccttcgtcaccagcagactgccattaaaatggagaaattcgatctgcccaagcgattgcagggtagcacgcccagcgtctggaacgagtacattgccctggccatgcaatataagcccctgaacttgggacagggatttcccgatgatgccgctcccgagtacgtgacccactcgttggccgacattgccaaggagcagaatcctcttctgcatcagtacactcgcggttacggtcacgttcgcctggtcaatgcgctatccaagctctatagcggtctcgtcggcaaggagctaaatcccctcagcgacatactgattacctcaggcgcctatgaggctctctactccaccatcatgggccatgtggacgtgggcgacgaggtgatcattattgaaccattctttgattgctacgagcctatggtcaagatggccggtggagtgccccgctttgttcccctaaaattgcgcaagacagagggaccaataagctctgccgattgggtgctagatgacgctgagttcgagagtctgttcaactctaaaacaaagatgattatcctaaacacgccccacaaccctattggaaaggtcttcaaccggaaagagctagagaggatagccgagctctgccgcaagtggaatgtgctgtgcgtctcggacgaggtgtatgagtggttggtgttcgacggagccgagcacatccgtatctgcacgctgccgggcatgtgggatcgcaccattactctgggatcagcgggcaagaccttctcagtaactggttggaaaataggctgggcctacggacccgctgaactgattcgaaacctgcagatggtgcatcagaactctgtgtacacctgtccaacgccgctccaggagggcgtcgcacgcagtttcgaggtagaactggcccgtttgggtcagccggagagctacttccttagcctgccgcgcgagctgaagcagaagcgtgacttcatggccaagttcctgtccgaatccggtatgcgtcccaccattcctgagggtggctactttatgctggcagactggtcaccactggcgggcaagattgatctaagctctgagccagacaagcatcgggattacaagtttaccaagtggatgaccaagaacatgggcttgcagggcataccgccaagtgccttctacagcgaacccaacaaacatctgggggaggactttgtgcgctactgcttcatcaagaagcaagagaacctggataaggcggccgaactgctgtccaaatggaaatag

SEQ ID NO: 28011 - protein, 417 aa, DROSOPHILA; identical to SEQ ID NO: 15264

SEQ ID NO: 28012 - DNA, 5870 bp, DROSOPHILA
ggtgatcttctccagcaagtagggatagagggtggccttttggtcgccgcacttgtccttgcatccctccagccacctgatggccagtgcaatgtcgttgacgcgacggctggcacgcagaccggcctcgatgatcttggggctgggcaccagatccatgcccagcagatcgttcatgcccttgcggatctcccagccatcgatgccctcacggctgaagtacttctcgtagcgcttgtcgaactcctccgccgattcctcggttccgtgcagacagcgcacggcggccacgcgcgacgatgtgccgacgaggctgctgcggagggcgcttgccaggttacgggccgtgatgctcaacatgctgccgttaaaaacagtaaaatgcttgttaattgcaaaaatttggttaagtaacagctcgactcacttttcttgttcttgctacttttcacacgggtatgacagatctgagtgatggttggcaacactggcttttccagggatggacacgtttataactgtcgctgtcacggaacagtgagatatttaaaatgtttctgcttcagtatatttcaaattcgggtaagatcacagttagtttatcattttccttatatttaatttcttctatcttgcccaaaaaaagcaaaaaaaaaatcaaaatcaaaccttgtttctttttcaacggtccacattgatgctggctactgccaggcggtattttttgatgatttaattgcggtcacactgcatcttcaacttgacgcgtgctatttgattaatctctctgaaaaataagtcaaattaaccgataaagtttaaaaaaaggcgatattggaagttgaaacagagcagaatacggttagttctctgttccgccaccaggtgtgacatttagaagcgtttatattgtgtacgagacttgcaaaatgtcataagcaattaggggtgacaagaaatcaaaatggcgtacgcggtgcaaaaaagaatcgcaccaaacaagcgtcgctgctgagtggagaatcactagctcaaaaaatcgcattttcagccagtaaaaaacaattaaaactagttaaccagtgactaatcgttgtaacaccatttgcaggtagagatctggtgaaaaatgtccaacgcagacgtgcaatttaactacggccagcagggaaatggcgacaacttcaacgacgacagcaaccagcagcaggatgaggatgaccagtacaacgaagatggcggcggcaagatcgaaaacgtcggcgagagccccaaattcgttcggttgcgcggcctgccctggtccgcaacgcacaaggagatactcgactttctggaaaacgtgaatgtgactaatggctcggcgggcattcacctggtcaccagtcgggtcgacggcaagaacaccggcgaggcgtacgtggaggtggccagccaggaggacgtcgaagaggctcgcaagctgaacaaggccagcatgggtcaccgctacattgaaggtttgtttatttgccacttgagtgggggatgactgtacctgatgactatcttggcagttatagttagtttcttctcactttgtttatatgtttatccttttaacaagcttgaacttgttctgattccatacatggaatcgaagatgatttatttcttcattgttttgctacttatactggtagcgcttattttcttttcattcattgtggaattttacctaatattaaggaggttttacaaatatgtcactgtattgttactcttatccttgcttctatcgaggtaaactaaaatttagtaaagtaaatttcacaccaccatttataatctgtattcatgttaattcttatcttaataacaaacacaaaatggtgcagaaaacttgtttgttttttttccgttttaactgatgtaattggtttttatttctttagtttttaccgccacgcccaaggaggccaaggaagccatgcggaagatcagcggacacggcacggccttcgttgtgaagcttcgtggtctgccatatgccgtcactgagcagcaaatcgaggagttcttctctggtaagtttcctgacccaaatcctctttccatactaatatgtaccaggtaccaggaaaaaagacagtggttgaccgcatgtattatttgttcacatcgttgagatatggcctacggtcccctttcatctacacctttcatatatcaattacacatgcgtttcaacgtacatacatattgtcgggcaaagaaatgcaggcccttgcatttgtgtaatgggttcggcggttcacgcggctccttccaaagtcaacggctgagagttgacgcggtcacgtccgcttgtccgataaatcattccttcgttggtcacataacccagtttacttggttatatggtcgatcattactcacaaccttcaactgagctacacatgtctacgagttacaggatctgagttttgtaatacattgtggtccgggaaactcgattgcaacagtcgcatcttgcctggtgatcatagtttgactaaaaggcactgtttatttatgcaaacgttgctaataccgtgagaacctgcaaaagttctgcggtgttggaactaaacaataacatttatcaacctctgtatttctgtttttctatctaagcttaaccttgcataatgtatatatatatatgaaatctatatatttgtataaatctttgttggttatcgtcatgggcagggttggatatcaaaacggatcgggagggcatactttttgttatggacagaaggggtcgtgcaactggggaagcttttgttcagttcgaaagccaggacgacactgagcaagccttgggccgaaatcgggaaaaaattgggcacaggtgggtttctaattcatcatatcttctacaacaaaaacagcgaaattaaaacattaagtggtaatcgattgcgaacttgttgaaacacacaaggactatacaattattcacaaaatatttaataacttttatcacaaataatttctatttcagtaactgagaaatcatttagcaaaaaattttcccatagctacgggtctggtggggctctctaaatacatatatatgtttaagcgcgatcatgtgctttatctaacaaattaattaaactgtgaacagcatttttatttattttatttgatcatttcaatgaatttattttgatttcatttttttacgtgatatttaatagttgatcatggaaaaaagccaccgaccctagcaatttcaagtaccacttttaaaatacatatattttccacttttattcacataggtatattgagatattccgcagctcgattgctgaaatgaagagggccacaggcgccggtggcggtgtcggaggacgccctggcccttatgacatacgtgatcgtggtgccaaccgtggtggcaatgatttcggcggagggcgcaatggtatgttcagatctaattgttaaattttataaaacttcactgattgccattccgatgttaaacaaagattggggcaacaatggcaactttggcgttggtgccaacaacatgctgggcttcaacaatctgccaagcctgatgaactcgggcaactttggaaacaaccaaggtggaaataatggaaattttggaaataactctggacccagcaatttcggcaactttggtggcggcaacaacggtggaaattccggcaactttggaaacgacagtggtaacagcggaaactttggaaacttcggcaataatggaggcggaaacttcggcggcaacaacaacggcggcggtggtttcaacagtggcaacaacttcaattctccaggtggcgttaataatttcggcaacaatggcggctccaattttggcggcaatggtggaggaggtttcaataacggcggaaacttcgtatcctcgagtggtgttggcaactttggcccgatcggcggcggtcgcaacaataacaacggaaatttcggaaactctggattcggtaactttggaggaaacaacaatgtcggctcgaacttcggaggaggcaacaacggcggtggcggcggattcaacaatggctcgaacttcggcggcggcaactcaatgggcggtggtggcaatttcggtcccatcggcggcggtcggggcaacgacatcgagtattatacaatccacatgcgcggacttccctacacttcatttgaaaacgacgtttttaaggtgggtttaacaataacgaacttgttaagaaggaatattcaacttacttaaaatcacaataatttctttctatagttcttcgaaccaatccgaccagctaacgtgcggataaactacaacaagaagggtctgcacagtggcactgcggatgcctacttcgacacctacgaggattcccaggtggccatgaagcgccacagagagcagatgggttcgcgatacattgagctgttctacgacggaaagacgcgtggactcaatggtggggaacacggcggtggtaacggtggcggcggaatgggaaacaatggcggcggaaacttttcgcggcgcatctaaagctcttccatagtttgattacattgaaattaatgtagacgcaagtatttcgtaatattatgatcaagctgatactgctaaaccgctaaggaacccttacaaccatgtaaacgacttaactatcgaacagaattcagacagagacaattggttacacatagaaaccaccaacgtataatcaagaataaagagcacacttttatttaagtactttattctgtagaaatttcaattttaatatttaagtttcaattattaatttaggtttttctaaaataaacttttattttaaaatgaaaatgaaacgagtttttcttaaacttagaactcgtctgcccggaaatgattagaattaaaaattgtggatacagatgagatcatatgtggtcttctgtaagtgcacagctgtctaaaaacttttgatattcacatttaagtatacagaaactaattatacaaaataatagggtatgccatgaattgcacaaagcctatttgcatttctgggcagttgttgcccacattgatgaaaaaaagtgggaataaaagtaagtaatgaacacatctggctgggactagaaatatcaaaacatcatttggtaaatcggaaagagtggctttcctttaaaacttgatacctcctaaactctttaatgctcttcggtatttatttcgccttcggtttttttatttcacaatatcttagcaaaggttcagaatttgcgggccgaagacaaaagttttacttttcactttcctaaaggcacagttgacagctcagtatcatagttgcgatgtagatagcagacctgtcaataaatttgtatgtctattttgatccaatgatcattcctcataattataccaataaaccgaatgctgaaaatagataaggtataacgtagacccgatgtgtttgccaagcggcgagttatgagatctcgtaaaaagaaggaagacgtatttaaatatacttatactcgaaaaggcttttttcagcggacggcagcttcaaagttacttcagttttttttttttttgacaggcgctgcaggcacagcttttctttttgcgataagtgtttacttaattacggcttttcttattcgagatacaggaatgatatcatgctaatcacttgtatctatttgataggccttgatgcgcgtgtcgccagcaaaaactctgtcaattcgacaagcaaataaaacaatttgtctataattgggtaattttgcgaacaaaaatgagcccattttttgccggcttaaataattgctacagagggcctttaaaaatt

SEQ ID NO: 28013 - DNA, 2133 bp, DROSOPHILA
aagcgtcgctgctgagtggagaatcactagctcaaaaaatcgcattttcagccagtagagatctggtgaaaaatgtccaacgcagacgtgcaatttaactacggccagcagggaaatggcgacaacttcaacgacgacagcaaccagcagcaggatgaggatgaccagtacaacgaagatggcggcggcaagatcgaaaacgtcggcgagagccccaaattcgttcggttgcgcggcctgccctggtccgcaacgcacaaggagatactcgactttctggaaaacgtgaatgtgactaatggctcggcgggcattcacctggtcaccagtcgggtcgacggcaagaacaccggcgaggcgtacgtggaggtggccagccaggaggacgtcgaagaggctcgcaagctgaacaaggccagcatgggtcaccgctacattgaagtttttaccgccacgcccaaggaggccaaggaagccatgcggaagatcagcggacacggcacggccttcgttgtgaagcttcgtggtctgccatatgccgtcactgagcagcaaatcgaggagttcttctctgggttggatatcaaaacggatcgggagggcatactttttgttatggacagaaggggtcgtgcaactggggaagcttttgttcagttcgaaagccaggacgacactgagcaagccttgggccgaaatcgggaaaaaattgggcacaggtatattgagatattccgcagctcgattgctgaaatgaagagggccacaggcgccggtggcggtgtcggaggacgccctggcccttatgacatacgtgatcgtggtgccaaccgtggtggcaatgatttcggcggagggcgcaatgattggggcaacaatggcaactttggcgttggtgccaacaacatgctgggcttcaacaatctgccaagcctgatgaactcgggcaactttggaaacaaccaaggtggaaataatggaaattttggaaataactctggacccagcaatttcggcaactttggtggcggcaacaacggtggaaattccggcaactttggaaacgacagtggtaacagcggaaactttggaaacttcggcaataatggaggcggaaacttcggcggcaacaacaacggcggcggtggtttcaacagtggcaacaacttcaattctccaggtggcgttaataatttcggcaacaatggcggctccaattttggcggcaatggtggaggaggtttcaataacggcggaaacttcgtatcctcgagtggtgttggcaactttggcccgatcggcggcggtcgcaacaataacaacggaaatttcggaaactctggattcggtaactttggaggaaacaacaatgtcggctcgaacttcggaggaggcaacaacggcggtggcggcggattcaacaatggctcgaacttcggcggcggcaactcaatgggcggtggtggcaatttcggtcccatcggcggcggtcggggcaacgacatcgagtattatacaatccacatgcgcggacttccctacacttcatttgaaaacgacgtttttaagttcttcgaaccaatccgaccagctaacgtgcggataaactacaacaagaagggtctgcacagtggcactgcggatgcctacttcgacacctacgaggattcccaggtggccatgaagcgccacagagagcagatgggttcgcgatacattgagctgttctacgacggaaagacgcgtggactcaatggtggggaacacggcggtggtaacggtggcggcggaatgggaaacaatggcggcggaaacttttcgcggcgcatctaaagctcttccatagtttgattacattgaaattaatgtagacgcaagtatttcgtaatattatgatcaagctgatactgctaaaccgctaaggaacccttacaaccatgtaaacgacttaactatcgaacagaattcagacagagacaattggttacacatagaaaccaccaacgtataatcaagaataaagagcacacttttatttaagtactttattctgtagaaatttcaattttaatatttaagtttcaattattaatttaggtttttctaaaataaacttttattttaaaatgaaaa

SEQ ID NO: 28014 - protein, 586 aa, DROSOPHILA; identical to SEQ ID NO: 15258

SEQ ID NO: 28015 - DNA, 3508 bp, DROSOPHILA
ggcgatgaaatcgagtgagtctcagaggcgaaggaactgcggaattctgacaacactttactggctgctctgcagttcgttcactcttcactagagtttcattccctggccatcggcggcacatccaaaaaaaaaacccatttgtatagttgcaaacaatgaatatgaacacccaataccacccatctgtagatgcttgtggtgcgtcggacactaaccgaaatcctgctggaaaccacgaacgaagagattgcagccattgcaggcgagactctaaaagcacaccgtgcgaaaggtacattatgcattatacttaagtttatcccaaaccgatttcttccagcgctcgcgctcgtgtgtgtgtgtgtaagtagttatagatcgtaagacggcgcggatatatcgcggatcgattgtagcttggatgaccggatgtttcggccaagcgattggagtcgtgttttttccggcttcacagcgcgttaccaactcttttaatcctatgtctatgctaataatctttaaatccctaataatgaattgatatatcgaacaccacacaaaccaatgaaatcacttgctgaattttttaattttaatatataatatatataattatatatatatatgtatgtatgtgtaaatcaaaagcgtcatcagcccaagtgattcgcaaaagcgccttgtcctccattaccggcaacttgggtaagtaaccaaattccagtttagttcatacatattctttgcactatttttgttcagaggtagtctgagttatgcttggtcatcctgtctttctataccccaaatcctaatcacaaaacgaaaagatattacaaagaattggattactcctatggccgagatttaacattctatgcttcctgtaaatttaagccatggccaaatgatttcgaccccctcggcgcagtttggtctttctagcccgcttcttcgtcctttcgcttccccatttccccttcctttcacctttccgtaaattcttgcgaagatattgaaaatcagttcaaaatataccaaaatctgcgcccgatctacattgaagcctggtagcaacaattagcacttgactgatttgaattataggtttagctgcctatggcgattcttccagcgaaaccgaggatgatgaggatgatgaagatgagcgtcaagcgggcgctggaaaggatgccgaaaaaagcgcgcagctaagcgcggaggagttgaaagtaagttagccacacgttcattatcaaaagatatcaattctcaatattatttggcttttaggctcgcataaggcgcagcaaacgatccttcgagaaagtcattgacgacattgaggatcgagtggccaagcaagagctgcttgatgagcaaacactgctgcgacatcgcaagcgggagctagaacgctccgtaactggtggtggtgagcatcgtcgaccggcggccaatccagaaccgcccagtgagtcggctagtcaagcaacccaggaaaagcatcagcagtcaaatggtataggtgatgcacataaatccaaagaactcctaagcatacattgccatcatttaggcaaaagactcagtcgcaaggaacggaccacccgctttagcgacaacaaggacggcaaacagcagtcgcagagcttcgtgcaacaagtagtggcgaccgctgtggtgccaccacccggaagcctaagcaatagcagcccacaaaagctgaagcccgttcccaatccggccactaatctactgcagatgccggagtcggtggccaccatgctgactgcggctgacaaggcgctgcacaaggccaacaagtcgtcgcataaaaaaagcaagcgccgccactcgtccccctcgtcatcgtctagcagcagtgggagcagctctagcagcgatagcgacgacagtagcagcacctcgagcggatccaaaacttcaggcagccgcagcaagcgatccagtcggcatggacaccgcagccaccacagcagcagtcggagcaaatacgaacgtcgcgatcgcgacagagaaagggagcgggcgcgggagcgagagcgggaccgtgataggagtcatcgccagcatcgtagtagccagcttagtggaagtcaccaccagaaacagcgccgacatcgcgagtccagccattcaggcgaagatgctggcggtagcagcagttaccaccgctcctcgcggcagagcagcagccgtagccatgatcatggcagcaaccgtagccatgatcacggcagcagcagcagcggacggaagcggcaccgcacgagatcccgctccaagtcgcgaagcactcaccactccagctcgaaagcatactcctccacttccgcgtcgcatccgcgcaagcgccattaagaaaaatcttgcgcgtaaaaatccgaagttaattgttaatattacataattattatttcttctgtttaagatgctttttagtaaacagttttaaatcagcctaataaattaaaaactcagaaaaatttgtttttttttcatgtgttatgcgaatatcctcataataattagatatatttttaaagttggacatacgggaatacgggaattaagttcccaataatacaaacaagtaaacttttttaaattcaataaataatttattttttctataagcaataacatttttgctaaattaagacttggtaattaggtaatactattgttgttctatggaatattcgatcgaaacattcttatcagtctcaaaaacttaaaacaaacttataatataacccatatgttataacccattgatgaacaaaaattagactctttggccttagtcgacctcctcgaccgtgggtccagagtagcctccaaatcctcccgcctgctggccgcagtttgctcccggaccaccagctccagctcccgcaccctgctgatgcatcttggtcatgatgggggagcagtggcgggtgagctcctccagcttgtggtcgaactcctccttctcggcagtggtgttgctgtccagccaccggatagtgtcgttgcacttgtccaagacggagttcttgtcagcctcgtccaatttgccagcaggtgcctgttccacggcctgcttcacattgaagacgtagctctccagggcatttctagaggttattcgctggcgatgcttctcgtcctcgtcggcgtacttttcagcctcgttcaccatgcgatcaatctcggcctgcgagagccgtcccttgtcgttcttgatcgtgatgttcttggccttgcccgtgctcatctccttggcgctgacgttcaggattccattggcgtccaagtcgaaggtaacttctatctggggcacaccccttggtgcaggtggaatgccggacagatcgaaggtgcccaatgcattgttgtccttcgtcatcgcacgttcgccctcatacacctgaatggagactccgggctggttgtccgcgtatgtggagaacgtcttagtctgcttgcacggaat

SEQ ID NO: 28016 - DNA, 1387 bp, DROSOPHILA
taaattcttgcgaagatattgaaaatcagttcaaaatataccaaaatctgcgcccgatctacattgaagcctggtagcaacaattagcacttgactgatttgaattataggtttagctgcctatggcgattcttccagcgaaaccgaggatgatgaggatgatgaagatgagcgtcaagcgggcgctggaaaggatgccgaaaaaagcgcgcagctaagcgcggaggagttgaaagctcgcataaggcgcagcaaacgatccttcgagaaagtcattgacgacattgaggatcgagtggccaagcaagagctgcttgatgagcaaacactgctgcgacatcgcaagcgggagctagaacgctccgtaactggtggtggtgagcatcgtcgaccggcggccaatccagaaccgcccagtgagtcggctagtcaagcaacccaggaaaagcatcagcagtcaaatggtataggtgatgcacataaatccaaagaactcctaagcatacattgccatcatttaggcaaaagactcagtcgcaaggaacggaccacccgctttagcgacaacaaggacggcaaacagcagtcgcagagcttcgtgcaacaagtagtggcgaccgctgtggtgccaccacccggaagcctaagcaatagcagcccacaaaagctgaagcccgttcccaatccggccactaatctactgcagatgccggagtcggtggccaccatgctgactgcggctgacaaggcgctgcacaaggccaacaagtcgtcgcataaaaaaagcaagcgccgccactcgtccccctcgtcatccggatccaaaacttcaggcagccgcagcaagcgatccagtcggcatggacaccgcagccaccacagcagcagtcggagcaaatacgaacgtcgcgatcgcgacagagaaagggagcgggcgcgggagcgagagcgggaccgtgataggagtcatcgccagcatcgtagtagccagcttagtggaagtcaccaccagaaacagcgccgacatcgcgagtccagccattcaggcgaagatgctggcggtagcagcagttaccaccgctcctcgcggcagagcagcagccgtagccatgatcatggcagcaaccgtagccatgatcacggcagcagcagcagcggacggaagcggcaccgcacgagatcccgctccaagtcgcgaagcactcaccactccagctcgaaagcatactcctccacttccgcgtcgcatccgcgcaagcgccattaagaaaaatcttgcgcgtaaaaatccgaagttaattgttaatattacataattattatttcttctgtttaagatgctttttagtaaacagttttaaatcagcctaataaattaaaaactcag

SEQ ID NO: 28017 - protein, 186 aa, DROSOPHILA
MPESVATMLTAADKALHKANKSSHKKSKRRHSSPSSSGSKTSGSRSKRSSRHGHRSHHSSSRSKYERRDRDRERERARERERDRDRSHRQHRSSQLSGSHHQKQRRHRESSHSGEDAGGSSSYHRSSRQSSSRSHDHGSNRSHDHGSSSSGRKRHRTRSRSKSRSTHHSSSKAYSSTSASHPRKRH

SEQ ID NO: 28018 - DNA, 3865 bp, DROSOPHILA
taaaaacaatccggacagtagagcagactgcaggcttgagtgcaggctgtcgattaaacattcccttgaaattcaggctagcgacagcgaagattccattgacgtgcctgtggaggcgcgtggagaactaaaggtgcagcaaataggtaatgaattgattagtaaggacgacgatcgaagcagcagcagcagcgaagagccagagtcggagctgcatggagccatcgaaaccggcaatcggacagtggcggagcacgtgagaatggctaccgtaaacgatgtcaatggtaaaaactacgaagaaagactggcggatctggtaggcatcaccatttgacccggatgtttgctcagccaggcgatgaaatcgagtgagtctcagaggcgaaggaactgcggaattctgacaacactttactggctgctctgcagttcgttcactcttcactagagtttcattccctggccatcggcggcacatccaaaaaaaaaacccatttgtatagttgcaaacaatgaatatgaacacccaataccacccatctgtagatgcttgtggtgcgtcggacactaaccgaaatcctgctggaaaccacgaacgaagagattgcagccattgcaggcgagactctaaaagcacaccgtgcgaaaggtacattatgcattatacttaagtttatcccaaaccgatttcttccagcgctcgcgctcgtgtgtgtgtgtgtaagtagttatagatcgtaagacggcgcggatatatcgcggatcgattgtagcttggatgaccggatgtttcggccaagcgattggagtcgtgttttttccggcttcacagcgcgttaccaactcttttaatcctatgtctatgctaataatctttaaatccctaataatgaattgatatatcgaacaccacacaaaccaatgaaatcacttgctgaattttttaattttaatatataatatatataattatatatatatatgtatgtatgtgtaaatcaaaagcgtcatcagcccaagtgattcgcaaaagcgccttgtcctccattaccggcaacttgggtaagtaaccaaattccagtttagttcatacatattctttgcactatttttgttcagaggtagtctgagttatgcttggtcatcctgtctttctataccccaaatcctaatcacaaaacgaaaagatattacaaagaattggattactcctatggccgagatttaacattctatgcttcctgtaaatttaagccatggccaaatgatttcgaccccctcggcgcagtttggtctttctagcccgcttcttcgtcctttcgcttccccatttccccttcctttcacctttccgtaaattcttgcgaagatattgaaaatcagttcaaaatataccaaaatctgcgcccgatctacattgaagcctggtagcaacaattagcacttgactgatttgaattataggtttagctgcctatggcgattcttccagcgaaaccgaggatgatgaggatgatgaagatgagcgtcaagcgggcgctggaaaggatgccgaaaaaagcgcgcagctaagcgcggaggagttgaaagtaagttagccacacgttcattatcaaaagatatcaattctcaatattatttggcttttaggctcgcataaggcgcagcaaacgatccttcgagaaagtcattgacgacattgaggatcgagtggccaagcaagagctgcttgatgagcaaacactgctgcgacatcgcaagcgggagctagaacgctccgtaactggtggtggtgagcatcgtcgaccggcggccaatccagaaccgcccagtgagtcggctagtcaagcaacccaggaaaagcatcagcagtcaaatggtataggtgatgcacataaatccaaagaactcctaagcatacattgccatcatttaggcaaaagactcagtcgcaaggaacggaccacccgctttagcgacaacaaggacggcaaacagcagtcgcagagcttcgtgcaacaagtagtggcgaccgctgtggtgccaccacccggaagcctaagcaatagcagcccacaaaagctgaagcccgttcccaatccggccactaatctactgcagatgccggagtcggtggccaccatgctgactgcggctgacaaggcgctgcacaaggccaacaagtcgtcgcataaaaaaagcaagcgccgccactcgtccccctcgtcatcgtctagcagcagtgggagcagctctagcagcgatagcgacgacagtagcagcacctcgagcggatccaaaacttcaggcagccgcagcaagcgatccagtcggcatggacaccgcagccaccacagcagcagtcggagcaaatacgaacgtcgcgatcgcgacagagaaagggagcgggcgcgggagcgagagcgggaccgtgataggagtcatcgccagcatcgtagtagccagcttagtggaagtcaccaccagaaacagcgccgacatcgcgagtccagccattcaggcgaagatgctggcggtagcagcagttaccaccgctcctcgcggcagagcagcagccgtagccatgatcatggcagcaaccgtagccatgatcacggcagcagcagcagcggacggaagcggcaccgcacgagatcccgctccaagtcgcgaagcactcaccactccagctcgaaagcatactcctccacttccgcgtcgcatccgcgcaagcgccattaagaaaaatcttgcgcgtaaaaatccgaagttaattgttaatattacataattattatttcttctgtttaagatgctttttagtaaacagttttaaatcagcctaataaattaaaaactcagaaaaatttgtttttttttcatgtgttatgcgaatatcctcataataattagatatatttttaaagttggacatacgggaatacgggaattaagttcccaataatacaaacaagtaaacttttttaaattcaataaataatttattttttctataagcaataacatttttgctaaattaagacttggtaattaggtaatactattgttgttctatggaatattcgatcgaaacattcttatcagtctcaaaaacttaaaacaaacttataatataacccatatgttataacccattgatgaacaaaaattagactctttggccttagtcgacctcctcgaccgtgggtccagagtagcctccaaatcctcccgcctgctggccgcagtttgctcccggaccaccagctccagctcccgcaccctgctgatgcatcttggtcatgatgggggagcagtggcgggtgagctcctccagcttgtggtcgaactcctccttctcggcagtggtgttgctgtccagccaccggatagtgtcgttgcacttgtccaagacggagttcttgtcagcctcgtccaatttgccagcaggtgcctgttccacggcctgcttcacattgaagacgtagctctccagggcatttctagaggttattcgctggcgatgcttctcgtcctcgtcggcgtacttttcagcctcgttcaccatgcgatcaatctcggcctgcgagagccgtcccttgtcgttcttgatcgtgatgttcttggccttgcccgtgctcatctccttggcgctgacgttcaggattccattggcgtccaagtcgaaggtaacttctatctggggcacaccccttggtgcaggtggaatgccggacagatcgaaggtgcccaatgcattgttgtccttcgtcatcgcacgttcgccctcatacacctgaatggagactccgggctggttgtccgcgtatgtggagaacgtcttagtctgcttgcacggaat

SEQ ID NO: 28019 - DNA, 1317 bp, DROSOPHILA
atcaaaagcgtcatcagcccaagtgattcgcaaaagcgccttgtcctccattaccggcaacttggcgaaaccgaggatgatgaggatgatgaagatgagcgtcaagcgggcgctggaaaggatgccgaaaaaagcgcgcagctaagcgcggaggagttgaaagctcgcataaggcgcagcaaacgatccttcgagaaagtcattgacgacattgaggatcgagtggccaagcaagagctgcttgatgagcaaacactgctgcgacatcgcaagcgggagctagaacgctccgtaactggtggtggtgagcatcgtcgaccggcggccaatccagaaccgcccagtgagtcggctagtcaagcaacccaggaaaagcatcagcagtcaaatggcaaaagactcagtcgcaaggaacggaccacccgctttagcgacaacaaggacggcaaacagcagtcgcagagcttcgtgcaacaagtagtggcgaccgctgtggtgccaccacccggaagcctaagcaatagcagcccacaaaagctgaagcccgttcccaatccggccactaatctactgcagatgccggagtcggtggccaccatgctgactgcggctgacaaggcgctgcacaaggccaacaagtcgtcgcataaaaaaagcaagcgccgccactcgtccccctcgtcatcgtctagcagcagtgggagcagctctagcagcgatagcgacgacagtagcagcacctcgagcggatccaaaacttcaggcagccgcagcaagcgatccagtcggcatggacaccgcagccaccacagcagcagtcggagcaaatacgaacgtcgcgatcgcgacagagaaagggagcgggcgcgggagcgagagcgggaccgtgataggagtcatcgccagcatcgtagtagccagcttagtggaagtcaccaccagaaacagcgccgacatcgcgagtccagccattcaggcgaagatgctggcggtagcagcagttaccaccgctcctcgcggcagagcagcagccgtagccatgatcatggcagcaaccgtagccatgatcacggcagcagcagcagcggacggaagcggcaccgcacgagatcccgctccaagtcgcgaagcactcaccactccagctcgaaagcatactcctccacttccgcgtcgcatccgcgcaagcgccattaagaaaaatcttgcgcgtaaaaatccgaagttaattgttaatattacataattattatttcttctgtttaagatgctttttagtaaacagttttaaatcagcctaataaattaaaaactcag

SEQ ID NO: 28020 - protein, 206 aa, DROSOPHILA
MPESVATMLTAADKALHKANKSSHKKSKRRHSSPSSSSSSSGSSSSSDSDDSSSTSSGSKTSGSRSKRSSRHGHRSHHSSSRSKYERRDRDRERERARERERDRDRSHRQHRSSQLSGSHHQKQRRHRESSHSGEDAGGSSSYHRSSRQSSSRSHDHGSNRSHDHGSSSSGRKRHRTRSRSKSRSTHHSSSKAYSSTSASHPRKRH

SEQ ID NO: 28021 - DNA, 3724 bp, DROSOPHILA
aatatttgacgaattttttaagtaaatcttaaaacgataaactacatttttccagggtataaatatttatttaaagcggcactttaaggaaaacaaaatgcggcatcgctccaaagacatttccgcttttcgcgtgtggcatgtggatttctgctgcggtgcattcgtttcgcatttttagcgctgcattcaaccgattttttttggttgccgttcattattcaaaatgttattaaacttccccgtttttttgcgactggctatgctctcgactttggttctccttcatgcaacgaatttaataatttgagcagtggttttcatcttgaggttggtttttattttcttcgttagttttccaccggcatttgttgttgcttacgtcttttgttatacgtttattgcgttaattaaagtgtaattagttaacgatttcggtttggccaagccaagccagcgaaaggtggaagtggcgttgttcaatattggccaaaatgcatttacttcgagagatttgtggaagctcagctgcagttgattaagttgttatgcctccgtgtgattgccggttttcaaagctgtggattttgcaaaaaaagattgctgcatttgttcggattaattaattaataattaattttgctcatttttaaataatcaaaaattagccgtgctttcttatatttcaaatcatatttataacagcttgttggtgacttacctaccctataatttatgtcacatatatgtgatttggcttgaagagcttaccacttatcttctgttattgttaaatgctatctgcgcgaattatcactcactcgctgattaaacgcttatcaattgttgttttcaaaataaattgatttttccatcctgaaccatctgaagttcatttctagggcactgtaagtgcaaaaaaaaggtcacccaaagaaaacacaaatcattttccgttaaagtgcatatttatcgtttcgattttaagatcatttcatcattatttcttcttcagggccgcccaatatatttccagttcgttgccctcccaatcgaaaggcttcgtcaaaacactgcaaatagtaacataaaatatcaaatttacataatgccttaatagagaggatagtgaaattagccaaagcaaaaggagaaaaagcaatgctgatgtgtatggataatgcttgtggagcacgaaacgctgcagtgaagagagacccacaagttgaacctccaaactccaagcgggaatcgcagagatcgcgcacttggggaagtggtcagtaattgccggggagtgggtatgggggaaagaggttgtctggtgcctactgcaccgatggccaagattgacaacgatcatgcatacacacacacacacacacactgccgtgtatggacaactagccgagctgtggacccccaatggctggggaagtgaatgtgatgtaatggtaacattgtatccgagttgcacaattttcgctgtgccgcatttggccaacttccgagtcggacacttacttttctttcaggtaccgcaacacttcctgctccttatcgctgaggcccacttcgttggcatccaggttgattcgcagcaactggcgcgtctgcatgcccgttaggaaggtgctcacttcgggcagtccgctcatcgtgtagtacatggccagcttgcccagctccacgccgcgttccttgcagacctccgatgccttccgggcaatggccttctgctcatcactggccggatgccatggctgtggaccggcattggtcagcagtccgagggcatgagctgcggcacagatgacgcccaggttctgggacttgaagaaatccaggtactccaggagcgtttcatcggtcagggtgtatctggcataggtgaggaccgtctggtgggcgatatgagatttaaaacttgaaatttgaagtgtatgctataaactcacatcgagtcttccggctgttcgggtcaggaactccttaagcaccgaaatcgggtaagcggacactccaatgaatcttgccttgccctccttgaccagctgctccaaagtgggcagtgtctcgttgatcacaatgtccagatccttggcgaactcgatatcgtgaatctggatgacatcaacgtagtccaggccaagtagtttcaagctcttctccacgctttcgcgcgtcttcttggcactaaagtcaaacattttatcgtagtccagttcgtagcgagccactttcgtggcgatatagtaggattcccgcggcacatcctttagggccagtcccaggacctcctcagagcgaccctgaccataccagggagcagtgtcaatgtagttgatgcctgactttacggcctcgtgcacagttttaataccctcctccaaatcaaaactgaaagggaatatatgaaattagagatgaatacaatctcaaacattttccccattattttaaattacgaattcgtactttcagcaatactttctagaatttttattattaaatgccaaagaaagaaaatattctttctgtgtacgggagtaattgaatttgttaagatttctcttacccgtagttcgcgcacagggcgccgcctccgaaagagactttcgagacttgcaggccggtctttccgagattgcgatattccatccgacgcaccttcgcctcatcgtggaatcccttcacataggtagccggtaatgtttgagacatttttaataatccgaatatattgcgcggtctgttgaaattcgatcggcagtcagagaactactgcctgctcaatataatgggtatagtttatattctgaacatcacacattgcctcttatcaaaaagagaaatgttctgtattggagcggttttaaagtatttgaacaaatctcttattttctcttctcgaattaaaattaagagagggattggatattttctttaagggaaagtagtctttaagaaagagattcttcagaagaattctgttttgcaataaaccaagtgcaaagcctttaaagccctctcgacgtcccataaaatatacattttcaataattcaaatggttaaaaatgttcccttaataactttttatttaagtgaattgtataatctaaagtttattttaaatccgttctttctgcatttccattgatttattggtttctcactttaacaacttagccgtggataaagtggatccccaactgtaggacttggtaaagacgctgaaataaagacagaaaaggaaaccaatgtacggtgtcgattaaatagagattcaccattaaccagtctggctaggttgaggcctagttcgtgaccgtgatgcaattgcaggattggtaacaccaaatccgactaaccagttgttggccaacttacttttcgcgcaaatactgcagcacttcctgttcgtgggaagtgagaccgtcgaagatcgcgtccaggttaatccgcagcagctttcggttggggatgccgatgaggaaggtggccgccccatccagttgcatcgtatagtacatggccagctttcccagctccacgttcctctgctggcagatttcggccccccgtttggccacggccaggatttcctgactaccgggatgcgatgcatgtggtccagcgtttctcaagagtcccaatgagtgagcggccgcacagacaacgcccactcccattttctggaagtccttcatgtagcgcagcaag

SEQ ID NO: 28022 - DNA, 1038 bp, DROSOPHILA
atgtctcaaacattaccggctacctatgtgaagggattccacgatgaggcgaaggtgcgtcggatggaatatcgcaatctcggaaagaccggcctgcaagtctcgaaagtctctttcggaggcggcgccctgtgcgcgaactacggttttgatttggaggagggtattaaaactgtgcacgaggccgtaaagtcaggcatcaactacattgacactgctccctggtatggtcagggtcgctctgaggaggtcctgggactggccctaaaggatgtgccgcgggaatcctactatatcgccacgaaagtggctcgctacgaactggactacgataaaatgtttgactttagtgccaagaagacgcgcgaaagcgtggagaagagcttgaaactacttggcctggactacgttgatgtcatccagattcacgatatcgagttcgccaaggatctggacattgtgatcaacgagacactgcccactttggagcagctggtcaaggagggcaaggcaagattcattggagtgtccgcttacccgatttcggtgcttaaggagttcctgacccgaacagccggaagactcgatacggtcctcacctatgccagatacaccctgaccgatgaaacgctcctggagtacctggatttcttcaagtcccagaacctgggcgtcatctgtgccgcagctcatgccctcggactgctgaccaatgccggtccacagccatggcatccggccagtgatgagcagaaggccattgcccggaaggcatcggaggtctgcaaggaacgcggcgtggagctgggcaagctggccatgtactacacgatgagcggactgcccgaagtgagcaccttcctaacgggcatgcagacgcgccagttgctgcgaatcaacctggatgccaacgaagtgggcctcagcgataaggagcaggaagtgttgcggtacctgaaagaaaatgttttgacgaagcctttcgattgggagggcaacgaactggaaatatattgggcggccctgaagaagaaataa

SEQ ID NO: 28023 - protein, 345 aa, DROSOPHILA
MSQTLPATYVKGFHDEAKVRRMEYRNLGKTGLQVSKVSFGGGALCANYGFDLEEGIKTVHEAVKSGINYIDTAPWYGQGRSEEVLGLALKDVPRESYYIATKVARYELDYDKMFDFSAKKTRESVEKSLKLLGLDYVDVIQIHDIEFAKDLDIVINETLPTLEQLVKEGKARFIGVSAYPISVLKEFLTRTAGRLDTVLTYARYTLTDETLLEYLDFFKSQNLGVICAAAHALGLLTNAGPQPWHPASDEQKAIARKASEVCKERGVELGKLAMYYTMSGLPEVSTFLTGMQTRQLLRINLDANEVGLSDKEQEVLRYLKENVLTKPFDWEGNELEIYWAALKKK

SEQ ID NO: 28024 - DNA, 4257 bp, DROSOPHILA
aaagccttttcgcttgtgcaaatagccgtgccgctgcagagccacataaatatacatgtagccattggcaatcgggaacaggaccggatcgtatccggatcggcgataaggtcctccatcgctggaaccatctgataactgcgaaatatgtacgttaagtgtgcaattgattggattatgaccctttgctgtgcgtatggcattttatgggtcagtgatagacggcaaattgattttgttttggtttggtttcgttagcctctatttttggatgcgccattgccacctgttgctccgaattagttttgctgccgctgcactttgagcaggtggtgcaaatcgaatttaaaattgcattccgcgcgtgggaggtgtacaaatatcaagggaagagatactccgcatgttcaactgagatgcaacgagggaaggtacatttattcgttacaaaataagtagaaaattgtagatagacattgggacttgggtaataatatttaatcatttttaattaaaactgaaagtattttagggacaataaacaagtgcactgccttccataaaggcctgcttattgaccatcaactttttgcgctgccctcgccattttcgcctttttgtcgctcagattgctttgttatttgtcaaccatttattattgttcaaataaaacgtatccgccgcccatatggatcgtcgaaacacaattgatttatacgatgtgcaaaaggttgacagtcgtccctttactgtaaggaaattactgaactttaacaaccttctaaaacatttcaagattacaaatggcgagggtaatgactgaaaatgaatacaaagaatacgtctttagataactttaatgttaagagtctagttcaatttaaattaaattaaataaaatatgatttaaattggtgtgaaattgattttagttatacataggactattttacccgtcttacaaaaataaaccaaccattaataaatttttacataacatgcgttatacatgtttttatttggaggattaatattgtaatgagtatttaaggctaggcgtagtaactaaacaattacataactggaatgacaaaatctatagagctgtgagtagtatatgaacaattttgatagagctgcaagagctgagctgagttgcatacgaggcggccgcacgaggtgccactaaagcttggttaccctcaacaatcatatctaggctaaactatatcgattcaattcacataaattacctaagacgagtgtggctagagaaacgggtttggcaggcgaatcgagtgggttactcgatccgtatgaccccggctccgacaccaccactgtgtgcgcacatgggcggcataaaggtccatttgtcggtctccggatcgtacacctcgactgtagacaaatttgactcgccatcatagccgccgatggcccacagtttgcccatgttggcggccagagccacccgcgagcgtttgcaattcattggtgtcaccagcttccaggtgtccgtctgagggtcgtagcactctacggatcgaaggaatgagttgccgcagtagccgccgcacacgtatatctttccgttcagcgtggccacgcccagtctacagcgacgattcagcatgggcgacatcttaacccagacatcttcggcctggtcgtaccgctccaccgaatcgaatatggacaacccatcatgaccgccaagggcgtagacgtagccgttcaattgggtaactccaccagccgaacgatatttcatcatttgagcaaccttcgggtagtgaaattaaagttggatcagttttcttacccatctgggttacatagaatgtttgtttacttacagtcttccaagtgttagactttggatagtaaacttcaacggtgttgagcgacgtgacgccgtcgtagccgccgcacacatagatacaatcatccaatgcggccacgcccacggcgctgcgtttgcagagcatggcacagccctgggaccacttgtttttgcgcgggtcgtagacctcaacggtggacagacgttcggtgccattgaatccaccaaaggcgtacagcttgccattcagaacggccacacccacgcgagatctgtcgaaaaattggcaattagtatgggatagaatagaaataaatgctcctcgcacactcacctcatcatggacatttgttcgcccattttccattttttggtgagcggatcgtaaatctcgaccgtgctcacagattccccagtgctggccagtcctcccacggcgtatatttgtccggtaaagaactcaccggatctctggcgcgtgcgaaagctctgcagcagacccctgcgctcgggcatgaggtgaaagtccttggcctcgtctaggagatcacggcattggtgcgaggatcgaatgagttcctcgcgggccacacggtccgccaggaactgaggcgagagcaatggcaaacgcactgcagccaggacctgaggaaagagctcagagcgcttgtcttctgcgtacttgacccacttcatgcaggcctcgaagatgacctcctcggtgcgtacgttgagttcgtcccggcgcatcagctccagcaattgttcgcagtccagggcgagaaactcctccgactgcgagactttggcaaagttttgatcaatatacttgtcggcagcgtcgattagctgccggcagatcatggagtcggcgaaggtgcggattcccaggacattgtgcggatgaaagcgggagatcaggaaactggcacaggcatcccgcacgttggacaattgcaggaagctggcgcccaccatcaggttctgcacattctggttgtcgatgcgcacttggccgctgtaaacatagttgatcagactctccagggcacttggctctatggcgctctccttcatggtgatctccttgatccgactctctgccatgttgttggtgaacatcgcatagaaatacgggatggtggccgccagcacaacgcggtgcgctgagaaggtctgatcttcaacctgcaataattgggatggcattttatatttagacgctagataatgaacgtatctctgagctgcgggtgattgaatgccccagtctgcacgcaaacaacctttagggtgacatcgcacagcttgcccatcctgcggatttccttgaacagggggaaactctcgccgaatagcttatcatgcttgtaaacaaagtattgatcctccacttggctattatcactcaaatccatcactttaacggatcaagaaaatgataaacagtagagatgccaaatgttgcttgtactgcagagctagtggtggtcagtggtgagcggtcacattaatcgatagttgaggttccttcgatagttgaacaacaccaatagtagtgaaacaaatttattgaatcatattgtttaattttaaaggtaacgttcttggaccaaaatgtaatttcataatacttattaaaaagttgagccctttttatgcaacagtgataattaaatccttaaaaagcacatatttttaagacaatattattctttcatttaattttaattagtaatttttccgtttttgcgtcaccttcttaaaaaaagacgctcatcactaattgggcggtgatgacagccctatcagctgttagtgtggctggagtgttttcttcgctcggattgattaagggtccaaaaacattttcgagtaatctgggtcgcttgctaattggaaaaccactgatctgagttaagacataaatgtttggaccgctattaaatgcaaggatacgaaaatagcaagtaacatggaagccgcatcaccgagggaaacccaggtgagtaaaaaggtgtcgctagaattgatgatgacgtctcatcttgttatttgcatttgcagaagaacccgaatccgatcgaggcgctgagcaaagatgaaatcatcagcaaatacaaaggcctgctcaacatcgctaaaaaggcgaaacaggcaaaagatggtaagtttgatggagagtttcagggaatcttccagaataatgcaagccactctctttcagaactcaccgaggaaaatcaccgactcaaggatgcccttaaacgggcggcggagaagcagagcagcctgccagccatgcaggaaatggtccaggacttcaccgataagaacctcatcctcaccgaggaagtgaataatctgaaacgaaagaccaaagaggatgccgatcgactgacgcaattcga

SEQ ID NO: 28025 - DNA, 2122 bp, DROSOPHILA
tgagtgataatagccaagtggaggatcaatactttgtttacaagcatgataagctattcggcgagagtttccccctgttcaaggaaatccgcaggatgggcaagctgtgcgatgtcaccctaaaggttgtttgcgtgcagactggggcattcaatcacccgcagctcagagatacgttcattatctagcgtctaaatataaaatgccatcccaattattgcaggttgaagatcagaccttctcagcgcaccgcgttgtgctggcggccaccatcccgtatttctatgcgatgttcaccaacaacatggcagagagtcggatcaaggagatcaccatgaaggagagcgccatagagccaagtgccctggagagtctgatcaactatgtttacagcggccaagtgcgcatcgacaaccagaatgtgcagaacctgatggtgggcgccagcttcctgcaattgtccaacgtgcgggatgcctgtgccagtttcctgatctcccgctttcatccgcacaatgtcctgggaatccgcaccttcgccgactccatgatctgccggcagctaatcgacgctgccgacaagtatattgatcaaaactttgccaaagtctcgcagtcggaggagtttctcgccctggactgcgaacaattgctggagctgatgcgccgggacgaactcaacgtacgcaccgaggaggtcatcttcgaggcctgcatgaagtgggtcaagtacgcagaagacaagcgctctgagctctttcctcaggtcctggctgcagtgcgtttgccattgctctcgcctcagttcctggcggaccgtgtggcccgcgaggaactcattcgatcctcgcaccaatgccgtgatctcctagacgaggccaaggactttcacctcatgcccgagcgcaggggtctgctgcagagctttcgcacgcgccagagatccggtgagttctttaccggacaaatatacgccgtgggaggactggccagcactggggaatctgtgagcacggtcgagatttacgatccgctcaccaaaaaatggaaaatgggcgaacaaatgtccatgatgagatctcgcgtgggtgtggccgttctgaatggcaagctgtacgcctttggtggattcaatggcaccgaacgtctgtccaccgttgaggtctacgacccgcgcaaaaacaagtggtcccagggctgtgccatgctctgcaaacgcagcgccgtgggcgtggccgcattggatgattgtatctatgtgtgcggcggctacgacggcgtcacgtcgctcaacaccgttgaagtttactatccaaagtctaacacttggaagactgttgctcaaatgatgaaatatcgttcggctggtggagttacccaattgaacggctacgtctacgcccttggcggtcatgatgggttgtccatattcgattcggtggagcggtacgaccaggccgaagatgtctgggttaagatgtcgcccatgctgaatcgtcgctgtagactgggcgtggccacgctgaacggaaagatatacgtgtgcggcggctactgcggcaactcattccttcgatccgtagagtgctacgaccctcagacggacacctggaagctggtgacaccaatgaattgcaaacgctcgcgggtggctctggccgccaacatgggcaaactgtgggccatcggcggctatgatggcgagtcaaatttgtctacagtcgaggtgtacgatccggagaccgacaaatggacctttatgccgcccatgtgcgcacacagtggtggtgtcggagccggggtcatacggatcgagtaacccactcgattcgcctgccaaacccgtttctctagccacactcgtcttaggtaatttatgtgaattgaatcgatatagtttagcctagatatgattgttgagggtaaccaagctttagtggcacctcgtgcggccgcctcgtatgcaactcagctcagctcttgcagctctatcaaaattgttcatatactactcacagctctatagattttgtcattccagttatgtaattgtttagttactacgcctagccttaaatactcattacaatattaatcctccaaataaaaacatgtataacgc

SEQ ID NO: 28026 - protein, 538 aa, DROSOPHILA
MPSQLLQVEDQTFSAHRVVLAATIPYFYAMFTNNMAESRIKEITMKESAIEPSALESLINYVYSGQVRIDNQNVQNLMVGASFLQLSNVRDACASFLISRFHPHNVLGIRTFADSMICRQLIDAADKYIDQNFAKVSQSEEFLALDCEQLLELMRRDELNVRTEEVIFEACMKWVKYAEDKRSELFPQVLAAVRLPLLSPQFLADRVAREELIRSSHQCRDLLDEAKDFHLMPERRGLLQSFRTRQRSGEFFTGQIYAVGGLASTGESVSTVEIYDPLTKKWKMGEQMSMMRSRVGVAVLNGKLYAFGGFNGTERLSTVEVYDPRKNKWSQGCAMLCKRSAVGVAALDDCIYVCGGYDGVTSLNTVEVYYPKSNTWKTVAQMMKYRSAGGVTQLNGYVYALGGHDGLSIFDSVERYDQAEDVWVKMSPMLNRRCRLGVATLNGKIYVCGGYCGNSFLRSVECYDPQTDTWKLVTPMNCKRSRVALAANMGKLWAIGGYDGESNLSTVEVYDPETDKWTFMPPMCAHSGGVGAGVIRIE

SEQ ID NO: 28027 - DNA, 3441 bp, DROSOPHILA
acgagaaggctgagtaagcagcaaaaatttcttcatcatgccgcagggcgtcaggagtcacaaaagttttgcccttcgctgatcaactatgaaaatgtcctgtaaggattgtaaaaactacgaaatagttactttgttgctttcacaggggaaaaggtatgaataaatgtggttgggggacaagaaaaattatcaatcaatagtctgataacaaaaggaaaaaggggttatttgttaaattaatttaatgaatagcaaagattttataggaaaagttttcctacaagtttctgccaggtcatccagaatttattgtttattagcacgacagaaatgtaaaggaaaagtcgttgaaagccttaattaaggtgtaatgaaattcaataaagtctttgacacaccaaatgaagatatatttgtatatatgttaaacagtgcagaaataatttcacatgaataagactgatttaattaagaaagcatttccctcgttaaaccaaatcaaaattaattgcctttggatgcaacagtaaagtgaatgtaaaagctgaaattggaggcattaccaaagtttttcgccagcacacgtacaaagtagagttaaattacattttattttccgttctgaatgccacgttttaggtgtttcaatgaaaatatttccttaactcacacaaatttcgcataaatttagcatgcactttgaaactgaagcgaaactcgcactgtacaagttcttcgggaatattagtactcagagtaataatgatttctccaattttatttggattggtcaaagcccttatggtttgaaagaaaagtttaaaaatttgaagatttttagaattagttaccgtcgaaattttgtgatcaggttggccgggagaagtccagcttactgtaagcctttgatcaaagcgcatgagcgagaaaagtggaggacaggatgaggaggcagcccctagattagtggtttttaaggagcggagattgggtcgaaatgagggagattgtcacactgcagatcggcggagccggaaatgccatcggagattctgtgggtataccaggtgatataggtgatgtgctaagtgttcaactttttctagttctggcacgtgatttcacatgaacacggtgtggattatgcttctggtcgatttggcggcaccagtccacttcagctggagcggatcaatgtgttctttaacgcaacggccagcaaacggttctatgcccgcaccatactgatagacacggaagccagcaccattcagcgtctcaacgccagcagtcagctgtataggccggagaactttgtggctggatcggagagtgctgggaacaactttgcacgtggctatcatacggatggtgccgccattctagatcaggtgctagaaaatacgcgccgggaggtcgaatcggtggattcgttgcagggctttcagttgctccactctatcggaggcggaactggctccggcttgacctctctaataatggaggccctggtggagcagtatccggataatttactctgcaactatgtgaccattccgtcgccgaatatgtcgcaggtggttgtggaaccctataatgccctacttagtactcccgccttggttaacaattcgcatttaaccttctgccttgataacgaggcactgttccaaatctgcaatagaaacctgaagctcaagatgtccggctacgagcacattaaccacatagtagccctgaccatgtcgggtataaccacttgcctgcggtttcctggccaactgaatgctggattgcgcaagatctatgtaaatatggtgccattcccgcggctgcacttcctcataccgggattcgcaccattggtcacttgcaagcagcagcagttcagcaagggtaccgtttcggagctggtgcagcagatcttctacagtaataatctgctctgtgccatcgatcttcgaaagggcaaactgctgaccgctgctggaattttccgaggaagaatgtcaccgcgtgaggtggatcaactgatgactggggtgagaaataagaatatcaacaatttcgtggactggatacccaacaatatcaagacggctatttgcgatataccgccgaggggcctcaagatgtcagctacattcattggcaacacaacggcgattcagacgctgttccagcgattactggacgcttccatgtccatgttgcggcgcaaggcccatcttcactggtacacgggagagggaatggaggaacaggagttccaggatgcgcagcaggagttacaagccatcatcgatgattaccgcagtagtgctgagggcgaggattccggtggtggcggtggaggaggcggtggccgaagtggaagcgccgaaagcggtgaagaggaggccacgcccgaagcccattgtcaatattgcaccgaataatattccttccacatttaattcagagagatagttatcagggttcaccaaattcaaaagtgttcatttgtaattacgcgtcttggaatcaggacatatttcgagtagaaaaatatatattttaggtatatgtgtcatttgtttttgaaaagttataaatttggccaccgaatgctttcgcattatattctccagtactttttcccatgtttaaaatgcatttggggtaacaaaactaaaaagaagaaaaagaaaaactatcctatctgaaatttttggtggacctacatgttttatacctgaacgtgtgtgtttagcctggcgtgtatatatatgttcgtttgctatctaaatattttgttttggcagtgcaaaagttttgccagcctgccaggacctgggatcctgggcgttctacaaccacacgggccagcccccacatttttgtaatgcaaaaagtatttacaatttgcaaggcagccagttgggtcctgctgtatgcatgtcctgtgaacggtaccctttcagattgcggggtttggcctaataggtttttgttaattttggggattttacttgaaaggcgctcggcaaaaggattttacacatgttgccgcttttacctaagcgctttcactgttgcatgttttcgttattattattttcttcctgttgcaatggactgcctgaagactgccttgctaaaggttagcaggatgcaacaaggatatgtggaaattgcataagctttataataaaacgctccactcgacgtgaaggatataacacagagcagtgggcagggcaacacgaaaggttggataacatctaaatagaaaagttgcccaggtcaaaggtgattctcaggcagttttagggcacaaacttttccactcctatgagaaaagttctgacccacacagagacagactaaaaggatatttgagactgctggcaaacttacattagatggctcagtattcagctcgttgttggtttgtta

SEQ ID NO: 28028 - DNA, 1389 bp, DROSOPHILA
atgagggagattgtcacactgcagatcggcggagccggaaatgccatcggagattctttctggcacgtgatttcacatgaacacggtgtggattatgcttctggtcgatttggcggcaccagtccacttcagctggagcggatcaatgtgttctttaacgcaacggccagcaaacggttctatgcccgcaccatactgatagacacggaagccagcaccattcagcgtctcaacgccagcagtcagctgtataggccggagaactttgtggctggatcggagagtgctgggaacaactttgcacgtggctatcatacggatggtgccgccattctagatcaggtgctagaaaatacgcgccgggaggtcgaatcggtggattcgttgcagggctttcagttgctccactctatcggaggcggaactggctccggcttgacctctctaataatggaggccctggtggagcagtatccggataatttactctgcaactatgtgaccattccgtcgccgaatatgtcgcaggtggttgtggaaccctataatgccctacttagtactcccgccttggttaacaattcgcatttaaccttctgccttgataacgaggcactgttccaaatctgcaatagaaacctgaagctcaagatgtccggctacgagcacattaaccacatagtagccctgaccatgtcgggtataaccacttgcctgcggtttcctggccaactgaatgctggattgcgcaagatctatgtaaatatggtgccattcccgcggctgcacttcctcataccgggattcgcaccattggtcacttgcaagcagcagcagttcagcaagggtaccgtttcggagctggtgcagcagatcttctacagtaataatctgctctgtgccatcgatcttcgaaagggcaaactgctgaccgctgctggaattttccgaggaagaatgtcaccgcgtgaggtggatcaactgatgactggggtgagaaataagaatatcaacaatttcgtggactggatacccaacaatatcaagacggctatttgcgatataccgccgaggggcctcaagatgtcagctacattcattggcaacacaacggcgattcagacgctgttccagcgattactggacgcttccatgtccatgttgcggcgcaaggcccatcttcactggtacacgggagagggaatggaggaacaggagttccaggatgcgcagcaggagttacaagccatcatcgatgattaccgcagtagtgctgagggcgaggattccggtggtggcggtggaggaggcggtggccgaagtggaagcgccgaaagcggtgaagaggaggccacgcccgaagcccattgtcaatattgcaccgaataa

SEQ ID NO: 28029 - protein, 462 aa, DROSOPHILA
MREIVTLQIGGAGNAIGDSFWHVISHEHGVDYASGRFGGTSPLQLERINVFFNATASKRFYARTILIDTEASTIQRLNASSQLYRPENFVAGSESAGNNFARGYHTDGAAILDQVLENTRREVESVDSLQGFQLLHSIGGGTGSGLTSLIMEALVEQYPDNLLCNYVTIPSPNMSQVVVEPYNALLSTPALVNNSHLTFCLDNEALFQICNRNLKLKMSGYEHINHIVALTMSGITTCLRFPGQLNAGLRKIYVNMVPFPRLHFLIPGFAPLVTCKQQQFSKGTVSELVQQIFYSNNLLCAIDLRKGKLLTAAGIFRGRMSPREVDQLMTGVRNKNINNFVDWIPNNIKTAICDIPPRGLKMSATFIGNTTAIQTLFQRLLDASMSMLRRKAHLHWYTGEGMEEQEFQDAQQELQAIIDDYRSSAEGEDSGGGGGGGGGRSGSAESGEEEATPEAHCQYCTE

SEQ ID NO: 28030 - DNA, 5781 bp, DROSOPHILA
ttgtgaaacgtaacgagattacaaaaggaattccagttccagatttctaaattagttttgattcgcgaaatagaaaacgtgcacagttgattttatcataacttgaagcgcgaaattcacatttgcataaccagaagaagcgcgtccgaggcgattatataattgcagtgtatttcgattgagcaagagcatctccaacttcagctgcacaatgacgggttacaaggtggccaatggcaatggacacagcaatggaaatggaaacacgaagggaacaaatggaaccaatggacacagcaatggacacaagtcggcggactacaccgcccaggagaatcccacgtaagtggggagagttgttggttcgaagttcgagccgacataaaaagggggtattatatcggaggccctcacgccagcggctcgttaactacaatcagctttaattgaaacttccaatagttctggcttcaatgcttcgcggcttcgccttaaccccactgcactgcaccacctgtccttctgcacgcccctctcccttccttccatgctaaagcttttgtgacccgcttttcaaggggccaaatcgatatggccttggctatccagtaggccctgccagtagcctcactctatgactgaatcagtcatttaggaaactcgcttcggcctacaggaaaccaaattcaggcacagactccatccaaaattcgctgcctagtacgtagttgtaagggctaagacctccaactaacccgcagaatgtgctcccgcgactgttgctccggaccaggtggctccaatcgaggcaacacttgctcggacaagaagggcgccaaggccggcagtctcactggcgagaagatcatacccactccacagagcctgctgtaagttgattttggtgtccaattaggcctatccttagctgtcagtctggttcgttcgttcgttcgatacccaaaaactatatccctcggccccaaaatgtgtaacgccaattgctgttcgaatcccaaaggcaaggctggcaccaaaaccgccatcaataatacaaattggccagatatcataccaactccagaaagtctgctgtaagtccaaactttgtttacttcgggcaatctaaatcaaaattcaagtgacggagctggatcgtgtccttgatctttccgccgctatcaagaaacgagctcaacttagatctcttgaatttgaatatagacattccagtattccaggcttatcaattttcgtcagtcgacgctggctactcattaaaatcccattcgaagaatctttaatctgcatatgattatatggagtggtttcgcctaggtagaaatacacagtagaaaacgtatatgtattcgaaagagtcaagtgttcaggaaatatttttttaattaactaatttcctcattattttagagttaatatttttagagcacgttttaagcagctgggcgctcttcagagtgccttgttttaattatttatattttctctgtgtaccaaacattttgctgataaaaaagccaagattgccaactgcttatgtaagtgtttaatggccaagttaactgggaaatcggctcccgctgattggctgcgcaaaacgggtgtgttccctgatcttgacataggcctccacttcgtaatctttgcctcagatacgggtaattggccaatggttcgataaagaacgcaactaaaacatgttgccgcattgattaatttcgaaactagtttccattccgatggaatcacaatgctgaatattgatgaagcggcgaaaaagccgcgtcgcgtgtttagatcaaatttccataaatgtctggctactgaaagaccaatttattaaggaattgtgaataaagttcccaattagtgcaagttatgcgtgattatatgttcccgtcttaatgacgcactttatgtttactgttcgaaggccagcttttgttttttccatgtaatactgataatgcttagcatcgtctcatgcccggcttatcaaatcatttgaactgatccgaaaacaaacacgtgggaggtcgtgagttcagttttggtaacaacatcttaacataactcgacttgcagttcaagttcgagcaatttaacccagaaccaggtgaattctttatggctctaatagcacttaattgctgttttcaagttactcgataatagcaagcgagtcatgacaatgttaccacattcttttgattgccaagaaaaaccataaatgatagggggtccttatctggatgccttcatatccgtttatcacaaacctttgccaacctactcagcaacaaatcttttccacaattgcagcggaaatggaaaaatccaatgcgagcttacgcacgaagagctaagagcccttcgggttctcaacgaagacacgtttgtagaccaattcttctgagttctgtttctctgtgttcaattgtcatttactttattattaaaatacatgtattcacagtactgtgattggcataaggctgataagaatcttcaagaagacactttcagttcttcaaagatattcttatccataaattcgatttttgtttttgtcctttttaagaatatctatgtaattcgataatgaattcatgtgtccatgatctctaaagtttttagtcttctgagttctcactgtataatatttgtgttgttttcttatcatatcatcgaactgattgtacataaatgaattatttgttttgataaaacttcgattggtgaattgaatctaattatattcctgtgtgtggaacttcatcaattggtaaatgtatcttttttgttccctctgggaattccattcttcatttcattgtttaccatcgtggcgagtagataaaaaggatctctggcctgttaacatgtacccacccaaatttatcgcagttcactcgtatattgtttacacttttattagttcaaagatcaccctgcaatactcacccaaacaagatgtaaaactaattttggttttcgacaggtatccctatgaggtcatcgaggagatcgccgacttcattaccaaggggtccggcatgcgccccaagatcggcatcatctgcggctctgggctaggctcattggccgatatgatccaggacccgaagatcttcgagtatgagaagatccccaacttcccggtatctacagttgagggccatgccggacgactggtggtcggcacactcgagggcgccactgtgatggcgatgcagggcaggttccacttctacgagggctatccgctggccaagtgctcaatgccggttcgcgtgatgaagctgtgcggtgtggaatacctgttcgccaccaatgcggctggtggaatcaatccacggttcgcggtgggcgacatcatgctgatgcatgaccatgtcaacatgctgggctttgccggaaattctccgctccagggacccaatgacccacgcttcggaccccgctttcccgccctggtgaactcgtacaacaaggacctaatcaacaaggccatcgagatcgccaaggccatgggcatagagtccaacattcacgtcggcgtatactcctgtctgggtggtcccaactacgagaccatcgccgagctgaaggccctgcgcatgatgggcgtggatgcggtgggcatgtccaccgtacatgaggtcatcactgcacggcactgcgacatgaaggtattcgccttcagcctcatcacaaataagtgcgccaccgagtacagcgataagaaggacgatgaggccaaccacgatgaggtgagttcctagagtcctactagttgattaaattaagccactaactttcatgtttatcaccatctaggttatggctgtggccaagaacaggcaaaaggcctgctgcgaactggtctcccgactcatccgggaaatccacttggcatccgcttaagtagcgaagcgaagaagtagcgttggattctaaatttaaaaatagttaattctctgagctcgcatctaagactcacatgacacggattgtccaaaatcttacagtataggcctagggaatagtttaactaaattatgtaaaataaactagctatatcacaatttcagcacattttgtttgttgttgggtaaacttttaaaaaagtctacgatttgattgcatacttttgcgcggcgaacagaaattccagaacagttcaaggtgatcattcccctggtcacccaaataaaaaaaaacccaacggaaagttaaaatataatgaaatgttatttaataaaaattaaatatgcgcaataatttttaacatattataaacacaaatacatagttataaaattagggaaataaagctaacattaaaatgatttcgaattgaaaacaatgacataacgagagagctcgttggctttttggtgtttgcagagattgaacaaatgcaatttcgttaaatcgataaaatattaaataaaataatggtaaaacaactcaacttaatattatgtacaggtatacgatataatagaagaactccaaactccgcacagctaccgaatgaagcgagttgaaatttattgcctggcatcgtgcacttgcatagtagtcgttacatatataaaggctatgtaatatgtgtaaaatagagagtacatagggatatgcgcacgtgtgtatatgatatactaaataggcctatagaatacgatagttcagatctgtgtctgtgtccgttgcaaaagcatcgccgcctacaaaaagtgcttataaaagtgcttggtttgtgttttgtgattgtgttcaagtctataaagttgcattgtgcctgcctctctcctaaaacagccctcgctccttcttcagcttggtctgtttccagatgggcagctgctcgaattccgcccggctgcatcccagtgccgcctggaagtcctccgcattaaggtagacctccaggcgggtgggctccacaccttcgggcagcggtcgggctttcaggacttccaggggatactcggtctgcgtcatttgtgccagcattgtggcgatcgatatggaagcatcagttcgcccatcctgcagggggaacaaaaacaataaatattctgcatatcatttgctacttcccaacttacttcttcgttgatttctcttacatccggacgttctgtccagtcgggaaacagcgccttaaaggccagtggctccaggcctgcccacacaacctggcctttgatgccatggaagggttcattctcgttctcgccgtgcttggcacgccaatagtcaacggctgtctcgagggcagcacgtctctctgagatccagcgatttactccagcgcgattttcgttggtgggactgcttcgctcatcggtgtttactatgagaaaagtaaaaaggttaattactatccaaacgcatcgttgactatacagtacgtactcttcacatcttccagaggccaccatcccatccagagccacaactcatcgccgtcgtccagcaaaaagatagtcggctgccttgcattgtacagctgcgactggctgaagggatacggactatgcagatcctggcagcgcagcggatcgctcagttcgagggctttgaaaacaccctgagtgctggagaagttgaagatccttatttggtaatcgaacgacttggtggacttaagcaggctgccatattcatttctttcatccttcaatcccagggccttcttgcactgatcgtcgtcggaaccctcctccacctcagttaggttggcagttt

SEQ ID NO: 28031 - DNA, 1786 bp, DROSOPHILA
attgctgttcgaatcccaaaggcaaggctggcaccaaaaccgccatcaataatacaaattggccagatatcataccaactccagaaagtctgctgtatccctatgaggtcatcgaggagatcgccgacttcattaccaaggggtccggcatgcgccccaagatcggcatcatctgcggctctgggctaggctcattggccgatatgatccaggacccgaagatcttcgagtatgagaagatccccaacttcccggtatctacagttgagggccatgccggacgactggtggtcggcacactcgagggcgccactgtgatggcgatgcagggcaggttccacttctacgagggctatccgctggccaagtgctcaatgccggttcgcgtgatgaagctgtgcggtgtggaatacctgttcgccaccaatgcggctggtggaatcaatccacggttcgcggtgggcgacatcatgctgatgcatgaccatgtcaacatgctgggctttgccggaaattctccgctccagggacccaatgacccacgcttcggaccccgctttcccgccctggtgaactcgtacaacaaggacctaatcaacaaggccatcgagatcgccaaggccatgggcatagagtccaacattcacgtcggcgtatactcctgtctgggtggtcccaactacgagaccatcgccgagctgaaggccctgcgcatgatgggcgtggatgcggtgggcatgtccaccgtacatgaggtcatcactgcacggcactgcgacatgaaggtattcgccttcagcctcatcacaaataagtgcgccaccgagtacagcgataagaaggacgatgaggccaaccacgatgaggttatggctgtggccaagaacaggcaaaaggcctgctgcgaactggtctcccgactcatccgggaaatccacttggcatccgcttaagtagcgaagcgaagaagtagcgttggattctaaatttaaaaatagttaattctctgagctcgcatctaagactcacatgacacggattgtccaaaatcttacagtataggcctagggaatagtttaactaaattatgtaaaataaactagctatatcacaatttcagcacattttgtttgttgttgggtaaacttttaaaaaagtctacgatttgattgcatacttttgcgcggcgaacagaaattccagaacagttcaaggtgatcattcccctggtcacccaaataaaaaaaaacccaacggaaagttaaaatataatgaaatgttatttaataaaaattaaatatgcgcaataatttttaacatattataaacacaaatacatagttataaaattagggaaataaagctaacattaaaatgatttcgaattgaaaacaatgacataacgagagagctcgttggctttttggtgtttgcagagattgaacaaatgcaatttcgttaaatcgataaaatattaaataaaataatggtaaaacaactcaacttaatattatgtacaggtatacgatataatagaagaactccaaactccgcacagctaccgaatgaagcgagttgaaatttattgcctggcatcgtgcacttgcatagtagtcgttacatatataaaggctatgtaatatgtgtaaaatagagagtacatagggatatgcgcacgtgtgtatatgatatactaaataggcctatagaatacgatagttcagatctgtgtctgtgtccgttgcaaaagcatcgccgcctacaaaaagtgcttataaaagtgctt

SEQ ID NO: 28032 - protein, 267 aa, DROSOPHILA
MRPKIGIICGSGLGSLADMIQDPKIFEYEKIPNFPVSTVEGHAGRLVVGTLEGATVMAMQGRFHFYEGYPLAKCSMPVRVMKLCGVEYLFATNAAGGINPRFAVGDIMLMHDHVNMLGFAGNSPLQGPNDPRFGPRFPALVNSYNKDLINKAIEIAKAMGIESNIHVGVYSCLGGPNYETIAELKALRMMGVDAVGMSTVHEVITARHCDMKVFAFSLITNKCATEYSDKKDDEANHDEVMAVAKNRQKACCELVSRLIREIHLASA

SEQ ID NO: 28033 - DNA, 19177 bp, DROSOPHILA
actagggtttaacaaatcacctgaaacatacatatatacatatatacaatatatctccctatatatagcctcacctgacgcgttgtttacagcacttacgaatgaaaataaacgcatttcaagctaattaaacaataaaagcgcaaaggggcaccatcgccctccccccaaaaagcaaatgaaataacaaagcaaataaaaatggaggcgggcgtcaggatgttcgggtaattcagcaaataaaagtgcacggcattggcattagtcggtgggcgttgcctgcggggtgggcgtggcatttcgccccaccacccactactcgccacccacctgccaccacccacctgccgcctctctgacagctgacaaactcgcgagcgtgaaacgccggagcgcacaaaagtaggcaacaaagacggcagcgatgcgatgtgatgcgattgcaacgatggtgacgacgtggcacaatgatgttgcaatttaatttgtattgtcggcgggaatggaatggtagggtatggtgatagtgatggagatggagatggaaacgcgaatgggaatggaatggttgccaccgaaacaattgcactgacggcaaagaaaatgccagctctggtgatgatcacgctgacgatgatgagaatggcaatggccatgccgcgtctgatgaatccacttagatgtcgggcgcctggcaacgacagcagcagcagcagcagaaacaccagcttgcaacaccaaagcagcagccagagtgtcgcttaattgaacagacaaaggacaaagtgacaggcaaatacaaagctggcaccaactacacgtggatatggaactgtgttttttagcatgttaactacacaaactgcaaattaaattggcttaaaaaacaccaccaatttgggatggatttgattatacatggaaattatttaactcatttgataagctaatgaagctaaagttagattacagacaccagattccaaaaacagagtcatttaaatttcatacttcttgtatttctaaataatattgattttttaatgcctgtcggctacacaaattgacttctgatgccggattgcaattgggcaaagaaaatgatggaaatgttaatccagtcaggcacgtggcacagtaaaaggcaggctgagttaatcgcggcaccagcgcttcgagggcggctcctcgtctgtggaggcgatggattgaagcagcttggagtcagtgtgcccgccgaagagggtcaacaacagggaaacgccgtatccagtggcacgctccccctgaaacagaaccgaaatcatattaaatacgcagggaaataattataaaacggatatagcagtcgaatcgaatcacttacacaatgaacgggcgtggccatatcgacgtgcatccagatgccgggataatcgaagccaagatgggcggcaatgaaaaggcctgcgcaggaggattgggcgttctgacgatcctgcaaaggcggaagcgaaatctcagttagacatggtgacatatacgctcggatgtacatatgtgtgtgtatattcctttatggaatgcattctcttggtgtgcatgaggatgtgatgtgctgcatgcaacaagcaaaacttggcggcgctttattaaaaaagcgtcctgtggtgcagcgcaacaagaaaatatatttatagagatagatgacaaacgagggtggcttgaaaacaaagttatgttgcttaaatttaaaaatatttgtacttattaaaaaggcaacatcattatacacctcttcctcgatatttcgaacagataggttaagttatgttaagcagaaaggcatattatttagtatttattttgtaactctgtattacctttgaaacgcccttcgctagctgtaagcctgggtgtgctaatgcctaaattatatgccatgcactggcagctgcgtagcggaagcagtcgctctactaacttgagcggaaattgcagcgcttaaatgccaaacataaagtacactttgaacatgcacacacactcacacacagacagttgggaccgaccggccaaataaaggacgaaccaacgcacacatgcgaacactctgctgacagttggccaaaaaaaaggagttaactggcagacttcagcagcaggagccacggaattgagcggacagcaggacgacaggacgagcggacaactcggggatgcagtgctgcgaaaattacatgacaacgcgttcagttcctcctcaagatgaaaatcacacacacacacacacacacacattcgccgggggacgtgcaaacatcgtacgtcgagaagcggaagtcaaaagtccattgaagcaacagagccatgaaccaagtgcccaaaaacccagagccagacttgaagaatgaagtctgaatttgaagactgcctctcacacataaaaaaatattttcacaattgaaaactggaacttggaagcaataaaatctcaattaaaaataggtattttatgctaggtataagagattcttatctgaaatcaacaaatttgcatttacactctttacagaaatatcgttcctgaatttctctcagtgcagcaattgttccagtttctgttgttcctgccgctgctgacgaaactgcatttcatctcctaacagtggcggtactgcttttggcggttttgcagctaataaccagcttttgttatgaaacttgcggctgaagctgctatggccgatggtgcacatagccggcatgtcttggccgcttcagttcggtttgatttgcctgaagtgtgtgctggcaaaacttttcaaacgcaatgcttcccaatgaaccaatttagtgaatggcaaacgaaagtggtaagccgcagagttgctgttgcactttaaagccaagcatgagattctaattgtcttgaaaagtttctagaacattaaataatcagatttaagcaatctgcttattaatctctcattttcttaaagcttatttaaaagcatttcatgcacccccagcgacatgttcctataacattcgggcaaatcaagatgggattacgcgcaaataggaaaggtcaacaaggttgcgatgttactgcggcgctaattaaatgtttaacctttgccgagcctgatcagagcactcacgcacatgtcatggcattcagcagcccgaatcgaatccagtcgaatcgagtcggcctttcatcaataatggcaaacatttgtcaacataatgtcattaacattgattgcattagacccgtcctgattgtctgtatgtgcgtgtgtgagcccgatgatgtgagtttgtatctgactaggccttttgtaaataacgaagcaacatccccacatattcacgcacccgacccaaaatctccaccagagtttgacaatgggtcgccgactaattgcggtttagaacgtgaccattcgaggaccgccctgtggcgtttaccccggccaaaatatacgacggtccagaccaacaccatacgtatacgcacattcgcatcctaaatatccgcatttgcgattaacttgaattgaaattagccagcgacattgtctcacactcgaagcagtgtttagtgatatgcgatctgcgataactgccaatatgtatgaatgccgcgggtattgcgagattacatcggtgaccgattcacgccccgcggcatcaagcagttgggagtatcaattacgcattcattcaataatcgggacgagcagtgaaaaggatttggaatcgatgccatcgactggtttcgctgacggcggctacagtttttattcaatttgctcgatgtcgcagctagcgctttaaaaaactttccagccgcaggaaagagagcacaaaaaatgtatatttatatacatatatactttcatgccaaaagagaattctataggggaaaaggaaaatattagaaaactctggtgatgcccagctatgattttgaacagctttagacaaatttgtaaaatatttaatcctagaatgtttgaactcaaaacgaatggtaggtacatctatatttttaaaagccccctactttttacgatatgtgccgattttagtgtaagcttttcgcatctctggcgttggagaaagttaaacggaaaccgaggaataacaagcggaaagatttgtgttgacaaagtcggcgccccttcaagtaggcaacggaaatggggatcatttcgcaaattacgtgacttgctacccccacccaccatttttttgaaatagccggcgaaaaatctccatggaaaactccgcatttggaccactgagcttgggctttatttataaactgctgcggctggctttaatcaaaaaacttaaccccggctaagcataaccgcaacaacgacgaaacactcggcgcctggaggtcgtgccgtaaaaaacttttgccgcataaaaagttcaatttaattcattaaaacacgtaaaaagtcgccgtacaattgaatttaaaatgtcgacgcccaataaaaatgaactgaaagggggaggagggtcgaaaaacaaaaacaattacgcatacgccgcgtgtgcggccaagagactgcaacacgttgctgccacggaatgggtttatctaaaattcatgccccgccgcgccaaggaaaacgggaagcagctttttacgatttaacataaaaatcaattaccaacaatgggaaaatttcacagtcataaaacgtcgagtaactttcgacttagattcctgtgtgcgacgacgtcgggaaattgagaaacaattggaaatgtttaagcaaattttattgtctcgtcgccgtgttgcttatgttttacttatgacaccgcaccgtggagtccatccaccacgaatatcctgccagctaagaaagccgcagacaacagaagcctgcgagtctgatttactccaaggaagccagccagttgaatggatgaatagatggatgggtggatggatggtttctaggtcggaccgtcgtgtctcagggtcataaagttgtcgaaatttgggataatattatttttatttctctcactttctgtttgcctctgttcagtgaattggaagagagaatttggttttaaaaagcaaacggcctaaagcttaaaggcaactgaaaagttatttgctgactattgaaatttaatgagcagttattactcagtcgatactacgcaaatttgggttcataaaaaattaataaagttgccctagagctttctattatattttattcattccttacgttacatatgatttttttaaataaattcaaattgaatggtctaaattgcgtatagaatgagctcaaatactttatactatattattgcagttattgcaaaaaaaaatacaataatgtttattgccataattaaaacgctgaagctggcagcacattgacagagccaaaccacagacagactattgggaaaatggcaatttaaaagtggtcaccgaacaaaccgaccatccaccgccatcgattcctgcagtttgacccaaaaaagcgagaacctcctaattaccggcttaaatggtttcgcttaattcgcgaatatgctgcatgttttaaacgagcatacagatcccttctgacagccaatagccgcagatatcaccacgcaccatggggatcacacaactcgaaaagggcgtaaaacaaatgggaatcctttatttaaggacagcggcaaacaaagggatgggatgggggatcatcacctgcgcagatgaccatctgaccaccagatgctcgtgctcgtgctggtgcttgccaaaatgagctgaatagagccgcagactgaaaaccaaagccagcggccaacaaagcgccctagcgaccgctaacaacactcataatccccccatttagtggcaaactaggggaaaagacacccaaaagaccggaaaaaaatcaaaaaaaaagagaatacggctggcataggtgggtgtggaacgcaaaaagctagctcatgtaatttaaacgctgcgcgtgggaatttgcctcaaaagccagaaaaaatgcgacgacgctgatgggtggtaatggtagtgatggcttggctggcatttcacctttttcgcatttaacgttgaatgcatttggaatttaaaacactttatcacagacaccattgacaaagtgcgcggcgctgtcacatcaactgcagcacggggggcatcaaagggttaagggtgtgtatgtgtgcgtgtggcatggccatcctgcaatggtgtgatattttgacttgattcccatttttttcaaactgcgagatagagcagcctgacgaaaaatcaaacagccaacttgcaaaaacgacacagaggaaatactctttgccaaacttaacaattatgcgggtaaaattgagaattttacgtgcaactaacaaagttcaaaaatttcaacaaggttgcaagcctttaaattaaaccacagctgataattagatgaaatacaactaatatgaaatgatattcattaaagttatagcagctcttataaattttaaaatctatatgtatattcacggcgctttgatttacttttctcacagtgtacttatcgaaaggtggcagcgtgggcgattggcaggtagccaaaattgccacgccacttgacctgctccgcatctacgcaccaacctggcaaccaaccagacagacagtcagccagtcagccagccagtcagttcctgtccgctcctggcacctcaccacacgacaatcacaaactccaagccgccctcctatccacctagaacccccaattcatccgccgcccaatccgcccacggcgtgacaatgatgaatgaccattgatccgaggcgcttgcgacgtacaataaggtaactcgatttggttggttgttgtggcagggactggaaccgaaccaaactgaaccaaaccgaatggagcaggagagtcccggggcgacgacgcacctcgctccggtgcggccagtgcccagagatgggccagagatgggtttatggctcacctagtgccatcgcagtccaccctcgccactctgcagcattcctgtccaggattctctggctctggctctggctctgactggcctttctaatggctgcgaaagtggctggtggcgtagattgaacgccaaagtttttgatacatgcgaatgtcggagggtgcggtgtgtgtgtgtgtgtgtgtgtgtgtgtgtgtgtgtgtacggcataaatcagagtaatactaatcaatctttaaaccaaacatgacgttcatcatttttccacaacggtgcggtcgagtgtaagacaaaagaacaacattgagtgcaagcgataaagttaattaaaaatgtgtgtaaaatatctccggagagtgcaaaaggcactggatttcgatgtgtgcctgtggatgtggaaaagcgcaagatgaaaatgaattgaaaacaaatgaataaagttacaccaaaacttgattgaaactttctcaaagtcattcgctttctatcgaataatgcggaccggccgaaaaagttcaccacagcacggttgtcttcgataatgcataaattaagttacttttgggcattgattacggtgcagaccgctgttaatctaagcttctgtctgccacaaaagaaggtaaggtgtacctggagataccacaaacgctgatagtttggatagtatagacaaaaagctacaacctactggtaaaaatttctgaaaataaaagtttaacataaaatttaaaccataaaaaacatacaagttgcactcgtaaattttctacataatgaataaatccgcatttaattttagatggaaaagtgctaacatccaaaacgttttcccctatcagttagcacttggaaagtttttaaatggtgcaagaaaagtacttaccgccaccgagtttttcatatcagcaatggccgaagcgaattccgagaaatgcaattcggggcaataaattatgggtgccaataaatcgccagatttgcgtccagcctgcaacgactttgcctcccatgtctccgagtttgtcaatatggcaccatgatatttgcctgttgcaacgccctggaacgagaataaggtggcatatatatgcatggtaaaaaatagtaaatgaaatattcaaggacctgctgttcgggggttatatgcttaagaatgggtttcgcacccaccggggaacgtttgatagaaaacaagcaacaatcaacaaaatgccagcaataaaactgtacaccaactaacaatgttagggcaaagacaaagggggttagcgggtataaagggataagggggcaagggctgccgagcagagggtgcacgaaaattgcgagcttccgacgcggctggcaataaaaaggtgcaaggttatttagcacgagcaacacccaaacaagaggcaagtactctgtggcgcgtgttgcacggctgctggacaaatgaaggcagcgccaggagcggcaacaaagcactggcagcactgccaggagcaacagcagcagcaatacactgcgaaaaaaataaaagaactgcctacatttgaagcatttgaatatagctctacctttatgttccctatatctctcatatatcgatataacttttcaaaactgcagtttttatatatctagcatttcattccacttatatgaaagcctaagagtttctcccagtgcatccagtagccgtcacagagcagaaaacaactgcaaaaggtgtaacaaggcagcaggaacataaaatgtaaaagcgaaaaagtgttgcctgcctgctttttgttcttgcaacaacagcggcagtggcagtggcagttgccccaatgctggcaattaatattattgcatcccgtctaggtgtgtgtctgggtgtaatgaaattaagcacaacaagcgaaccaaaaacgaaccaaattccgaacaaaaatggcaaaacgtggcaatgtttagagacgagcggcggagcggctcgatggcttgtgccacttttaggctgggtaaccaaaggcatttcgctgcgaacaatgcagcttttgggacgggcggatggttgaatgaaaataataataaaaaaaagagcccagatgccacgccccctctgaccagtttcgatttatttcccatcgaaccacaaataacgtaaattggcatcatattttaagcaaattgcagtcaagatttatggtaattgtgcgccatcgcagcagctactcacttgcttccccccattcgccgccccctttccgctgcaatggttagcgaaaccccagcccaccgcccactgccacgccccacaccaccacatcgatgcaacccgaaagcgaccacaaacggcgaatccttcgctgttgttggtctgccaatgctggcgctgctattcctccaagttttccagcgaaaaccaaatttgcaatttatttttccaattaacctcgtgacttttataaagcgtggcataaattctcgcataacaaggcagcggagccagtacatccaaggccaccacccagccatttccccagttacctgccgcaaagatccctcgaaaccgaaattaccttggacaccggcaacatcatttgctgcctgcattagtggcaaaaatgtgaattcaatcccagtgaattgttgcctttaatgcgattaaaagtgacagaaaggccaacttgccaacttggcaaataattgtagcctagcgggtacaaatcagtccatgaagctgatagtttcagtaaatatcactctctacattattcaatgaaatctattacattgtgctgtaaatgtggtaattgaatgagttcattgttgtagtctgactttcgatgaatagggaaaccaaatataattcaaacccaattctatatatgcttgacctaaatcctaagtgcgatctaattgtaaacaataatcaaacattcccacgctagaacaaatttaattgatataataaacaaaaatcacgtgttgggcacatttttatcaaaacagggcgctatgctagctttatagaatgccttacctgtgctccagtcaatgtggccatgtcgagaataatgttggccttcagatccttgttggcgtagcaaacgccatcggcgagcaccaagcgaccctcggcatccgtgttattgatctccactgtgcggcccgagtaaagggtgtgaatgtcatcggggctgcaaagtaaacgcattagtatttaactgatccattgaatgctaaactaagggcaaaacccaccgagtggcatttggtccgacagagttctccgccaagcagaagacggcatgcaagttatccctaaatccacactggacagccgcgtaaaaggttccgagaatcgccgccgctccgccgcaatcgcgcttcatgccgggcatgccggtcttggccttgatgctgaggccaccggtgtcgtagacgatgcccttgccgaccagagcgatagtctcctgggcgccctttggctcatgggagagcacaacgagggcaggcggcacagccgcagctttgcccacgccgtaaatgccgccaaatccttgctccagcagctcctcgccacggattacttttggcgtaatgcacagctccctgcccacatcctcaacttcctggatgaagtggtccacgttcatttcgttgcagggcatatctacaatgcgagcagtcattcgaattgcccgtgtggtctcattcaggcaatttagctcgtcgtctgtcaaaggctcgctctcaatgcagccatccttgttgattagcacaaactcaacattgactacgttgcgtcctgaatttgcgtttccatctccacatccaagatttagctttggctgacttgaggccagcagattgcccgttttgcgggaatagagtggaaaagcgcgaaccaccgcacaggcgctggcgaatagattctctcgttcgcagacgagcaccacgctctcctcggaaacgttcagcacatggttctttaccagacgagtgatggcatgagcccgggatgccgtattgtgtcgggatgccttcaatggcagggcagccacggtggccacatcgagatagagggataccttatcggtgggcgcgggatgcagacaagcgacggcattcaggaaggtctcctcggtgacgcgcggactgagtttgctctccagatgactgaacttcagtaggtttagatggcgcagctggccgatgatcaggaccggatgtgtctgcggatcactgcagcctagcgactcgttaaactttacgtccgtggccatctgtaagagaatgtgtgtgcgaatgagtaaagaatggaatggctagccaaatcccagtgataagccgccggtattatcttatcggtgctaatctggtgtttagcgctccaagtgccccacttgcttatcagtcgacgactttgcaccacaggggcggtcaatggatgcagccatccataaatcacgagagccaaaaccggcgagataagcagtggcatttgggttatgggtagggccatctggacaaacacaggggcgttactcatcggttgcaagcggatgcaacgctgtaggggaagtttaagaatagctgacccatattagaatggctcaattaaagtagctccattgtgaaaaatactgcagtataattttataactaaaattctaataaaaaacaatcaatcaataattatgtttacaactaaaaagcattgggttcataaaatgaagcttcaaaagaaaaaaattacctctaaaatattttaactataataatcacctaatatacataaatataaattgtattgcatttataatgaacaaattaagataaattgtagtagcaatatgaattctaataatttacataacattttctgagttttagcgaatattagaaaatcttataaaatcaaataacgtttttttttacaaattattaattttaatatattttggtacaataacttaactaagtagttaacattttcaacttaaagccatcaattttccagctttacagtcgcaaggcaataaaaacataaactaccgaaaagatatcgttcagcacatatctttacgatgctccataaactcgcatgggttttataagcacgatatcattgtgcataaagcgatttaagtttcttaaaatcgcaaatgccacatgaccttgaattcggtgcaacaagaacaacaagtgggtcgttgaccgactcgcagcattcgaaaccgaaaagtggataaacatctaatttacccattttcaattggatttgactggacactcgatatgtagaaatattatgcaaattctatattctctatttttagactctttgttcgcgatttcttcgtttgcaaagcgttttttgcacattttctgcctttttattcgctcacctttttgaagcgggcgctgctgtaggtgcgagcgagatggttgcgtattgcctggacgcagagcagcaaacgcatgaagtgcctgcttcagaaattgcacaaaaatttgccaaaagtgccgacgttttatttttattttattttgctgccaatttgacttgcaattttttgcttgccggctaatagagatgtgacttgcacgacgataagtcgatgtcagctatcgataagtgcagaaccacttttttctttcagcctggccaccctgctggtgtcgtggaagtgtcatccctaatgagaagtaccaccactaactggaaagcaaaacaagcgtctggaaaacggcgcttagtttttaaagattttaattgattgcagtaaattgagtttaaaatggcaattattatgactgaatcgagttacgaaaggcgcgtaaaggctttgtacgaaaaacaaattcacatggaagccctcgaggcgaaattcatcaaaaaggtctttaaattcaacagcaatttgtgtgagttggaatttatctccatatatctccatttcaattgatatatttcactaaatattttagtggatgtcaaggaagcagcttcgcgccatcagcggaaagtgggaaagttgcaaaaagtgctcatggagcggcgggaggagttggacaagcgagtttccttcatagaggaacttgatcgagaactggaggccaccaaacttcacaatttggccatgaaagattggtttaaacagcagaaaatgctggccaaacagcgcaaaaacgaaatcatggaaaggtcagggattaggtcaaagataatcatattaagattttcttagcacgaatggctagctaatattttccgggctccaatgggttcgatcttgtccttattatacataaaaatgactattcatattgatttttagtccatccaaaactactattggtacaaatatatgtatatgacaataatgtattgtcaacatttatggtctttacatgcgtacaagttgcagtgagagactaatcaaatactttatttactttaactaaatctattaggagcatcatcaaagtctataaactgcaaataatagatatagttgaggtcgtgttccaaataacttatttagcttacatacataatttatttgcatagcctcacatgcgctcttatttttcaaacaaatccgattttaatgcggtcagttttaaacttagtatactataatgagagcaatgtgtgtttatttgttttattttatagcattcacacgctgtcgaagacaacaagaacctatataaatcaagaagcgctgccggcacgtgtgaagggtgtcactgtactccgtggcgataaacgcgaccagttgataccctttgatctgaaggcgaccgatgtggaaggactggactcactgtgtcagcatctcgagagtctaaatgtggacgtggcgcagtggcagcagcttatctcgctggccatggacatggctatggagtcacgtgctcccactactccgcccaaggaagcagacaattgcaagtctataatcgagattgatctcacatcgccgatgagccacacctgacttccgattaactgatttacttggattagggggaagacccttttccaatggagcactttattttagcattataaatagttggcttccaataaaagctcaattgggaattcatcttaacgaattaagcatcttattatagcagttttttagccatttaagtactgcttgtaattgtttaagtgcagtgtaaattatacatatatctcccaaaatttttttttttttcttttttctgatatatcatcttcactggaagcttaaaaatttttagagatatcgccaaagaagagatatcgcgaaaggctccagtttaagtagttccaattcaaacttattcaaattaaaaaccagttattgaatttattttaaatcaaaagtcttcttatcatatttaaccaaatttacaactttagtgataattatatcataaatttggtttaatgagttctctattactataaggttttatatatatttcaaatgtttgggtaatttccttataactatatcagaacaagacctgttttattaaacacctttctttaagatttgtatgattatctgagagcttttgacatggcggccggtgttaatcgagaaatctcgaaagtcacaagcgactcagagtgccaccgactaaccgatctatgaataaacagcgatccatatagattggcgctgctcaattgctattgtccggcgaaagttagagcgacctatcgtggctacaaaaacgcagccgcaccgcagccgcggattcagttgttgtccggaatccacgatgatcacggaaactctcctgacgatctgcgcggcggtgttcctctgcctttcgtatcgatatgcagtgggtcgaccctccggctttccacccggttcgttttatctggctttgctgctctctgggtggactcaagcttatcggattattcacaggtcctccaaagattccgcttttcggcagctacctcttcatgttgatcatcaactttaagtatctgcacaaggcggctctgaccctcagtcggtggtacaagtcggatatcattggactgcatgtgggtccttttccggtggccgttgtccacagtgcggatggagtgcgcgagatcctcaataatcaggtgttcgatggacggccgcagcttttcgtggccgccatgcgcgatcccggccaagatgtgcgaggtgagtccaatcgtatcgtgcaacgattgtggacacttgtaatggcgttgttgaaataataatggggtcaatcgtgaattaattgtcgcggctgacgaacaaaacacgcttatcgctcgcaagcgattgatacttggcgcacttcacagtcaaagaaagtgaagtcttgtcaatcagtcgtgttcacacttatatttatatataactagcttgccctgccaccttgactgataagaccaatgattgattgatatttaatataactatttaatttttgctgctcttcgcagggatctttttccaggatggccccctgtggaaggagcaacgtcgcttcatcctgcgctacttaagagactttggtttcggacgacgattcgaccaactggagctggtcatccaggagcagttgaacgacatgctggatctgatccgcaacggtccaaagtatccgcatgagcacgagatggtgaaatccggaggatatcgcgtgcttctgccgctgctctttaatcccttctcggccaacgctcacttttacattgtctacaatgagtgcctgagtcgcgaggaaatgggcaaattggtgaagctctgccagatgggcatacagttccagcggaatgcggacgactacggcaaaatgttgagcattataccgtggattcggcacatttggcccgaatggagtggctacaacaagctaaacgagtccaacctattcgtgcggcagttctttgccgactttgtggataagtatttggacagctacgaagagggtgtggagcgcaacttcatggatgtctacatagctgaaatgcgccgaggtccgggctacggtttcaatcgggatcaattgatcatgggcctggtggacttctcctttccggccttcactgccatcggagtgcagctatcgctactcgtccagtatctcatgctatatccggcagttctgcggcgggttcagaacgagatcgacgaggtggtgggatgcggacgattgcccaacctggaggatcgcaagaacttgcccttcacggaggccaccattcgcgaaggtctgcgcatcgagacgctggttccctcggatgtcccgcacaaggcgctggaggacaccgaattgctgggctaccggatacccaaggttagaaaagtttcctatctatttaattttaaaaaccaaactattttcccctatatacccgtacaggacaccattgtcgtgcccagcctgtatgccttccactcggacgcccgtatttggtcggatccggagcagttccggccggagagattcctggacgcggatggcaagctctgcctgaaactggatgtctcgctgccctttggagcgggaaaacggctctgtgccggcgagacatttgcgcgcaacatgctcttcctggtgacagcgaccatgtgccagcactttgacttcgtcctgggccccaatgatcggttgcccgatctctcccagaacctcaatggactgattatttcgccaccagatttctggctgcaactacaggatcggcattgaaagtagccaagatattagagttatctatttttaagacaaagtaattttactgattacgttagctagtttgcttggatattttttgaggaattttattccgtcacatttcaaaaatattctagaattgcccaatactattatgtgatgcaccacaacgaactatttattttaacattgtcgtttactcatatcgtgtggtatcaaagttcgcgaacggaacttgttgagaagatgcgattggaatgagatgggtttcttagaaatcctcattatcgctgtatacaatgcaatcagaatctgagctggtggatgaaaaactcaatgagcgaaccagcgagaccatcgaagaatgtattgagggattgggggactggatagcattgtactcggattctgaatccggatcgtatccttcctcatcgtccatttcctcttgcgggttcacgaatgagttgtccaaaggatccacctcgttggcggcttccatcgttgcaccctgagtctcattgcgcaactcgatcacttcttggcgaatctggttctgctcctccgcaatggtggccaccagttgttcgagactgcagatcttggcctcatattcggtcagtttcttcttcagctgacagttttcggcccgacagttggccaattccaagcaggcgcacatggcgatcttgacgtcatccgaggttgcggacctggtactgtatgcaaaccacattgttaccacaaggaacacatacgccggatatcgaaagcgatctcttggccgaaacttacatgtttaagccactggagttcttattatgaaccgggcaattgagggacattttgagacttgaaatttataggcagttcagtttagcaattgtcttacgacaaaatcaactttgacctatttgtactcggaaagttcacccagaaatatttgacactgttttactgttctcttcgattcgaatgcaaatatgagcttctgaaatacagaaattcaaggtccctagattttaatctccattttaaatgggtcgcaaatcgaatataaatcaaaagatacagtcaaattactgcagattgttttactagccgagctgataacaaaaataaaatagcaaactgcaagataatgtgcaaacactttgaccaaaatgcccttatcaatattaagacaattgagtggcaacaaaaaaaatagaaaatagagttgaaaacaaggtgataattgtttggttacgaaaacgacaacttgttcgctatgaacccagtgtttaaaattcactatcaaaacaagtgaagttgacatacacatgaaaatatatcttacttaaaagtaacttttataaataataaaataaatgttaatattatttaaactactggcacttacgccttttggtgacttcatcagcatgcattcacgactcgagcggttggagctgcttttccggggacacctattgacgctccttggcttgcaggccggagtcgtgggctttcgggaacacttgggcactattttcttgcggccgcatcccatatgtttgagtttctccgattgacgccgatgacgcgaagtggagcttttgctgagacaccgtttctggtactgcagggtattaacgaagggcagaagataaagttcgccggtcagggggaaagtgtgtaatccctaggaacttactttcgatcgatactgattcttttctcgcgaactcaatgcattccagtaccccgctccctgacgcagtgactcctccatttggaggtgcggggatttaagatgtatagccaccgcgtaacttaaaaagccgtttggatacggtgccatctctacttatacttttcaactaacgtactgaaatttaggatgctaaactaagaattacgtacaaaacattcgagcttgaaaaattgaaaggtacaaatttgagttgagttgctgttgctaactgatagaagtgaaatctcaaaactacttgtttaataataattgccagtttctggatttgatacacaactcttcgttggccttagtttattatgatgtatatattacaatttggttaaaaactgttcgcttagcctagcaacaagcggtttaacttcaaaacttacagataatttgtcattacacttagccgtattagataagcgagagtcgttccgttccgaggaccctttctccaaatttatattgcttcgactcctaaatatcaacttacgaactaattgatttatattcacgttgcgcatggacctgcatccatgccagtaacttggctaatactggccactcccgccgatccccaaatcaccccgatccccccaaggtccttggccaactcctccctcgattatcctcgccattccccaaacacgcaggtgaaaggatttaggttttggtttggttctagtagtaggcctgctttatggccgcactggtgat

SEQ ID NO: 28034 - DNA, 1160 bp, DROSOPHILA
ggaaaagcagctccaaccgctcgagtcgtgaatgcatgctgatgaagtcaccaaaaggcatggccacggacgtaaagtttaacgagtcgctaggctgcagtgatccgcagacacatccggtcctgatcatcggccagctgcgccatctaaacctactgaagttcagtcatctggagagcaaactcagtccgcgcgtcaccgaggagaccttcctgaatgccgtcgcttgtctgcatcccgcgcccaccgataaggtatccctctatctcgatgtggccaccgtggctgccctcccggcatgaagcgcgattgcggcggagcggcggcgattctcggaaccttttacgcggctgtccagtgtggatttagggataacttgcatgccgtcttctgcttggcggagaactctgtcggaccaaatgccactcgccccgatgacattcacaccctttactcgggccgcacagtggagatcaataacacggatgccgagggtcgcttggtgctcgccgatggcgtttgctacgccaacaaggatctgaaggccaacattattctcgacatggccacattgactggagcacagggcgttgcaacaggcaaatatcatggtgccatattgacaaactcggagacatgggaggcaaagtcgttgcaggctggacgcaaatctggcgatttattggcacccataatttattgccccgaattgcatttctcggaattcgcttcggccattgctgatatgaaaaactcggtggcggatcgtcagaacgcccaatcctcctgcgcaggccttttcattgccgcccatcttggcttcgattatcccggcatctggatgcacgtcgatatggccacgcccgttcattgtggggagcgtgccactggatacggcgtttccctgttgttgaccctcttcggcgggcacactgactccaagctgcttcaatccatcgcctccacagacgaggagccgccctcgaagcgctggtgccgcgattaactcagcctgccttttactgtgccacgtgcctgactggattaacatttccatcattttctttgcccaattgcaatccggcatcagaagtcaatttgtgtagccgacaggcattaaaaaatcaatattatttagaaatacaagaagtatgaaattt

SEQ ID NO: 28035 - protein, 235 aa, DROSOPHILA
MKRDCGGAAAILGTFYAAVQCGFRDNLHAVFCLAENSVGPNATRPDDIHTLYSGRTVEINNTDAEGRLVLADGVCYANKDLKANIILDMATLTGAQGVATGKYHGAILTNSETWEAKSLQAGRKSGDLLAPIIYCPELHFSEFASAIADMKNSVADRQNAQSSCAGLFIAAHLGFDYPGIWMHVDMATPVHCGERATGYGVSLLLTLFGGHTDSKLLQSIASTDEEPPSKRWCRD

SEQ ID NO: 28036 - DNA, 3660 bp, DROSOPHILA
agttcattttagacgcaatcgtgtgacggaaattcacttaccttttggatgctcaccgagatcaatggtcgttcgctgaatctgttcttcaaggatttcgagatacgcgaccgcctgaactccgtgggacgcgatatatccattttggtgcaaccgtcggatttgataaccaagctgaaaaagcagctgaagtcgctgcgcggctacaaggattacttagtgcagtagtcactagctataacgaacgattccatataaccacaaataactctcaactgtaataagctgctatacgcgaggcaatttcgaatagctccgggccagtaatcattccatcttcgcgaaaaggtcaatgaacgcagccactatatagtcaactagaactggtagaaacatttcgctatattacgtactacacactacatatattaactatgatcgaaactacttaaaggacttaggtgtagcgttgaggaacatatacaaaagcaacctatatattttttgcaaaactttatataaactcgtacatatatatacaaattgaatagatatatatatatatatatatatagatctatatacaccatatgtatagctgacactttgaagggctccaaatttacacctcgaatttgtttagatgcggaaaagttatgagaaatttacaacatgaaattcaagtattttaggttaacatatacacgcgtaacccttacacacacaactgtgcaacttagtatccttatgcaatattggagtgcctctgattttgttcattgatgttgttttctttcatgttttcatttgtttcgtgcgaaaagacatacgcatctgtcgtaacatataagatgtgataaaaatgagtactcaaatttaggcaattttaaacgatacatatgtaaatgctttttgatttattttattaataagtttccgtgtgttatttcgataaacatattacttatgcgaaaaattcattaaagcaattccacgcaaatcactcacaaactgttcccctcttggccagcaatgtcgactgcctccagattcggaaattgtacttctccacatccagcttggagtacacaaagatgggcatggagttggacatcacccaaatgtatccctcctcgtcgatctaaaacaacaacgcacttaaccttcgttttcgtgttacaaatagaaagggatgagcttacggtcaaatcgctgggataaatcatctccgatgaattggaataaacggagccatggttttccgttgagaacggcttgctggttttccagcagcccactccactcttctggacctcggcaaagaaaatcaccccggtccgcggatcgtatttatgcattgtggactgggtggacggaccacgagttcccagaagatggaagtcgtctccatgatcagaacgtgctgcattgaattcctgctgcaagaccctgttgctaaccacaaactcattcgtgctggccataggatggaagaagacatccctgctgccatcgggcttatatgatcccaaggtcgccgagaaaatcccgtcgtcccagcggaaggtctgcccaccaatgttgagattatcagaaaggggatcaaagttaaagaagctgtgctcgaaggaccaaattctatcgcttcgcaggtgatagacgtgcagtctgcgattgaccaaatccggaatgtaggcataggcatcgttgcacctccgagcgcccacatcgattgtgatgctggctagtccacgtccgatctccactatgctctgcggaatctcaaatcgtttcaataagcgatcgttagccaaatcgatcacccaaatgctaggatgtcgaatctgctggcgattatctgatggttatataatattattttaacctggatcaccttgcctataaagcaaatgattatactcactgggaaactccagcattccggtgtcgacgaaccagagacgcccacagacatccactgaggttctatagacagacactaggttctgctcgctcgcattatactgattcaccgccaagttgggataggcccgtagatggggactctgactccacccatccttggccagatcgatgtagtttaaggtggacggaatgcccggctgtcgccgtggcacggtgacaaagaggcgtcctcgaaagtgggttactccttggggcacgttgttgtattggatgaaggatcctgaggatgaggagcctaagcacttgcgggagttgtagaaatgcgaatctttgtcgaacgaataattgtgatatatatacatattattcgttataaaagtgacgataaaatggtgattaaaataatattcatattacaaccatttcataatgttttgtggaaaaacttagtgattcaccgacatttgctgatgtttgaaattgaacatatttcaattggatatttttggagttacctggaatgcagatcctgttccacaaatccttatagccatcgccgcgattgtaaaagtccaactgcttccacttgaagacctcaatcatgggatctccatctgcagagattagcaattggaaccctgagattgcgcacaggagcagaacgtccagcgataacattttataaaattccggtcgttcgcctttcctggctgaaaacccacttgtgactgactgactcctcagcttgggttcaactgagttaaacgtgctctgcgactcaaaaatgagctcagaatgtaaagtgataagagcagtcactgggattcccaagctcttattttccatgtctctttattcaacttttaagatttgttgataatctgaagagtatatttgtaaagctaactatttattcgaaaatttcgtcattcttacttatgtatgtatttttaattaagtaacaaattcaacaggaattccacacgaatcactcacaaactgtgcccctcttggccagtgaagccttctgcttccaaatccggaaattgtatatactcgtgtccagtgtggagtagatgaagatgggcatggagttggacatgacccaaatggtgccatcctcgtcaatctgcaatagtaagatgagatgtataactttttttcttcaacttttttatccaaaaccatttgcttaccgacaagtcgctgggataaatcatatcctcggcattggaatccacagagccatagttttccgccgagatgggcttgctggtcttccagcagcccactccgttgcgctggatctcatcgaagaagatcaccccagtcccaggatcgtaagcgtgcatcgtagactgggtggacggaccacggcttccgagtacccggaaatcgttcccatgatcggaacgtgcggcgttggattcctgctgcagaacccggttggagaccacaaactcattcgtactggccatgggatggaagtaggcatcgcggctcccatccagtttctgggcccccaaagttattgagaagatgccatcgtcccagcggaaggtctggccgccaatgctgagatccccggacagcggatcgaagttgaagtagttgtgctcgaaggaccagattctatcgtttcgcaggtgatagacgtacaggcgccggtacaccagatccggaatataggcgtaggcatcgccacactgacccgccttcacatccacggtgatg

SEQ ID NO: 28037 - DNA, 1346 bp, DROSOPHILA
agtcagtcacaagtgggttttcagccaggaaaggcgaacgaccggaattttataaaatgttatcgctggacgttctgctcctgtgcgcaatctcagggttccaattgctaatctctgcagatggagatcccatgattgaggtcttcaagtggaagcagttggacttttacaatcgcggcgatggctataaggatttgtggaacaggatctgcattccagattcgcatttctacaactcccgcaagtgcttaggctcctcatcctcaggatccttcatccaatacaacaacgtgccccaaggagtaacccactttcgaggacgcctctttgtcaccgtgccacggcgacagccgggcattccgtccaccttaaactacatcgatctggccaaggatgggtggagtcagagtccccatctacgggcctatcccaacttggcggtgaatcagtataatgcgagcgagcagaacctagtgtctgtctatagaacctcagtggatgtctgtgggcgtctctggttcgtcgacaccggaatgctggagtttcccaataatcgccagcagattcgacatcctagcatttgggtgatcgatttggctaacgatcgcttattgaaacgatttgagattccgcagagcatagtggagatcggacgtggactagccagcatcacaatcgatgtgggcgctcggaggtgcaacgatgcctatgcctacattccggatttggtcaatcgcagactgcacgtctatcacctgcgaagcgatagaatttggtccttcgagcacagcttctttaactttgatcccctttctgataatctcaacattggtgggcagaccttccgctgggacgacgggattttctcggcgaccttgggatcatataagcccgatggcagcagggatgtcttcttccatcctatggccagcacgaatgagtttgtggttagcaacagggtcttgcagcaggaattcaatgcagcacgttctgatcatggagacgacttccatcttctgggaactcgtggtccgtccacccagtccacaatgcataaatacgatccgcggaccggggtgattttctttgccgaggtccagaagagtggagtgggctgctggaaaaccagcaagccgttctcaacggaaaaccatggctccgtttattccaattcatcggagatgatttatcccagcgatttgaccatcgacgaggagggatacatttgggtgatgtccaactccatgcccatctttgtgtactccaagctggatgtggagaagtacaatttccgaatctggaggcagtcgacattgctggccaagaggggaacagtttgtgagtga

SEQ ID NO: 28038 - protein, 429 aa, DROSOPHILA
MLSLDVLLLCAISGFQLLISADGDPMIEVFKWKQLDFYNRGDGYKDLWNRICIPDSHFYNSRKCLGSSSSGSFIQYNNVPQGVTHFRGRLFVTVPRRQPGIPSTLNYIDLAKDGWSQSPHLRAYPNLAVNQYNASEQNLVSVYRTSVDVCGRLWFVDTGMLEFPNNRQQIRHPSIWVIDLANDRLLKRFEIPQSIVEIGRGLASITIDVGARRCNDAYAYIPDLVNRRLHVYHLRSDRIWSFEHSFFNFDPLSDNLNIGGQTFRWDDGIFSATLGSYKPDGSRDVFFHPMASTNEFVVSNRVLQQEFNAARSDHGDDFHLLGTRGPSTQSTMHKYDPRTGVIFFAEVQKSGVGCWKTSKPFSTENHGSVYSNSSEMIYPSDLTIDEEGYIWVMSNSMPIFVYSKLDVEKYNFRIWRQSTLLAKRGTVCE

SEQ ID NO: 28039 - DNA, 3293 bp, DROSOPHILA
tctttcaccattgttaactcgttgtacgttctatgcccaagtaacaagaagcgcttgttaaccttccctactgactcgcaatatttgtaatttaccaatataatctagtgaactaaacgaatcgatatactaatgtttaacgcctctttatacaaacatcatgcataaatatgtatatctagtgttaatggaggagacaacagacaacaacaacgctgcaataacaagtagtttgtaattttaagtataaaattcgtttgatgcaaatgcacaaagccctcatcgatttgttaatatcgttaaaattcgtttcggcatgtagacaaagatgaatttctattttttcaatcaacttagatttagtgacttaagacagcattataagatctactacattacttacgttacgtgtgatataaagatacaaaaaaacaaagcaaaaaaaatatcaaaaatgattttaaaaatctcaataaaaagaagtattattatggcataaaaacttggtagttttattttttttatattttttttcttgcatagatactatggaaagtgaatcagaaagataatcgaatttactgatcttcatttattttattagcatctgaattattatatcatattggaagagcatgaaaataataagatctctaaacattaaaaatattctttatcaaaatttcattgcacgcttaatcataactttttacatacttttcatacgaatctattactttacacgaataaataaagaatatatagtatacgtaagttgttgcggaaaggtttttgtaattaagcaatataaaagaaaaacatcctaaaatcggataaataataaacaatgatttgtagtaattgaaatttgataaagtttttattgcttataaaatgttttcaatttcaagaataccgctaatgcactgcactttcgataagttttgtgtggaacaataccgatacccatatccaaataccgataccaaaaatggcgtcgtgatttcccagttgattttcccagaaaatgcagcatatttcgtggcccaataacgcatcaagtgaaatgtgggcttaattagcggagagcaacgagcccaaggcatgcaaaagaagcccatcccagtcaggaaaccacaccgtagttttgggaagcggtcatggcagcggcggcgacggcagcacctgcgacatccagcgggaatgccagtgtacctgctccactgcccgcggctgccccaggcggaggaggaggcgcaccaggtgctggtgggggtggagcaggtgcccaattccgggaaattcacaagaacacatggctcaaacggctgacagcggatgggaaacgactgaccgtcgggcccaaggtgggtggcaccgaaagactccgcctagtgtctggttactacatcacatgtctttcagaaatctgagtgctcctgggtggtgttctgtgttcacgatgatacggaagctctgctggagggctatgcggaacctcgtcaggcagctggtcatctgccggaatgggccgtttccttgcgggaaaccctgcacatctcccatgccctcatccccaattcgcatgagttcgagtttgtggtcacgctgagccacgaggtgttgcgctttcacgccgtctcttggtaaaactaaaagctccccgcacgcaacgcaattaagattgcaccacttacagctcactttcgcttttttattcgcagggagattatgcaagagtgggtggaaacgctgcgctccaagctgcgcgaaatgaagattctgtcgccgcgcgaaaacctctacacgaagctacctgaagtgcgcgcaccgttgctgcccacgcgggatcccacatcgccactgccaccacctcctccagttccggcggctctggtaccgggcgtcgagcgtgtggtggcacccagccatcaggctccgccagcaccacctcctgagccaccaacaagtccagtgcccaccacacctgcacctcctgcccctgctcccgctgccatgtccaacactttaacgcagcacctcctcaacatgctctccgatcccataagcacctacagcgagcagatcagtgagtcggtagagtcagcctctggtcaggaagatgttgctgtagctgaggaacctccagcggagcaaccgaccactagtgatgccgatttgaatctctcggatgacgaatacctgtcgcccttgctgcgcaaggcatgtatgcttaccgagaatggagctcgcgttgacgtcgtggtggtcactggacagcgcgtttctgccggtatgaatattttttatataacctaaatatatttaatttttactctaacattacaaaatataacctaaaattgtagatcaagtcctaaatttggagcacattctgcaatgcgaacgactgattcccaggtgagtgaatccatcctacaacatctcgttcataagctcgtagttgtgctgcaggaacttgagtactgccttcttggtgctcgctttgcccttaaaggtggccttgaacaattttcgcaggacggctagatatctcatggcactgagggtgagctcgtggctctcggcatccaatttcatgcccaacacatttttgtatctcttgctcacctgggctttcagattgtcaaaactttggcttgcctcctccatcagaggagcacgctgctgtcgccggtagtgatccatgtgggcatgtagcaaggttttgaagagttcgttaaagtgctgcacctgctggtggtctgatacgtcttcgcagaaaacactgaacatggtgtcaaaaaacatcgccggatcctgtccattgcatagtctttttagggcgctgattgaggagcaggcgaaatttcgcttcagatatcggttctccttgtccagcatgtaaatctgatcatttatccttttaatggcatgtttgtccgccgcgcgtttcacctgcaacttatcgatcagacattgaagctccatcgactccttggttagtgcagcgttttctttgaccaacctacgattggcctccactatattctcgcatgaactaaaagaagactgttcctcctcattcaaactttcatcaaatttgcagcatacaacatctttgccgattgcgggattcggttttaggctcatttggtgaagagtgcgcaaatccaactggaaactgcccggccacgtaaatggataacccaacgatttgtgatcattgagttgtttatgaaggagcagtagcatatagtttctggaaaagcgttccttcggcgttgactgct

SEQ ID NO: 28040 - DNA, 1157 bp, DROSOPHILA
tgatttcccagttgattttcccagaaaatgcagcatatttcgtggcccaataacgcatcaagtgaaatgtgggcttaattagcggagagcaacgagcccaaggcatgcaaaagaagcccatcccagtcaggaaaccacaccgtagttttgggaagcggtcatggcagcggcggcgacggcagcacctgcgacatccagcgggaatgccagtgtacctgctccactgcccgcggctgccccaggcggaggaggaggcgcaccaggtgctggtgggggtggagcaggtgcccaattccgggaaattcacaagaacacatggctcaaacggctgacagcggatgggaaacgactgaccgtcgggcccaagaaatctgagtgctcctgggtggtgttctgtgttcacgatgatacggaagctctgctggagggctatgcggaacctcgtcaggcagctggtcatctgccggaatgggccgtttccttgcgggaaaccctgcacatctcccatgccctcatccccaattcgcatgagttcgagtttgtggtcacgctgagccacgaggtgttgcgctttcacgccgtctcttgggagattatgcaagagtgggtggaaacgctgcgctccaagctgcgcgaaatgaagattctgtcgccgcgcgaaaacctctacacgaagctacctgaagtgcgcgcaccgttgctgcccacgcgggatcccacatcgccactgccaccacctcctccagttccggcggctctggtaccgggcgtcgagcgtgtggtggcacccagccatcaggctccgccagcaccacctcctgagccaccaacaagtccagtgcccaccacacctgcacctcctgcccctgctcccgctgccatgtccaacactttaacgcagcacctcctcaacatgctctccgatcccataagcacctacagcgagcagatcagtgagtcggtagagtcagcctctggtcaggaagatgttgctgtagctgaggaacctccagcggagcaaccgaccactagtgatgccgatttgaatctctcggatgacgaatacctgtcgcccttgctgcgcaaggcatgtatgcttaccgagaatggagctcgcgttgacgtcgtggtggtcactggacagcgcgtttctgccg

SEQ ID NO: 28041 - protein, 332 aa, DROSOPHILA
MAAAATAAPATSSGNASVPAPLPAAAPGGGGGAPGAGGGGAGAQFREIHKNTWLKRLTADGKRLTVGPKKSECSWVVFCVHDDTEALLEGYAEPRQAAGHLPEWAVSLRETLHISHALIPNSHEFEFVVTLSHEVLRFHAVSWEIMQEWVETLRSKLREMKILSPRENLYTKLPEVRAPLLPTRDPTSPLPPPPPVPAALVPGVERVVAPSHQAPPAPPPEPPTSPVPTTPAPPAPAPAAMSNTLTQHLLNMLSDPISTYSEQISESVESASGQEDVAVAEEPPAEQPTTSDADLNLSDDEYLSPLLRKACMLTENGARVDVVVVTGQRVSA

SEQ ID NO: 28042 - DNA, 5943 bp, DROSOPHILA
cacgctgctcctcctcgcttccgcacacccacttccggcccacttgagccggagcttttgacattggccatcagtagtagccttgtcataagcccactgtgctgcagtctagatagatacagataagattcctttgcgcagagggtggccagttttcccagttagtcctcctccaggggagggggggggggtgtggtgttcttggccagctcccattgtctctgcattgcgcccactttaatttaagccgcttaaattgcagcaaagctaagcagcttgccattttcaacctaaggtatccagtcgagcatcgctttgattaccgaaattaagccgaatagaaaaaacagtggaggtccaagcaattggccaaaactttggctttcccgaccgtttttctctcttttgtttaagccaaagaaagttttgtttggtgtgctctccgccggtgggtgtattttacaccctcaaaaccactggcgtcaaccaaatttttaacttcatttagaactcattaaaaactttggcataattgcataaatttgcaaagtcaatggcaaacttgtccagcgcttttaagtgttggggaatttgggtgattcctatgcagagtcgatagggagagctcctgaattaccaattagtattgaggaagtttctaagcagtggacaaatccttggactgacattatttttagtatatattttcaatttagttctcataacagaatttaaaagaattaaaaatttaagtctttcataagaaatggaaaagtaaccactgttagtaaaagctttcgataagtcaaacagggtaactaaaaagcttttagttctctaaataacaatgtctaaaaattatgaaattcatgctgctccattcattttaaatggttttcagaatatatccaccttgttgaaaaacaaaattaataattcaattaaaattgaatttcattcaaactacccgcaattgaaataagcatgtatgaatttatttaacatgatttggtgtgtagtttattcatcgtttaaatgttctatagtttatacatatacatgaactagtttctttaaatacatattatgtcaacacttattgtttcggcttctgttcatggttgttaagttaagttgtcgttgctgaaatgattgggccatattatagaggacttccccattcactcttgtgaccagagacaacaaacaatatatattaatttatgcaactttatgtaatattcattaatttagagacgaaaaacaaacagtatttttttttatagatttttatactttttgcagatttccgcatttaaaacattatttgcattaaagcattgttttttgcacttaatattccattgtttagttgagttgctgtacaaattgttcacaaggtttcggtgcagggacggggggcagtacggaaaacagggggcggggattgtttaatacttgtgcgaactggtgaaacgcctaacgaaagaaaaccaggggagcagacgaaagtaacacaaggtaggcaattgttaatttttgttggaatgctacgattctttatgcgaaaatgattagacaaaaatataaacaattcaaagagcatacacacttaaaacctaacaaaaatagtaaactttaacaagtgaaattacagtgtgttggcgggagttacgacaatcattaggcaattcaatttatgtacattgcaagacgggacttcaatactaaaacacacactttagagtaggtttgctcgcttggacgatatttaactagttattgttttggctacgctgggtggctccgagatacacgcatccaggctctcaacgtagattagatattttgtggtttaattgtggtttatgtatatatagacgcatacacagcggatattgcaggaggtggagacgcgccgcacgttgcgccgccgccagcttaaattatgaatgaaacaaaattttggacaaaaatcaaaaacaaaacaataaacaggatctaatggcgcgagtccctagggtagaattcggccaggatggaggccgggatacgcttgagcatctccttggggaagatacgcagcagctgccagccaatgtccagggattcgaagacagtgcggttctcatagttgccctgcaggtacagaggaaagttttgtaacaaacccacttaatatcaagcgcgttcaactcacctgcgagatgaagttcttctcgaacttggtcaagaactccagatacagcagatcgtcgggcgtcagggcctcctcacccaccacagccttcatggcctgcacgtccttgccgatggcgtagcaagcgtacagctggttggacacgtcagagtggtccttacgggtcatgccctcgccgatggcagacttcatcaaacgcgacagcgatggcagcacgttgactggtgggtagatctgtctgttgtgcagctgacgatcgacgtagatctggccctcggtaatgtaaccggtcaaatcgggaatgggatgggtaatatcatcgttaggcatggtcagaatggggatctgggtgatggatccgttgcgtccctccacacgaccggcacgctcgtagatggtggccaaatcggtgtacatgtaaccggggaaaccacgacgaccgggcacctcctcacgggcagcagacacctcacgcagagcctcggcgtacgaggacatgtcggtaaggatgaccagcacgtgcttctcgcactggtaggccaagaactcggcggcagtcaaagccaggcggggagtgatgatacgctcgatggtcggatcgttggccaagttcaagaacagacacacgttctccatggaaccgttctcctcgaagtcctgcttgaagaatcgggcagtctccatgttcacacccatagcggcgaacacgatggcgaagttgtcggtgtggtcatccagcacggacttgcccggcagcttgacgagaccggcctgacgacagatctgggcggcgatttcgttgtggggcagaccggcggcggagaagatggggatcttctggccacgggcaatcgagttcatcacatcgatggccgagataccggtctggatcatctcctcggggtagatacgcgaccaggggttgatgggctggccctggatgtccaggaaatcctcagccagaattgggggtcccttgtcgatgggcttgccggaaccgttgaacacacggcccaacatatcctccgacacgggcgtgcgcagaatgtcgccggtgaactcgcaaagcgtgttcttggcatcgatgcccgaggtgccctcgaacacctggaccacggccttggagccgctcacctcgagcacctgtccggagcgcacagtaccgtcagccagacgcagctgcacgatctcggcgaacttggggaacttgacctcatcgagaatgaccaggggaccgttcacaccagacacagtcttgtaagctgtggaagaagacgagttaaatgattagttttaggtttaaactatagaaaacaacagatatgcggatcctttctttatcagctcatcgatatcagaaaacttaaagctcagaaaagttgcttcattagtttatattatattcatgtcttattaaattaatattgtcaaacccaaaactacttcttaattgttgcaatgtccatgaggtcattaattaaatcactgaagtgaccataaaaattgggatctttttttaaaaaaaattacaattaagttgtttttatagatgtcattggaaataatatactaaaagggcagctcaatatttgtttctcttttaatcacttttttttcaataaaaacgaagttttaataattttactttgtagcacattgctttcttcgtcttccaattagataaagttccaacaaaaacacgagtcgcgcaatgctcacatgaaagtcggaatctgataagaaagcaaacgtcaaaagaaaagtgtaggcgcgaggggggtgttgactgggaggctaaattatgtcagctgactgtccaactggtttttagcccttgccacgagctgcagttggaatcttatgggaattagataggaaaaagggattgaaatatgcagcgaagataaatatataaattgcattaaaagacaagcctacactgactggctgcataaaacaatgcaactatatttttatctacaatggctactaatttgacacatgaatacagccaacataaaaaacattgaaattctctctatcgaccgaaccgatcaatcgtcagttatgccacccaccccgttcgcagtcaggtgcctttaagtgtgtgcgttcagctttgaatggcaaacgcaaacagctgagcagcgaacggtcatgtgacggcgaaaattttcaataagcgttaaccatgattatgggctgctccccattacgatctgatcagcgtagaacatttaaagctctatatgaaatattattctataggtttcattctgttacgttgttaattgtgtgtttttgtgggtgtcgcaagaatttattgattttttctctacttcgcctcacaccagattcgtgcaaactgtcatggcggactttcttggcattttcttattgggttttttttttcggtcacttgattgggttgcgaatgcatttcttgatatttcacttatttgcaaattccgtggattactcactcaagcggggctgggagataaagtcccgggagacggcgaggacatgttcccgctgggcttgttgggcgttcatcttggatagactttttctgcgcctctaccttgaaagtgcactgcaaatttcgagctgcaattagatacgattttagcttttagccactattcggacgtggtcttttacaagcacatacaatttttcagctacgaaacagtactgagcgacacacacgcaaaattttggcctgcgaagtcgttgcgagtacgatgaaaaattgccctggaactgaaagtattgctgaatgtgaatctgctgtgacgtcacgtgccgtcacatgacccgtcacgcgttaggaactttccgtttcgcgcgctttacaacactaattgttagtgttgccatttagtggagttccacaccgcagcagggctgccacattgccatatggtatcaaatgaaccggtgacgaaatcggtatggcagctacgcactcacaagtctgtttacctacactggagttagcagtgtttttcacccacagagagctgccatatcgccgtatgttatcgataaatttggaagcattgatttgtaccacccctactgttaactcacacagcacagttctgttaattattggaaagttttttaatggaacaaatttaattaaattacaaaagttgtttacccgctgcggcacttggacacccagaaagtaaaacaaagcagtgctcggggacagcaattgaatagtaccagaatccgggacatcggaggcagcgagccgcgacaaagaagtgcacaaagagagatagccagtgcaaaacccgtttcttccaaccgataaaaggggcgtctatagctctgccgatccggagcccctggcattgcaccactatgatggttgagtccgatggaaccgccgacgccacccgccgcctaaacgtgaagaagcaaacactggacgatgcgtacgccgtgcccgccaacttcctggagatcgacgtggtcaatccgctgaccaccatggcggcgggcaagaagcgctacacggactacgaggtccggatgcgggtgagtgatcgtagtacatgtacatgggggcaccacctatgcaccttccaaaattcaccgaaaaaaccattgataatcgctggaattcgctcacacacttgtgtgcatgtgttcgtgcgactttgtctcgctgtgcatgtgtgtgtgcgtgcgtgtgtgtgtgtgtgtgtgtgtgtgagtgcgggtga

SEQ ID NO: 28043 - DNA, 2661 bp, DROSOPHILA
ctcgcaacgacttcgcaggccaaaattttgcgtgtgtgtcgctcagtactgtttcgtagctgaaaaattgtatgtgcttgtaaaagaccacgtccgaatagtggctaaaagctaaaatcgtatctaattgcagctcgaaatttgcagtgcactttcaaggtagaggcgcagaaaaagtctatccaagatgaacgcccaacaagcccagcgggaacatgtcctcgccgtctcccgggactttatctcccagccccgcttgacttacaagactgtgtctggtgtgaacggtcccctggtcattctcgatgaggtcaagttccccaagttcgccgagatcgtgcagctgcgtctggctgacggtactgtgcgctccggacaggtgctcgaggtgagcggctccaaggccgtggtccaggtgttcgagggcacctcgggcatcgatgccaagaacacgctttgcgagttcaccggcgacattctgcgcacgcccgtgtcggaggatatgttgggccgtgtgttcaacggttccggcaagcccatcgacaagggacccccaattctggctgaggatttcctggacatccagggccagcccatcaacccctggtcgcgtatctaccccgaggagatgatccagaccggtatctcggccatcgatgtgatgaactcgattgcccgtggccagaagatccccatcttctccgccgccggtctgccccacaacgaaatcgccgcccagatctgtcgtcaggccggtctcgtcaagctgccgggcaagtccgtgctggatgaccacaccgacaacttcgccatcgtgttcgccgctatgggtgtgaacatggagactgcccgattcttcaagcaggacttcgaggagaacggttccatggagaacgtgtgtctgttcttgaacttggccaacgatccgaccatcgagcgtatcatcactccccgcctggctttgactgccgccgagttcttggcctaccagtgcgagaagcacgtgctggtcatccttaccgacatgtcctcgtacgccgaggctctgcgtgaggtgtctgctgcccgtgaggaggtgcccggtcgtcgtggtttccccggttacatgtacaccgatttggccaccatctacgagcgtgccggtcgtgtggagggacgcaacggatccatcacccagatccccattctgaccatgcctaacgatgatattacccatcccattcccgatttgaccggttacattaccgagggccagatctacgtcgatcgtcagctgcacaacagacagatctacccaccagtcaacgtgctgccatcgctgtcgcgtttgatgaagtctgccatcggcgagggcatgacccgtaaggaccactctgacgtgtccaaccagctgtacgcttgctacgccatcggcaaggacgtgcaggccatgaaggctgtggtgggtgaggaggccctgacgcccgacgatctgctgtatctggagttcttgaccaagttcgagaagaacttcatctcgcagggcaactatgagaaccgcactgtcttcgaatccctggacattggctggcagctgctgcgtatcttccccaaggagatgctcaagcgtatcccggcctccatcctggccgaattctaccctagggactcgcgccattagatcctgtttattgttttgtttttgatttttgtccaaaattttgtttcattcataatttaagctggcggcggcgcaacgtgcggcgcgtctccacctcctgcaatatccgctgtgtatgcgtctatatatacataaaccacaattaaaccacaaaatatctaatctacgttgagagcctggatgcgtgtatctcggagccacccagcgtagccaaaacaataactagttaaatatcgtccaagcgagcaaacctactctaaagtgtgtgttttagtattgaagtcccgtcttgcaatgtacataaattgaattgcctaatgattgtcgtaactcccgccaacacactgtaatttcacttgttaaagtttactatttttgttaggttttaagtgtgtatgctctttgaattgtttatatttttgtctaatcattttcgcataaagaatcgtagcattccaacaaaaattaacaattgcctaccttgtgttactttcgtctgctcccctggttttctttcgttaggcgtttcaccagttcgcacaagtattaaacaatccccgccccctgttttccgtactgccccccgtccctgcaccgaaaccttgtgaacaatttgtacagcaactcaactaaacaatggaatattaagtgcaaaaaacaatgctttaatgcaaataatgttttaaatgcggaaatctgcaaaaagtataaaaatctataaaaaaaaatactgtttgtttttcgtctctaaattaatgaatattacataaagttgcataaattaatatatattgtttgttgtctctggtcacaagagtgaatggggaagtcctctataatatggcccaatcatttcagcaacgacaacttaacttaacaaccatgaacagaagccgaaacaataagtgttgacataatatgtatttaaagaaactagttcatgtatatgtataaactatagaacatttaaacgatgaataaactacacaccaaatcatgtt

SEQ ID NO: 28044 - protein, 490 aa, DROSOPHILA; identical to SEQ ID NO: 25593

SEQ ID NO: 28045 - DNA, 2903 bp, DROSOPHILA
ttaggtttataatcagagcacggaaattatcttgatgatcatccatcggcatcatcctaaaatccagcaacacgcaagtcacttaaaaaataaaacgcttctcattagcagcaagggcaaaaaaggggaattaagcgaggttcaaccttaattatgcctcgtcccccgccctaacttttattataattttttgctgcctcgtttttctgtgccgccttgcaaagtttgtttgtttcgccttttggcttcattgcccttcgccaacttcggctaagagcatttaaagtttttcctctgatgggtagaaaaattctgcgtctaaagctgagcagcgaaaaaatcgaggaaaaataaccgagcgtttgtcaggcagaaaataacttttgattgcgtcggctttatgaagctaaattgatttgcccgccagttattaaggcataactaaaaatattaacgaaccccagccagctgatgtcctatcatttatcactagaaaagttttccttttttcttctttttcgtataacgttattttcgtcgaaggataacgccccaaaaaactccgcccatcattagcaaaacaaggtcgcagcaagaaattgacaagttctggatagaaacggatatgaaaaatagcctggattctttgttaaataatataaagtaataaattccaaaactaaaacaaaatttttggattgaatataaagcgtttacggcctgttaggtttccatttaaattttgcatttaaattcaaccgttacgttgatggagaatgaatttcgtcaaattaaatcattatccaggcgtccaattaagaatctcttaatatgcaaattggattcatgaataaagtcatgaaagttaatttgtcattaaaataatgcatctctctgttcttttgttgtggccgcctcctttcgctaaatggtgggagtaaatactgcagtctcatgccgaaacgaagcgaaacgacaggatagaacaaagctgagatgctcaattatgaggcgagtaaataaaggacacggagtcagcatgagacccgagcacgaaggacgagcaatgacaggacgaggcgggcgagtaaaagaaggtcctgcagcacgttttgagggagaaaatggaagggatacaaatggacgtgcatgaattttatgcaaagttgacgaaaatcgcgcatagaaagccaagcgctttgtaatttttttctctttcgtaacttctgccaaattggcaatcaagttttatgcaaattacgaaagaattacacggagtgcgcgtacttctaattgctttttcacagctaattagcaggaggagcagctgaaatatcacgtatacgcaccttaattttctaacacgcatcacagaaataataacaagcagattgccgcagatggccgcaatgatgatgagcagcatgacaaaggccttgaacacccaaacgatgttgtccagccaatcctcgtcgggattgtgttgttgatgatgatgatggtcacttaatcctgcgccgctttcgttgaagttcagacccgagccgccaaacggctgtgtggcattcagttcgtgtgtggcaggtgtggcagtgcccagcggcagtgctattccgccggtggaagagttggatgcgctggatgagccggtggcagccagggcattcgttgtgtgcagcatggccgccgtggtcagtgcggccgccgtgacccgcgccaatgttgtcagactttggccataactaattgggttgctaactatcccgccgggctgctccgcctgattgccgctgccgccatcgccgcagcagcatttcggtctttttctaatcctggcggcactggttcgatttcgatgcctttgccgcggtggctccgggccaagtccgtcgcacaacaacatgagtctcgttgtctggttttaattttacaataatttataacttatctttggcttgtagcgctctctttctatctctttctctatctttttagtaacactgtgtggtagatccgtattttattatcgcacttttaggttgaaacacccactggaggaagcgccattgggaaatcacgacacgcgtggcgccggcgacgttgaaaccaaaactgaaacggccaccgcaacggaaattgattcgcgtaagtggcccgcggaccgtggagcgtaaaccgtgtggccacgacaacgtcgccgctcctccgcttcagaatccgcctcagtttcagacgctgccaacgtcaacgaccaaccgaccaaccgctgtccttgccagcgaacgccgcccacgcgagctcttgtgatggcctcgcttttccgttgattttccgtagcttttccgcctgctccgccgctgatggagaggctacctcggctggacgacaattttttcggctatttactgttgtgcggcttctattttctattttactttttgatattttttgtgttaattcgcttttgctgcttctgctcgctgattgggttttttttttaatatttattttttggtagcctagcctccaagcagctgccttttaattctgttcatattctttgccaccgcggctgctgcggttgccgccgacttgttttgcctccgaaaaatattcgttgatttcttttgggtttatttttaacatttctcgggcttcgaattatttttagtttgtttcggccaagtggttggttttttagttctgctgctcttaattcagatattattattcgatgttatggcctcctggaactgtgccataaatgttccatcgagaaaggaaagaaggaaaaaaaaaacaaagaaaagaacacattattaaaagcttggaaaaacatgggctcgcttttcttcttctttttttttttttgttgccccgattataatcacttttgtgcatta

SEQ ID NO: 28046 - DNA, 654 bp, DROSOPHILA
atgttgttgtgcgacggacttggcccggagccaccgcggcaaaggcatcgaaatcgaaccagtgccgccaggattagaaaaagaccgaaatgctgctgcggcgatggcggcagcggcaatcaggcggagcagcccggcgggatagttagcaacccaattagttatggccaaagtctgacaacattggcgcgggtcacggcggccgcactgaccacggcggccatgctgcacacaacgaatgccctggctgccaccggctcatccagcgcatccaactcttccaccggcggaatagcactgccgctgggcactgccacacctgccacacacgaactgaatgccacacagccgtttggcggctcgggtctgaacttcaacgaaagcggcgcaggattaagtgaccatcatcatcatcaacaacacaatcccgacgaggattggctggacaacatcgtttgggtgttcaaggcctttgtcatgctgctcatcatcattgcggccatctgcggcaatctgcttgttattatttctgtgatgcgtgttagaaaattaaggaccttcttttactcgcccgcctcgtcctgtcattgctcgtccttcgtgctcgggtctcatgctgactccgtgtcctttatttactcgcctcataattga

SEQ ID NO: 28047 - protein, 217 aa, DROSOPHILA
MLLCDGLGPEPPRQRHRNRTSAARIRKRPKCCCGDGGSGNQAEQPGGIVSNPISYGQSLTTLARVTAAALTTAAMLHTTNALAATGSSSASNSSTGGIALPLGTATPATHELNATQPFGGSGLNFNESGAGLSDHHHHQQHNPDEDWLDNIVWVFKAFVMLLIIIAAICGNLLVIISVMRVRKLRTFFYSPASSCHCSSFVLGSHADSVSFIYSPHN

SEQ ID NO: 28048 - DNA, 3878 bp, DROSOPHILA
cgcggcgaaggtgatgccgcggggccgctgctcaatgatctccgcctcctcctcatccacaaagatgcagatgccgccgcgtcggatcagcgaggatttattggaaaattcgtgctctgcttgcagttgattgttgcattttcgtacgatttcgattgtcaatttggccatggcatttttggggttttattggttggatttggttttggagtagaagtagtttgtttgtttggttggacataatttggtgatttcgatttacatatatacacatacaacacacaacgaaatggcgtggaagagagatagatataaagagatagagacaagtagtaaacaatgtacacagggtatttcacaggatacgaaaggacttcaacttctgagatcacatgcagccatgcaccggcaaacgcaaaggatcgggatcgaaaagggaatggattcagattcattatcgttggctccctgtctctggaagtaggtcgtccctttctgtcttcgtttgcaggtgcaactaactaaatgctatacattatattatatatatatagtaagctagttaactaaagtttcattcgaagcatttgagtattacttttccaatgagggtttataggttctatacattttaaaacactgtatgatttttcagaaattcgcaccgcttttgaaaggaacttaaatacacaattcacagttttcttcaaggtaagaactatatttaaatatggtaaaagttcgtatctttattttaagatcaaaattctagtaagaccagattccttatgttaaacccgaattcaggccaattactcctcaaaaaaacaaggacaaaagaatgtgcgaaaaagttaagtcaaacattgaaacacttgaacttttcgtggaaaactgacaaaaacagaacgaatttctctggggcagatataaattgtcttaaaagagctacttaaatcaagcacgagctatacagtctacacaatgaccaaatggatgactactcacttgcggaactggtggaaacgcggcccatcgggatgtagctgcgactgtcgctgttctcctgcgagaagttgatgacattcacgtcgtaggtcaccacggacgcctgtctcttccgcacagtttggatgccatcgtagcctgccaggatgctgcagcggccttggcggccacccactcctccaacgccaccagcccctccattgccggaaacgctcacgtccgcatcgccggcgctatctttgcgcttgaacagtggcgacgtgacatcccggtgctcatcgccgcatccctcaaccggcgacagcgtggaatcgagtatgatctccggcttgggcgatatgttggactgtgaggccatttggggatttggctgcggcactggaacgggcataggcaggctggtcaccacatccaaggacacagtggatgtgtcactgggcgtataaccaggtgcggcggcatgcggcggcggcgataggaagtacacattgatggacgccgactgcgcgttggaagaggcggaagagtccatggcacctccgttcggcacggaaatggccggcggagccggtgtgttcggtggggacatcagatagttggcgcacacctggtcactgagcgtgctcaggcgctgtggagcaccagccggtcggcccagcggaaagctcagcgagcgaaagatctcggccagttccgagctgctggcaatgagcaggccactcggttctggcaattctggcggcgataacgatggtggcggcgtggccggctgctggggcgactccccaaagcaatcggccagctgcgccaactcgtcgtcgctccgaatcctctcgggcggtgttttcagctcactgaagtcaatcagctgtaccccgtcgctgaactgctggatcacactggctccactctgctcgctgagcacattgatgtccagcaggatgtccggcttgttgggcgtggagtccgtatcgctgtgctgccgctggcgtctctcaagtttgcgttccttgccgccaccgcatccgttgtagctgtgcgacaatttccggttccgggagcgccggaagaagctggatccctcggagttggcctgatgtcgcttcttttccagcgtaaagcactcggtgctcgagcgtttcgtcttcgacagcagggacagaatgttgaagcccttctccttcccgggcactggctgctccggcaacgcccgcgattcactaatggtgcgcaggaactccgaatcgctggaggcgaatgccttacgcccacaggccgctgcgcccgccttcagcctgatgaagtccgtttcactgagggcagcgtactttcctccgcctgggccactgataatggtgccgcccgtctggcgcttaaagtacagatagttgtcctctatcaggcgcttcagctccttgttgtcctcggccagcggcaggtgggtgtcgtacaggtcgttgccctcgctctcgtcgctgttgagaccaccaaagacccggtacgcagtggactccggttccggttcgctgttcccactgccgctggtcaggctgagctgctgttgcgggccattgggatgagaatgctccttatcgagctccttcgaagggatcatcttgccctccgtccatatctgcggattgaacactggcgccggtggctgcaactgattgtgggagggctgctgttgctgcagtgccatcatcgagggagcactgtccgtgtgggtgaccttctcgtaccgctcctgctccaagtccctcagatcgatgctgctgcggctgaggcggcgtggcggcggcgatggcactctcagttcatcgcactcgtccctatcgtcgtcctcgtcggtggccggctgcagcatgtcctgtgggcaaaggacaatcactcaaagggaagtcatggtggcgcatcaattacgcacagccacaagggaaaaggaaaaactctcaagcggagtgcttccctctagcacctaatctaatcgctccacatccgttcattgaggatgggcaaaaagctttagagcaggatgtcaatgttgcccgtttgtatacatgaactgcattgctttaaagtctttgtatatttatttaggatactatctggatgtatcagcaactttaccaaattttactcaataaaaaataaataatgttttattcaactactaagagatcttcagaatggcaagcaaatgcgagtactaaagcatttatcggtttaataaaaataaaacatttttaagtatctctaggtattttaggcatctttggattaatgtgtattttttcattttgaacatctttgaaatgtttattgtttattgaatgatttattgaatttatatcaataaaatgcagcaaaatactcttttggctttcaataaatgacatctgtatcttttcggttcagtaacatttagtaaccttccaaactcacctccaagttactaagcgcactgtgcgtctcctcccgggcggatgtggcattcagatcacagtcactgggatgcagatagctcaggctggtgggctgctgggtgtggcccatgtggacgctgttaaggaggatgttggagctggtgcggctgagggccttgcgttgacgaatcgcctccctggaaaaccacagagcacagatcagcaattaagcaaactcatccactacgaccagcgaccatcgaccatcgaccatccgggtaagaactcacttaaagatgcgccagtacatcaccagcatcacaatgccgggtatccagaagctcaccgaactggagatgagggcgtaggccttgttgaccacaaacgagcactggtccggatgcagggaaatctcccgcaggtgctcctccgtcgtgtaccagc

SEQ ID NO: 28049 - DNA, 1878 bp, DROSOPHILA
gacatgctgcagccggccaccgacgaggacgacgatagggacgagtgcgatgaactgagagtgccatcgccgccgccacgccgcctcagccgcagcagcatcgatctgagggacttggagcaggagcggtacgagaaggtcacccacacggacagtgctccctcgatgatggcactgcagcaacagcagccctcccacaatcagttgcagccaccggcgccagtgttcaatccgcagatatggacggagggcaagatgatcccttcgaaggagctcgataaggagcattctcatcccaatggcccgcaacagcagctcagcctgaccagcggcagtgggaacagcgaaccggaaccggagtccactgcgtaccgggtctttggtggtctcaacagcgacgagagcgagggcaacgacctgtacgacacccacctgccgctggccgaggacaacaaggagctgaagcgcctgatagaggacaactatctgtactttaagcgccagacgggcggcaccattatcagtggcccaggcggaggaaagtacgctgccctcagtgaaacggacttcatcaggctgaaggcgggcgcagcggcctgtgggcgtaaggcattcgcctccagcgattcggagttcctgcgcaccattagtgaatcgcgggcgttgccggagcagccagtgcccgggaaggagaagggcttcaacattctgtccctgctgtcgaagacgaaacgctcgagcaccgagtgctttacgctggaaaagaagcgacatcaggccaactccgagggatccagcttcttccggcgctcccggaaccggaaattgtcgcacagctacaacggatgcggtggcggcaaggaacgcaaacttgagagacgccagcggcagcacagcgatacggactccacgcccaacaagccggacatcctgctggacatcaatgtgctcagcgagcagagtggagccagtgtgatccagcagttcagcgacggggtacagctgattgacttcagtgagctgaaaacaccgcccgagaggattcggagcgacgacgagttggcgcagctggccgattgctttggggagtcgccccagcagccggccacgccgccaccatcgttatcgccgccagaattgccagaaccgagtggcctgctcattgccagcagctcggaactggccgagatctttcgctcgctgagctttccgctgggccgaccggctggtgctccacagcgcctgagcacgctcagtgaccaggtgtgcgccaactatctgatgtccccaccgaacacaccggctccgccggccatttccgtgccgaacggaggtgccatggactcttccgcctcttccaacgcgcagtcggcgtccatcaatgtgtacttcctatcgccgccgccgcatgccgccgcacctggttatacgcccagtgacacatccactgtgtccttggatgtggtgaccagcctgcctatgcccgttccagtgccgcagccaaatccccaaatggcctcacagtccaacatatcgcccaagccggagatcatactcgattccacgctgtcgccggttgagggatgcggcgatgagcaccgggatgtcacgtcgccactgttcaagcgcaaagatagcgccggcgatgcggacgtgagcgtttccggcaatggaggggctggtggcgttggaggagtgggtggccgccaaggccgctgcagcatcctggcaggctacgatggcatccaaactgtgcggaagagacaggcgtccgtggtgacctacgacgtgaatgtcatcaacttctcgcaggagaacagcgacagtcgcagctacatcccgatgggccgcgtttccaccagttccgcaagtgagtag

SEQ ID NO: 28050 - protein, 624 aa, DROSOPHILA
MLQPATDEDDDRDECDELRVPSPPPRRLSRSSIDLRDLEQERYEKVTHTDSAPSMMALQQQQPSHNQLQPPAPVFNPQIWTEGKMIPSKELDKEHSHPNGPQQQLSLTSGSGNSEPEPESTAYRVFGGLNSDESEGNDLYDTHLPLAEDNKELKRLIEDNYLYFKRQTGGTIISGPGGGKYAALSETDFIRLKAGAAACGRKAFASSDSEFLRTISESRALPEQPVPGKEKGFNILSLLSKTKRSSTECFTLEKKRHQANSEGSSFFRRSRNRKLSHSYNGCGGGKERKLERRQRQHSDTDSTPNKPDILLDINVLSEQSGASVIQQFSDGVQLIDFSELKTPPERIRSDDELAQLADCFGESPQQPATPPPSLSPPELPEPSGLLIASSSELAEIFRSLSFPLGRPAGAPQRLSTLSDQVCANYLMSPPNTPAPPAISVPNGGAMDSSASSNAQSASINVYFLSPPPHAAAPGYTPSDTSTVSLDVVTSLPMPVPVPQPNPQMASQSNISPKPEIILDSTLSPVEGCGDEHRDVTSPLFKRKDSAGDADVSVSGNGGAGGVGGVGGRQGRCSILAGYDGIQTVRKRQASVVTYDVNVINFSQENSDSRSYIPMGRVSTSSASE

SEQ ID NO: 28051 - DNA, 3011 bp, DROSOPHILA
gggagaacgaccattcaaatgccccagctgcccgatgaccttccgactgaaatcctttcttaaaaggcacagcgccctgcatttggaagaacgaccttacccgtgcgacatctgtgccaagacttttgctgacaaaagtaacctgcgccagcgcaagaagacacactccgacattcgacccttcgactgcccttcctgtctgagttccttccgattgaaaagccacctggaccgccacaccatgagtcacacgggcgagcggccatttaagtgtgatcactgcggtaaagacttcacgctacgctgtaacctcgtcaagcatttaaggacccacaccagggaacgtcccttcaaatgctcaatatgaaaatcggcctttacgaacttatcgagccccattgcatgaaccatcgaatgaactacctttccagtgtgatcggtgcgacaagcggtttgtggatagggttcgtcctgactgccagtcccgtttctcgacgtcatccgacctccaccagcccggactggtacacaaggcaaaagcaaagatactagaataattctagtgtctttggcaaaaggaccttttacgtgaagtgtgagggttgcggtttagtccttaagaatatgattcttcttcgaaggcatgctaagaattacggcaaggcgttaaaaatgtaatcttatcttagccaaatacgtaccaaatacgtatttattataattttgttatttttcattcaagaaacgttttcaagctcgataacagttcggtaacgtaacatacatattcttttgcgcctaacagcccactgttgtgggaacagggtgatcattccactagcaaactgaatgctatgccaaaatggtaaacaaactattccctataataaataaaccgtctcatttaatttgaaaatatttaaaataccactacatatttatttgtaattacctttgatcgatttgtataggcggccaaggtttattaaaatacagggtaatggagaacaagtgtcgagtttgcctggcaagctcaaaaaacatggtgaacattttcgaggaaaggcaggatcttccagtttcaatagcccatatgataattgaatgcaccggcttcaaagttgaaaaaggggactcattaccgcactcaatatgcccaccatgtgtgaaggatgcccacaatgcgtttacgatcataaaaacctacgaacgcagctaccaggtcttctatgaagtgcaggacacggttctcgaggaagaactctcggaggatgtaatcatcgagctatcagactccgacgaggtaatactcatcgatgaacaagaggagaaagttcatttgagtgaaaacaaggcacctacgaatgaagtcagcacccaggaagaatctaaaactgctcaatccgacaatgtttccgaggataagggtcacatctgcacacagtgtcacatgtcctttcggagacctggtctcctagagctacacatcctgcgacaccacacaacggacggaccccgtccaatgtcctccaccagcgagcacgcggtcaaagaagagttgaggacgaaagccagacagctttcaaggaattctacgcacacctgccgcctttgtaacaagaccttctgcagcaaagcaagctgtgtccgccaccaaaagacccacacgggggaaaaacccttcgcctgcgaaatttgccaaaagccatttgcggatcttgcttccgtcaaaagacatctaaggactcacacgggagaaagaccattcaagtgccttacctgccagtcggccttctcggatggatctgctctaaggcagcacattcgaattcacacaggagaaagaccgtacaagtgcgatatgtgcgataagttcttccgggagcggtcagatgctcggaagcacatgatgagccacaccgcagaaaagcgattcaagtgttcccaatgcgagcggcgtttccgccaaccaaaaggtctgcgtaggcatgtaaagctttgccatacggacaaggtcgagaacgcggctatatcttaagcttcatttagtttaaacatttaaaaattaattattttttttaggtataagtataaaacgctcaataaaaatgaataccatctgggatatatttaaaaaatcttaatattccaatagaatatttatatgaaagcaaacacacaaatctagcacaacattctttgaaacattatgaaaaaggatcaaattaataaccttaaaattgttcttttgggcaaaaagttaaaaacaaaaaagtaactcttgtcatcgcagtcggtaggattcgaacctacgctcccagagggaatctgatttctagtcagacgccttaaccgctcggccacgactgctcttgcaactagtgatgtcaaatccagtgttagcttaggtgtagagaaactgtaaccgatttaacagcgaaatttgaaatatggaaaaatcaaaagtgaaataaagggaatatttttgtccaactgttatttatttgtttcattatacatttataaatacatttacaaatacatttataaatattctccactccactacattggtaaacaaatctgactatcaacttggtaaagttcagaaaaagtatacaaaaatgaagccgacgttgggcaaactttcatttggtttctctttgatttccgtgaaatgcatcatagtacaaaatgaatagttcaaatcatattcacacatacaaaacgaggtctacactaaggcaatattcttgctattttatatgcttgtggtgcggtcgaggacttataatttataattactgtcatacatcgtatattgtgtgcggcgtgtggtgtacatttcttgcaactagtgatgtcaaatccagtgttagcttaggtgtagagaaactgtaaccgatttaacagcgaaatttgaaatatggaaaaatcaaaagtgaaataaagggaatattttttgtccaactgttatttatttgtttcaatatacatttataaatacattt

SEQ ID NO: 28052 - DNA, 1136 bp, DROSOPHILA
atggagaacaagtgtcgagtttgcctggcaagctcaaaaaacatggtgaacattttcgaggaaaggcaggatcttccagtttcaatagcccatatgataattgaatgcaccggcttcaaagttgaaaaaggggactcattaccgcactcaatatgcccaccatgtgtgaaggatgcccacaatgcgtttacgatcataaaaacctacgaacgcagctaccaggtcttctatgaagtgcaggacacggttctcgaggaagaactctcggaggatgtaatcatcgagctatcagactccgacgaggtaatactcatcgatgaacaagaggagaaagttcatttgagtgaaaacaaggcacctacgaatgaagtcagcacccaggaagaatctaaaactgctcaatccgacaatgtttccgaggataagggtcacatctgcacacagtgtcacatgtcctttcggagacctggtctcctagagctacacatcctgcgacaccacacaacggacggaccccgtccaatgtcctccaccagcgagcacgcggtcaaagaagagttgaggacgaaagccagacagctttcaaggaattctacgcacacctgccgcctttgtaacaagaccttctgcagcaaagcaagctgtgtccgccaccaaaagacccacacgggggaaaaacccttcgcctgcgaaatttgccaaaagccatttgcggatcttgcttccgtcaaaagacatctaaggactcacacgggagaaagaccattcaagtgccttacctgccagtcggccttctcggatggatctgctctaaggcagcacattcgaattcacacaggagaaagaccgtacaagtgcgatatgtgcgataagttcttccgggagcggtcagatgctcggaagcacatgatgagccacaccgcagaaaagcgattcaagtgttcccaatgcgagcggcgtttccgccaaccaaaaggtctgcgtaggcatgtaaagctttgccatacggacaaggtcgagaacgcggctatatcttaagcttcatttagtttaaacatttaaaaattaattattttttttaggtataagtataaaacgctcaataaaaatgaataccatctgggatatatttaaaa

SEQ ID NO: 28053 - protein, 345 aa, DROSOPHILA
MENKCRVCLASSKNMVNIFEERQDLPVSIAHMIIECTGFKVEKGDSLPHSICPPCVKDAHNAFTIIKTYERSYQVFYEVQDTVLEEELSEDVIIELSDSDEVILIDEQEEKVHLSENKAPTNEVSTQEESKTAQSDNVSEDKGHICTQCHMSFRRPGLLELHILRHHTTDGPRPMSSTSEHAVKEELRTKARQLSRNSTHTCRLCNKTFCSKASCVRHQKTHTGEKPFACEICQKPFADLASVKRHLRTHTGERPFKCLTCQSAFSDGSALRQHIRIHTGERPYKCDMCDKFFRERSDARKHMMSHTAEKRFKCSQCERRFRQPKGLRRHVKLCHTDKVENAAIS

SEQ ID NO: 28054 - DNA, 22052 bp, DROSOPHILA
ggcctctattttggtttgaatgttcgctgtatccgggtcgagttggttaattctattcaatagaaatgctttcttcgctctccataattatcccagcttaatctcggcaaacctgataaagtttatagccctcaagcttttaactggagcgtggctcttaatgagccggtgtgttcttaccatccgtaatcattataaacttttctccacttctgtatgtgtacatacatgtgtatagcaagcaagcattttgtattttgcatacaaactcggtcgaaaagcaacttttgctgttggccaactgtgacgcgaaagtcatggcgacaatatttgaaaaactcaaaacaaaatatataattacatttgccgcaaaaaggttaaaagttgatatgtaaagggggcggttgctttcgattcgatatatgtaggcgttgaatccatgtggtttccgaaatctgttatttgacattgacacttgggtcgtgcgggacgctggaaattcaaaatattttaataagtttcaacaaaatttgtttccgtcataatatcctgctattctagtttcaaagcgtttttgaaattcaaattcaatctttcgtcgaatgtgctgatttacgttttacttgaggacttttttgtaaggcagcaatttggtggcaagcttttgccatatcattcgctgcacagtcgctggaagttcgagttggagttgaagttgaattggagtggagttggaatcgaaatagcaagacccaagttaaagccggtgaccgaaagcagcgacgttggcgtcgacagagagatcgagaaagagagagcgatcactgtggggatacacttcagttgcgcggcgaactccgagaccagcggacgtcttttattcgcgcagtgtatgaccagtggctaaccaagcaaataaccaagtagcaactgtgtataacagtgcaagtgctgcccagtttgagagccactgacagccccaggcgcatgctccacaaaaatgggtctcaacgagtttgtgtcacttttgtacggctcctcacaaagtctgaatgcccacaaggacgcgtccacgtccacgtacccattgccatcggtcgcggattggaaagagtttcagcagatgttgaaaaatcacaaaaatgtgcaggtcaagaggtacggcttccaggattaccatcactcgcaggactttaagtatggcaaaatatattcgggaatcggaagcgcagcagaagccgcaggcaatggcggcggcggcggagtcggtggaggagtgaccaagaggaatgcctccaatggcgctggccaaaacaaacttctgaacaacaacagcagcacgcataacaacaacatggccaagacatcacggatacccacaaccacctcaaagtccatgacttcctcggcttcctcctccggcagcagtgaactggacattctccgctcgtacacaaagaataccatcaaatcctcgctgacatcgtcgacgccatccagttcctttctatggaactcctttcgcatgccacgcaaacagaaatcttcgctggccgaaaagaaacaaagcggcggtgagtagatgaaaaaaatcaattcgcatactgggaaagtatgctgtgcacaaaaatagatactagatatcagagtggtgatgttcctaaaactcactatctgtaccaaattgttaattgcctggagcagattgtgatttagatttagattccgagtgacccatttagttctccttttctccttcactaagaaaacaatggggaattgtttttttttttggtttctggccgtcggctatttggctaacaaggtagtgaaagatgagatgcgagatctttgagttgggccacacaaaacccactgtgaatcgcattgtataattcgaaaattgcttgggcatgacccacaacccaaagcaagaggaagaagaagaagaagcataagtctaacggcatccaaaactatcttagttatagggtatgaacaatcttatgttctcgactaatgccaaacgaggcgttacaataatttccactgaagtcatttggtgtctgtgctcctaatttccgttttttaatactcttcttcaacacttctttttttgggtttttatgctcagcttggcaaatacgatatttcgttttttttttgccatttcattattttggctcaattatgaaacttcgcctttggctgaaccgctaaaaataaactcaacataagtaagaaataacatcttaattgctggagtttttcctttttcatgtgccaagtcatttatttggtttgaatgttgacacatagtgagatcaccaaggcaaataagtgatttgacaaaagtttcgatggttttagttgaacgatcattagatattgatatgcttattttttggcggtaacccttgtataagaaaagttactataatagatggacataacatatcatcccatacttatttcgaagtttgtgtccacttcaatactttccctatgatttcttggctctattggctgtccctgattctgtaaatgtgatatcctaactgattggcaagtcttatcggggccattaagtatttatgattcctaacacttttacacgaaaacattgaggcatattctgcgcatgtctcgccatccgaaggcgcaacaagaagtggaaaaccgcaagctggccggttggttcactcctcttcttggccatggaccaatatcgattttcggagggcgcctactctgatatgtctctgatattacagcctgttttttctggtatcttaagaatccccgactaactacccccgttgatgatgatgatgacgttgatgactcatcggcggcgagctaccccaacaaaaaaaagtatccaaaactttctctctctgtgtcgcttggctcagcataaaaattgcataatgtactttttcgcttgtgtgtttgttgtgtgacacactgacactcattgtgtatgagatatatgacagccgcagcggcaggacatgcgcagttcgtcgcagagaggctccactgttataacgctcttgtttacagtgcccgccaaactgtactgaaacatttatggtgcgttttccctgggcttttaatgttttcatagcgcgaagtgaattaatacatacatcaaaaagagatggtaattaaatcatagctgctgtgctcattaacggtgcggttgcgctttttggcgctaccaaactgtgaccacatgccttttcttaatggagtcaagtgcaggcagaaaacaaacgaaagaagtccgcatccaagtggcggcttctgggcaacggagcgcaacaaattgttgccactggcgggccagcgaatccagtgagaatccggggagaaaagagaccgccacttgattgatccatgactttcggtctcgatttttggccgacggccaagttgtcaagcgcggaccacggggcgtatgcgcaatgccatttaatagccacagataagcattgaacttgcctttctcccggccaagattgccccgatagcccctataattaaggccatgtgcctgttgcagctttttattaagacatgtggattctcacactaatcgatatgaaatgggtttagggaactatgttaataaaaggggattactagattgcaaaaagcttagcttggcctgctttaaaaatggtgaaatgcaatagaattcactggagtcaattaaaagttaactccaattgtgaattttagtaagccataaataaatttgttaggctattaacacattaattagtcgaattaattaaatacttaatggctttataattatgattttctatcgcacatggttttatggtttttctaatttcgcaaaaatttccagcgattcgccacgctgcccaccttccattccatttgcgcgttataatttgaaatttgtgcgtggataatttaataactttgtgttccccatccgaagtctttcgccattacgctggcctgtcattccccccatttctatttgattctttggccaatttgtcgcgacgcagtgctttgtgaatggctcggcaggccaaataaaagcgaaccgagagagaccctagataataaaccgtgccaccgacttttccattgaattacgcacagcgacgtggaaagtgtcgagctttttcgctctctgtactttgtgtctgtcgatggcagtgcaattaacacttgttgacaagttcactgggccatgcttttacttaacgtatttaacttattgcgtgaaccgcccacgctctttgtggaacaacaacagctgccatgattttgtggcattaaattttgatttatattgggtcattaattagcagccagcagtcgcccagacttttggcttctgtaaaaattaattaagcattgctcatacgccgcgtggcccgctcgtttcgagcgcctgctatggcaattacgtgacccccagtgatgcactgcgccatcctcgactgcttttgtcaccagagctctccattgagcatgataataatttactatgcctcagtagtctccttctgcggctgacgtcacagtttgattttgtgtctcttttaattatggatgatttttgtttattaatgcaaggcgtacatgaacatgatgtacactagaaaaatattctaatgaagacatttttttctaaaattaaaattacgttgtggaattctttacttaaaatatattcctgataaaatggaatttacttttcttatattcacataagttaaaagttcttaagttcgaattttacgtccgattttttccattgtgtacttgtgcgccatttgtgggatcccataatccaccacatggtgaaatcaggccccaaattagcaacaactgcgtggcgaacgatcaacaacggcgaacaacgaggaagatcgacgatgaacaacgaagacacaacgacaacgagaaaagcgcgcctctttcgtttgaattaaattcactaacagtttatgcttagaagtttgcgctatcgcgtcgctcgttcgttgttcgatttataaattttcaccggcggttagccattttttatgtcgtgcgtacgccgagcattggaaatcggaagtggaaaatgtgaatgcggtgatgacaagcagtgcctggaaatcccagtcaaagggctcaacctcattagcgaggttcccaagtgtcgccaattaaaatcgatccatccgccatggcagctacgcgtccattaattgaaatcccagtgcgaaattaagccaaatagagcggaagcacaatgatggcactgtgcgatgtgggcggagctggatccaatgcatccactggatccgatggagctgtcaacgcagatttgtttgcgaactgcgattatgaggacgagggaattggcggtaagctggcgctgggatttcaaattgataagggaatgctttagttttccttaaattctaccatgtatctgaaattaaattgttgaaatatcaaagttgcgtcgcaattttcgtttttctcattcactcgtttttcaatgcaatttatgtttgtatatcagcaaaataaatgttgtgcaaaataaatagaaaaggccgacaagccaaatattaaaagcaacaaagctgaaaccaaaaagcatatgtacaaattttgatgtctggcctagaactttggcacatagcacaaacatgaatttggcataaacatacacacagtaggaaaaaaaaattaaattagtgagtgggtattatgtatatgaatatttattagaatttttattaacaaagcatttatttattattttctttaattcaatgtacactcgattcataactgcctagggtattgcacatttcaaaccatttcaatgccactttcctttacttactcatttgctttccagtcatgaagcttttttctggggtctttgctatcgtgggactttggttattattttcatttgtataacaaccgcaaaataatctgaaaatcatatataaaccgatgatatatgcgtagtaaaagttcgaaattaaacgcacactcagtcatgtaatgattaattagacatttggtatatagtgcactgatttcgtttattttgcgctttttgttgtgttttttttttggctggcaaaagcagaacggtcaatgttttcgtgcacaacttatctaaaaataatcattagaacttgagccaaaaacgaaaagtgttttaaaggcttatttagcctctgagaagcgataggaaaatgaaatgaaaatgcgccaagcgacgacgactgtgcgaccttgaaatgtgcgtttgccgagtgaaaatcatgaactacaaacaagaattaaatacaataaccaccagccataatggatgaaataaaaaatccatgccataaatcccttgatatgcgtctttcatcactgccaacatcgtgggcagtttgaagtgagtttttctgccttttgactctgcctgattgacattctgcagaaatcgatcgtcttcatctacatatatatcttaagatccatatatgtatgtagaatgggctgaagagatattccgctggccctattaccgcccttaattcgtatccactgtttattgggagttgtttatagcgacgcagctgctttccttgattttcaagcaaacaaattggttggcacaaagcataatttagtgcaaatactgtttacattttgtctcattatgggtcggtgaaaagcgatttgaatgacgtgctcatctgttgttttcaatttcatttgggggaagtgtaaattttggttgttcgaatgttgatggctcttccggcttgtaaagtgtacaatatatatattaattatagcaccacagatcttaggcaactttttgtataaaaaaaagcagcgattgtgtatatcaaactaggcctacatactgcgccccttaacatttcttttaatgaattattaaaagcttttggctatcaagatccttggaatttccatgttttttttttttttgcattaatgaatccgctcgcatacttgagatatttcttcataacataatttgcacaaaatcaccgccaggcacttgactctcgccacagaaagtgcttctgtctcgttgctaaaacaatttgttgttaaattgcaattaaagcgttgtctatttcgctacgcacccctggaacccttcacccctccccatcacatcaaccgactcgactgcaaacactgtgaaataaaacagatacaaagttacatttacaaacagtcgagtcgagtgaagtaaagtgattttggctgcttttttcgcttctcccaaaaacgcagctaattgaaatgccagtttgccagttgccagtttcgactggctgctgttgttcgcttttaattacgcgcattttcattggacatgtttttgtgggtcgccatgggttaagacgggttgttgctgtcattgttgttgttgtcggccagcaacgagccgagttttccaaaatcaaaaaaatccgctaaaaaggcgacggcaacaacagcagctgcctaatgccaaataagatatttcggaatttcaattattttccatcgcccagtgctgcaggtacgtccgtcccacagtcccgctgtcccactgtgcagcattcaatgtcacacagtgcccactgtgcacagcacagcatcgcattcgcatttacctcgacacatgtcgggttttggcgaaccgagacccgagacccaaactaaaactcaaatcccaacccaaaccgtcattatgagctcggctgaccgaatgcgaaccctcccggagacactgactccgaatccgaatccgaatctcggtgcgctgatgttgattgatcttgggtgggggagagttttccacacctggtggatggtagatggtggatgtcggatgtcagtggtgacggtggaaagccaccaacactttctattaactttcgcagtaattgtaatttgcgtattttcaaaagaggcatgattttgggcgaaaaaacgatggagcattttatatattatttaaaactgaagttgatagcctttgtgcaactacaagtaatacaaaacccatacgaacctctttcaaaaacaattacacccattcacaccaaattgtcggcggtatttgggaaaatccacgcgcccatgtcaacccaacaaaaaaaaaaaaaaaaaccaagcagaacgaagaatttctgaatgaaatcacccgctgctgagtttttccgagacccataaaaatccaagtgcgaaatgggctggaaaatgggaatgcgaacggaaaagcatagattccggccatataactactgaggtggtcggtttctcagccataaaatgcagacccatcgccatcaggggtctgggtcactcctcagatatgtcagcaacttgttgcgattctacgcgaagacaaaacagggctgtgagaatattctgcgcgaaatcaggggaaaatccgcaacaggattttcttggccttgcaattaattggtcgtagctaatgtcacttaattgcctaattgccatgagaaatgccgtcttcaaaagtcgtgtgccagacttgtttcggtcgtgtgtcattgagatctttcaaagtcgaggtggtggatgaggtccacaggtgatgctgaaggtctgccattaataattatcattaaatatgttctaggaacattcgtgggatatcaaggggaaaatccaattgcagtgcctcaatattgtctgcataatgtccaacttgtctttgcccaaatcaaaatgccattcggaattttgaaagccagcaataatttatgtaataatttatgcttcgatttgctaaacaacataacacatacatttcagacgaatccggtttctttaaatcacagtttgattggtaaacattgcacaatcaattaatgtggctaaaatcgaacgccatcattttagccactttgctggttgtctttgactaatttgttcattattttacaaccttaattaatttcctgaagcagcgggttttgttttatggtagagcttgtatttctctcggggaaaacatagaatataaatcaaatgtgaagttaatcctacaaagaaactactctctctgattcgctatcaattttgttagtattaatttactttcgatggctatagacatacatcccggggtaatgatcttgacaacaactccggaaggcttacaagcttaaatttgctttcgctgcaagcaattgcgatgccaactctagcaaacatgtgcaaacattgacaactttgtatgcgcgactctggctataaatttatgcggtaacataaaaccgtcaacggttgattatggccacacattggatatacatttgtgtatatccatgccgtaaagttttgggcttggccgcagcttcgatttggaatcgggcagacggacgacggcatggctagtaaggaaatcgggccaagttatggccaagcagtcgggctggctggctggcttgctggctgatcgatggtttgatcatggcggggttgctgaactccctcccgccacttttcatgccacataaatatatatatatctatatcccccccaatctgaaggcttgtcaaggccaatttgttgaccaaaaagtggccacgcatcctctctaattgacggccacccgatgcgaggagccatggctatcgggtaattgatgatgatgagatggcccgcctctgacccaaagtggtatttagctggtgacggagggcgtggtgcgacttacacctagatatatagctttcccttttgtcaatggaattatgctgtttttttttttgttttgttatttttgcggccacgaagcaattactcatgtaattttttttggcctggagaagcgtggtggatccacagctgggtgaatcacggttagctcatcatcgttagatcatcaacacaacacctagattttcatctgccagttgatgagcgaagactttcgccacacgaaacttgcgtaatcctagggatttgttgggttacaatttgataataagtggcactttcgatttcgcgttcggcaaattcataaaatggtttcacgttgaaataaagcacttctgaccttgttgtttcttgtgcctttccagaatccctgcgctctggcgtggatcaaaccgaacttcaggagctgaacaatgggcaatctgctaccggttgtccgacgccgccgatggcgcgggactcaaagcgtacgtccattggaaatgagttaccctgtgagacggaggccaagttgaagagatgcgaggaccagcaggatccacaagcatccacgacggcatcacccctaccgatgatcaatccacaggaacaagaagccagtggccaggtcaaagaagcaacaatcaccactgcaaatgaggtaaatcgattctaaatgtatatatattattatttatatatattcacaatcgtcgttattttcatattaaatattaatattaatcatatttaattttgaaaaccagccaaacgccttgtccttgcccgacgaaatcagcaattcggtcagctcgacgacgatgctggccacgccccgcgtagacatagccgcccagtatcccgtcctgaaaccattcacagagaacggagagctggactgtgcccgactggccaagttcttccaggacacccagttcgagaggaaggaggagcaacgccagattctgggcctctccgtaatggtgcagttcatgtccaaagaggtaagtcttaaagtagcgagtagcgagtaactagtagcgagtactgaaggatcagtgagggatttgccaggaaaacaggcgccagggatttatatccctgccatagccctttgaaggcaaatcgaatagatgccggtatagacacttttcgccgtcctttgtaattgccaggcacatgtgccggatcgcctcggatcgggatcacctgctctaataattcccgaattgttcacatatacacgtgctcgtatgcacgactcattgtttgagaaatttgccttaatctacgcttaaagttgagctaattttgtttaattgtgtcagtgccggctaagccgagcccctgaaaactgagccggggatatgggtgcactttttgtgtttgcgctaattaaaaactatacggaaattgtcaaacaaaagttggaaaaatcccccgaacccgttcctttgtccctttcgctttgtgtggaagcctttctccgtcgaaaaatgaaagggtgtgagacggtggcacattcaacttgatccacgaagcagctattcaattaattgtttgccatttttcggtgtaaaggattctgatagaacaaaacgagaaatcgtggatatacgtgtgagttttggcgagatttctgcttgaaaagtatataaacgctaaaggatgcggaaaaatgcggcttaggcaggctttttttgtaaaattttacctgttattttgcaggcaggcaaacctcacttaagtaacaataacaaggcaataaaaatccgcgacaaacgcgaaaaacattattttaacatttgcatatattggcggagaaggaccatctctacagacatcatctacgcacatcataaatcgatttatgatgatgtttgtctgctgacttctcaaccacaattgatttacgtagaaatggccaaattccgatttgccctcaacttgtcggaacaacagatatattctgcatctacacattttccccaagccacctatgtgtgttaccgaaaatgttgacaattgcgtatagccattgtctttggggcaacacatgcagaatgctgtcaggataatggaaacaattgccaggaccaagctgctgctgctgcttcagctggaaaatcaaccgatttaggcggtcttatgcaagctgaaagtgacacaatacacagaatgaaaggataattccttgtgccattgtattgatgtcatttgagttggtcatttgcgaacgattctcttctcttcacttttttttttttgaaaggaaagtcattaatgtggggaaaaattccagaatcctttaagctgttgtcggaatttttgcaccttgagctggggaaatttttgcaggaagttgcaaagtaggaaaaaaggaattaaaattctgcagctggcgaaattcctttctttaccgaagtaaagacatattttaaaatatatttccgatgctcccatttcatatgtaagcttaagactgttttcaacaatttttttcaccattttaaactacaaatctgtaaatggcacagaataaattgcttaaatcctttcgttgcgcaagcaatttgcatatttattcagagttcttgtgtttgtttaaggcacgtttcgaaaaaaaacaaacccggtgttattagagggaattacgggagagtacaccacaatatttggctaacttgttggacgcggctaccggtcaggccgcaaatgcaaacatgcaggggatttctttggccggatggaaaattccagggaacgcggcaatcgtgcgcaatattttcccactaaaagcctaaactgatgttccaatagttgcaacacaaatatttatttagatgtgatccagcgagatttcacagctcggtgtgaaaaccgaggaagcaaggtaggacacaaggacatcacatcgtttgccgaaggagaccaggctcgtgtgcatttttattaggtttttacgatgcgctattaaatgcgaaggacaatcgccgttgctttaaatccataaattacaaagtgcgctacgtgaaattgcctcaactgctggcgaaaggattaaatccagtcgagtcgagttgagctgagccagtttcacggcggcaagtcactaatttcaacactttaattgcgaacacgtccttgtcaggtaaataaatgtcgctgtcttcgactggccatcatctacaatctactccgactgtcacccatcgagacattgagatttcggttgagacagagatttcgccggagacagcaacatgatggctattaatttgctggacaggatcgacggcgacggcaggcgtggttgaggcaatttgcaatcgctggtcggcaactcttaatttggggatcagatttggctaggcgactatcgagcacagcaatttaaaaccagttaaataataatttggataatgttgtaatttataatttatatttcctttcttaataaataaataaatagtcaagtttatgtttgagttttatgatttatattttaagttatttcaactgcaacaccagcaccacgacctactcacagcaaaaaacgtacaagaaggaaagaaggaataaaaagagtggtattctcttacaatatgttttatggcataaaaggtgtggccattcatatcaaatataaagtagtgttgtttaacgttatttttgtaggttgaatagtatattccaacacgccccctcaaaaataacgtctataattaaaaacataacaataatattcattagtaactatcaaatgtgggtggtgtgcattctgggaagtgttaactgatccagcatttgctgcgaggatacggggaaaacccagaaaaacccgatcagatcattgtaacaaaatatgtttacaggaatttaaatttgaaaaatatatataaaaatttcattcagcattcgattggtcgtcttgcagcaaacccaatttgtctcgaactccacaaatctcgcagcaggcaacggttttgtaaatatgtcagccagttgattctctgtaggaatatactcaagacaaatcacatttattctgaacttgctctctggcaaaatgatatttaatatcaatatgtttagctcgtttatgacatgaggggttgtttgctatgctaatacagccttgattgtcttcgtaaattttaatggggttttctagtttaatgttaatactagttaataaaaatttaagccatagagcttctctcacggcttcaaatagggccatatactcagcttcagttgatgaggctgctactgagttctgtctcaagatatttactgcagtagttaaatctgggcgtgtacaaagcattatgtacattaaacatcctatgaggctacggcatggggtattgcagtcttcatctgaattaagtaattcataatttattttactaggtaaaggagtactaactgcattacaattttccatgttaaatttacttaaaattttttttaacatatgcagattggcttaaatagattttatcttcatgcatctctatcctaattccaataaaatgttttatttcatttaggtcagtcatcctaaacttttccattaaataccttttgaagttattcattcttgtcatatctcctgtagctataaccacatcatctacatataataatacatatatgttttcattgatgttacctttgtctaaaatatatatacagcgatcaactgaagagtttacaaactcacactctttcaatgcttgctcaaatacttcaaaccagcatctagccgcttgcttgagtccgtaaattgccttattcaatttacacaccattgtcactattacaccgatataccttgaggaagtctcatataaatttcctcttttaacgtgccatttaagaaagctgtttttacatccatttgatggactttcaagttatactgtattactaatgacaatataaatcggaaacttgaaattctagctacaggagcaaatgtctcttcatagtctatttggtatttttgagtgaatcctcgtgcaaccaatctagctttgtatctaattggatttccaagttcattatatttaacagaaaatacccatctgctatctacaatatttttggtttcaggcctttttgtaattgtccaagtattattaattttatgagcatttaactctgtattgatggcttcttcccaagaagatttatcatccctatattgaatttcatcaaatgaatttgggacatcgttaaatatagtgtgagcatttagaacaactttatttagactattatcctcttcattataggatatctgaggcttagtctttaatctctcacttcttctattaataatttctatgccatcatttttagttggattatcaattccaatttcttttaagtgctctgctgtttcactttccctactctcattcggggttgcctgatcccttactttcattcaggtgatcatctcgctttcttttcttactctcaattcagaaaatatttattactttcccttactatctttcaggaattggatgttggcgcattccttactctcaattcgggaactctgtttgtattattttcctactgtcattcggaaaatttttattttcactttccttactatctttcaggaattgtatgttgtcgcattccttactctcattcgggaactctgtttgtattattttcctactgtcattcggaaaatttttattttcactttccttactatctttcaggaacactgtttcaaatttaacagctctagaattaaccatattggtttcatcgacaacaacatctcttgcgacaataaatttttcatttacagcatcccacaacttaaaaccattgggttcatagcccacaaaaatacttttaaatgatttatcatcaaactttccttgtttgtttttaatatgcacataaacagttgcaccaaacactctcaaatgttttaagtatggcttcttattgtgccacatctcatatggggtctttgaactatcaacaagtgctctgctaggaattctgttgattaaataagtagcagttaatactgcttcgccccaaaagcttttatctagctttgcaccactaaccatggttcgagctttttccgtaatggttcttatcattctctcagaaacaccatttaactgaggtgtatgtggcactgttaagtgataagaaattcctttcttaacacaaaattgtctcatctcatgtcataaacgaaaattatttttatgcttagcatttatagaatatgcttgaaaattgatcacaggtacattgtttaacatacctgaattttttgacaaccattaacccatttttcgaaatggttacaccgcttttgtcaaattcgatcgacattcctgcctcttggagacgctttacggacatcaaattaccagcagcttccttacaaaagagtacatcctccagtgtaatctcatggtcattccgtagtcggacaataccacgcttagtggcataaataaattcgccttgcttggccactgcaatcttaagtggaggcacaacctccacactgtcggtatacagcgactcatcatttataagatggtcactagcaccagaatcaaggacaaacccgcagttgtccatcactgaagtattattcacttcttttaccataaacgcaatgccgtgtgatgttgcagtttgaacttgtttttcattttctttatttttattatttaatattcttttataatggaaacaatcttttttaatgtggccttctctgccacagtggtgacacttgactttatactttgaatttcccttgaatattttctttggtttagttacccgatttttaaacaaattatttttataagtgttattattggtgtgcacgatcgcgttcataactttcttgcttgtatcgttgtggtcatttttaattttaatttcttgatccagcaatctatttttcacaaacgccaatgtcaaattttcttcagataatgtctctatcgctgtaataattccatcgtaacacgaaggcaatgtgatcagtagatgagaaattttatccatctcttctatttttgcaccagctgccaacaattcacttataagttcgtcaaaaatatgaaaatggcttaatagtgacatctcactcgatagcttcagagaaagcaaacgttttcgcagcgccagttgcgacgccaaactttttcgttcataaacggcgtccaaattctcaagaatctgacgcgccgtaatgtcgcttgttgcgaaatttaaaaacgagtcgcttaggtactctattattggactttttgcacaacgctctgcctttttccaggagtcatctacctcgttaggcattaaaccatcaactactttaagcacatcttgctcggctaaaagagccctaattctaaatttccaaatcgcgtacttctcgccatcaaacggcttaatattacgtttagccttgtccatttttcactcaaattctgagaaggaaataatttcacaagaatgtgaaaaaaaaagctatttcacaagaatgtgaaaaaatgctatttcacaatttattttcacaatctttaattcacaatttaattgtttattaggcatggactgggcccataacctgttgtaatttataatttatatttcctttcttaataaataaataaatagtcaagtttatgtttgagttttatgatttatattttaagttatttcaactgcaacaccagcaccacgacctactcacagcaaaaaacgtacaagaaggaaagaaggaataaaaagagtggtattctcttacaatatgttttatggcataaaaggtgtggccattcatatcaaatataaagtagtgttgtttaacgttatttttgtaggttgaatagtatattccaacagataactatagtgcacacgggattttcatctaagaaacaaactatttaaaagtatttgcctactacactcgcctaaacacagttctttacgctaatttatgaactaaactcctgtgcaaattgcgatttgcaatagccagttcgaatttgtgacagacacttgagaatcgtttccattaaatccagtgtgagatccttcgaggcgctccgaaacttcgacacgcatccacccaaagtgttgcagagaaggtgcgcgccattacggcggaattgaagtgccttctggacgccccaaaaacggaaaattgctttccaccttcagctggcggacgcgtgaccaatgcctcgatgggttgatcccaaaccacatgaagttggccagcgatcgctaagcctttggttggatccgcccctaagaatcctcggttaggcagggcgtggcccaccaaaagggatacacccacccattgcatggctcagtttttttctgtttctgttcaacagagctggagcgcaaccataccgaacccttcacccttttcccagcatgtttttagaatcgcatttttacttggtccgtctgccttgtaaatattgtgctggccatatccggggatcttcgtttgatccctcgctacctgcggaagtcctcctccgctctgatctcttcctacctgccaatctctgctataaaagcggatgctggccaaaagtggccatcagtctactacaagtattcgtgttcaacacacaactctgcgctcagaacgaagacaaaatgtttgagaattttgagttcaccaacgagaatctatcggcacagaccatggatctggacatcgatctcatcagttggacggtgcccagcactccgacttccactacttttacggataactttaattttgctcaggcgttcgaagagcaacaggtatgattaccatagacttaggaaaatgtggatgatacgagaaatgtatcatttacataaagtatgaactccaagaaatgaaaaatcactacatccattaaattgaaagttgtagacatttattgagtgggattttcccggcaacctttggccatgatacgaacctctcgaacgagagcctcaagccattgtcttgccgcggaaattccctggctcagagacattgtctccgcgacattgccactcaacaatttgcctttgtgcgacttccgcgcaaactctcgagatccaaatagaaatttctttttaattacccaaagaggctacctgcaaggattccgagtttatagctggatttatagcgactgtttgtttctttttgggattacagctggatgcggttgcctgcaaggagaacaaacatcaatgcgcccggaccaagggaacgctagagaagactatattgctgctacagcatacgcaaaaggattgcgagcgactacgcgaggatttggaggacaagggcctggagtggattcagcggcagcaggagaaggaatatctgcatcgcactgaactgaagcaaggtgggtactttgatactttatgttcctatgaatggtagctaatgaatccccttctactttttagctgaagagaaattaatggaggtgcaattgcgtgccaagttaaagttctgcgaattagagtcccaactgcgtgccaaggacgaggagagcaaacaggcgcaggaggcctacagaatggaggtctcccacaaacttgcactgaagcaggaacatctgcgcactgccgagcagaaaatccaggaactgcagacacgtcttcagcaggtggagaccgaggagcaggggcaccgcgaggagctgatccgcaaggagaacattcacaccgcccggctggccgaggccaatcagcgggagcaggatctgatcgaccgggtcaagagcctgaccaaggagctgaacaccctgaaggccaacaaggagcataacgaacgcgatttgagggatcggctggcgctgtcccaggacgaaatctctgtgctgcgcacatcctcacagcgccgcagcccctgcaccagtttgccggacaacgcgtccgccgaactcaaccgcttgaccagcgaggcagacagcttgcgctgtgtgcttgagctcaagcaggcggagatttccgcccttagcaaggccaaggcggatctgattcatgaaagcgaagagcggctgaaactgagtaaccgcgtcgcccttttggaggcccaaaacgaaatgctgcgcaccgaactggaggccaagaccgaaaaggagaagtaagtagcaagatgtttacttttgcatttataaagctctccaattcaccttcacttgagtcaaaactaacccacatttgatctcttccagggaaatccagcaaaagatggaggaacttcagaaggcctacaaatacgagagcattaaacgcacgcggctgacgtatgacaaagaggagctacagtaccaccttaagcagagatcattgcagctccagtcggctgagtcaaagttgcaagatctttccactggttcccacgataacagcctatctagccacagccgatgcagcctgggtcgcagtggcctggagatcgccgtgaccacctcctcgcccacttccccagtgatgaagggaatgattgaacggaatgattccgtcagctggacgctagagatcgaagatgagtcgttcaagggtaacacttcaaagattgtgcgcagggcggggtcactgcgaagcaacaacgagcggtgccccatccagcggcgacagacattgacaagcaatggacactccaatggatcggccacaaatggcggctcttcccccgctcatcctaatccccttagccagagcatgtcggccacagcccttctgagaagcagcagtaattccggggagtcagagggtcgtcctttgtcccgggctcgctcaaaatcgatgtgcatcaaagcgtccgccaccagttcggcggtgtgcgaatcgtctggccaaaggaagaaaccacaagacgagttgagtctggccgactggcccgaggatattcccctgtgctccagttcaccacaagcgccgggaatagagatgcgtccgcgcagctccaccatgaagctaatgtccagcgaggcaaagaagttccaggaaatccaggagtccgccggcgaggccatggtctccggtgctaactcggaggacgaaagctgttcggcctcatccgaggacataatgcgcagctcttccgcctccagcaccgcatcgggtggatccctatccaagaggccaaagcaaccaccatcccgcatgtccatcgaggaggctctgccctgcacccccatggaggtaagctggtcagaagacgctgccgatgccaacggactggcatgacatgctgcctacgaggagcacgtcgaccagattgccgaggcggctgaagaggcttacgagagcgaggacattgaggaggatcacgatgagctgatcgtgggcgaggagcagccggagcacagcgacagcgatgatagcttctaaagcgctaaaaccaatttgtaaaacaaaataatgaggcagttagagtcggcacttgcggcgaaggtggaagtcatagtcggaagcatagcttagcgttttcacttctatagaccccgtacataaactattaagatacacaaaaatatataatgctaattcgtacgttcttaactgaaatgattgtgtaaataattgcatttagcagtatggtagctcatagaaggcgctcatgaaatataataataatctaacaattagtcgagcacagcaagcggagccgtcacagcaactgggggggaattgaaaaacataaatgagggaagtacttttttaaacgggcgcggacgaggatcgaagccacacacaaagctaaaccaagtttagagcggtatagctgcgtatttagaacagtttcaaactacacagaaatcagtaatgggggtagcatttagatgaagcagtatgaatatttgcataaaaccaaccaacttattactataccacacactataagtatttgtatgactagcgatattgatattgtattctaaccgcaactcgcaatctccgatgtcgaacatgttactcgatccaatccagatgctaacctctcttgagctcaaatatagcactcacttgatgtccttaattgaaaacctaatgcccgctatttgtggaccaggtgaggtatccgccccctgccacgcctatattataatgtaccaattagagtgtcagaggtctgaagctgcatcgccgaccgagctaagctttaatttgtgttttatatatgtatgtatttattatttagtctttaatgccttatgaaagcgttaaataaatgcaagaaattgaa

SEQ ID NO: 28055 - DNA, 2982 bp, DROSOPHILA
atgggtctcaacgagtttgtgtcacttttgtacggctcctcacaaagtctgaatgcccacaaggacgcgtccacgtccacgtacccattgccatcggtcgcggattggaaagagtttcagcagatgttgaaaaatcacaaaaatgtgcaggtcaagaggtacggcttccaggattaccatcactcgcaggactttaagtatggcaaaatatattcgggaatcggaagcgcagcagaagccgcaggcaatggcggcggcggcggagtcggtggaggagtgaccaagaggaatgcctccaatggcgctggccaaaacaaacttctgaacaacaacagcagcacgcataacaacaacatggccaagacatcacggatacccacaaccacctcaaagtccatgacttcctcggcttcctcctccggcagcagtgaactggacattctccgctcgtacacaaagaataccatcaaatcctcgctgacatcgtcgacgccatccagttcctttctatggaactcctttcgcatgccacgcaaacagaaatcttcgctggccgaaaagaaacaaagcggcgaatccctgcgctctggcgtggatcaaaccgaacttcaggagctgaacaatgggcaatctgctaccggttgtccgacgccgccgatggcgcgggactcaaagcgtacgtccattggaaatgagttaccctgtgagacggaggccaagttgaagagatgcgaggaccagcaggatccacaagcatccacgacggcatcacccctaccgatgatcaatccacaggaacaagaagccagtggccaggtcaaagaagcaacaatcaccactgcaaatgagccaaacgccttgtccttgcccgacgaaatcagcaattcggtcagctcgacgacgatgctggccacgccccgcgtagacatagccgcccagtatcccgtcctgaaaccattcacagagaacggagagctggactgtgcccgactggccaagttcttccaggacacccagttcgagaggaaggaggagcaacgccagattctgggcctctccgtaatggtgcagttcatgtccaaagagctggatgcggttgcctgcaaggagaacaaacatcaatgcgcccggaccaagggaacgctagagaagactatattgctgctacagcatacgcaaaaggattgcgagcgactacgcgaggatttggaggacaagggcctggagtggattcagcggcagcaggagaaggaatatctgcatcgcactgaactgaagcaagctgaagagaaattaatggaggtgcaattgcgtgccaagttaaagttctgcgaattagagtcccaactgcgtgccaaggacgaggagagcaaacaggcgcaggaggcctacagaatggaggtctcccacaaacttgcactgaagcaggaacatctgcgcactgccgagcagaaaatccaggaactgcagacacgtcttcagcaggtggagaccgaggagcaggggcaccgcgaggagctgatccgcaaggagaacattcacaccgcccggctggccgaggccaatcagcgggagcaggatctgatcgaccgggtcaagagcctgaccaaggagctgaacaccctgaaggccaacaaggagcataacgaacgcgatttgagggatcggctggcgctgtcccaggacgaaatctctgtgctgcgcacatcctcacagcgccgcagcccctgcaccagtttgccggacaacgcgtccgccgaactcaaccgcttgaccagcgaggcagacagcttgcgctgtgtgcttgagctcaagcaggcggagatttccgcccttagcaaggccaaggcggatctgattcatgaaagcgaagagcggctgaaactgagtaaccgcgtcgcccttttggaggcccaaaacgaaatgctgcgcaccgaactggaggccaagaccgaaaaggagaaggaaatccagcaaaagatggaggaacttcagaaggcctacaaatacgagagcattaaacgcacgcggctgacgtatgacaaagaggagctacagtaccaccttaagcagagatcattgcagctccagtcggctgagtcaaagttgcaagatctttccactggttcccacgataacagcctatctagccacagccgatgcagcctgggtcgcagtggcctggagatcgccgtgaccacctcctcgcccacttccccagtgatgaagggaatgattgaacggaatgattccgtcagctggacgctagagatcgaagatgagtcgttcaagggtaacacttcaaagattgtgcgcagggcggggtcactgcgaagcaacaacgagcggtgccccatccagcggcgacagacattgacaagcaatggacactccaatggatcggccacaaatggcggctcttcccccgctcatcctaatccccttagccagagcatgtcggccacagcccttctgagaagcagcagtaattccggggagtcagagggtcgtcctttgtcccgggctcgctcaaaatcgatgtgcatcaaagcgtccgccaccagttcggcggtgtgcgaatcgtctggccaaaggaagaaaccacaagacgagttgagtctggccgactggcccgaggatattcccctgtgctccagttcaccacaagcgccgggaatagagatgcgtccgcgcagctccaccatgaagctaatgtccagcgaggcaaagaagttccaggaaatccaggagtccgccggcgaggccatggtctccggtgctaactcggaggacgaaagctgttcggcctcatccgaggacataatgcgcagctcttccgcctccagcaccgcatcgggtggatccctatccaagaggccaaagcaaccaccatcccgcatgtccatcgaggaggctctgccctgcacccccatggaggtaagctggtcagaagacgctgccgatgccaacggactggcatga

SEQ ID NO: 28056 - protein, 993 aa, DROSOPHILA
MGLNEFVSLLYGSSQSLNAHKDASTSTYPLPSVADWKEFQQMLKNHKNVQVKRYGFQDYHHSQDFKYGKIYSGIGSAAEAAGNGGGGGVGGGVTKRNASNGAGQNKLLNNNSSTHNNNMAKTSRIPTTTSKSMTSSASSSGSSELDILRSYTKNTIKSSLTSSTPSSSFLWNSFRMPRKQKSSLAEKKQSGESLRSGVDQTELQELNNGQSATGCPTPPMARDSKRTSIGNELPCETEAKLKRCEDQQDPQASTTASPLPMINPQEQEASGQVKEATITTANEPNALSLPDEISNSVSSTTMLATPRVDIAAQYPVLKPFTENGELDCARLAKFFQDTQFERKEEQRQILGLSVMVQFMSKELDAVACKENKHQCARTKGTLEKTILLLQHTQKDCERLREDLEDKGLEWIQRQQEKEYLHRTELKQAEEKLMEVQLRAKLKFCELESQLRAKDEESKQAQEAYRMEVSHKLALKQEHLRTAEQKIQELQTRLQQVETEEQGHREELIRKENIHTARLAEANQREQDLIDRVKSLTKELNTLKANKEHNERDLRDRLALSQDEISVLRTSSQRRSPCTSLPDNASAELNRLTSEADSLRCVLELKQAEISALSKAKADLIHESEERLKLSNRVALLEAQNEMLRTELEAKTEKEKEIQQKMEELQKAYKYESIKRTRLTYDKEELQYHLKQRSLQLQSAESKLQDLSTGSHDNSLSSHSRCSLGRSGLEIAVTTSSPTSPVMKGMIERNDSVSWTLEIEDESFKGNTSKIVRRAGSLRSNNERCPIQRRQTLTSNGHSNGSATNGGSSPAHPNPLSQSMSATALLRSSSNSGESEGRPLSRARSKSMCIKASATSSAVCESSGQRKKPQDELSLADWPEDIPLCSSSPQAPGIEMRPRSSTMKLMSSEAKKFQEIQESAGEAMVSGANSEDESCSASSEDIMRSSSASSTASGGSLSKRPKQPPSRMSIEEALPCTPMEVSWSEDAADANGLA

SEQ ID NO: 28057 - DNA, 12481 bp, DROSOPHILA
tttgtagtaaataagtgtaaaataaagtttaggcttaaacgaaaactacttgaaatgcattcttactggtggggatacaacaatggactcctttttagaaaacacttaaaaaacagtttgcgttttataaattgtattttatttgttagttttatcacaaaaattgtatggtaacttaaattgtatgttggattctttccttttgtggattttgttttgtttttctttgctttgacaaattttgtgtagtaactacaataaaatttatatatatatattatatatgttcgtgtgtatgtatatatgggcgcagcttatacaaatcagtttcttaaggagtaaacttaaaggttaataagaaacgtatttccatcaagtacaaattaaaaacttgtttgcttaatttaatattcgccaagtactcgtgttttgcttgcttcttgtttgcatccatggatgaaaccgataatgaaatgaaggaaatcaaaatgctttcataatttaggtgtaaataaaagaaaactataaactataaatcagcatggggactgactcactggcgcatctaagcactatcttctcgcttattcgctcttcaggctacttggcaacgcgttcgtaatcataatctcaggatgttctcgtttctgtttccgtttccgtttcgctttcgcaattgatactgacctacacttattctacgtaatatttggcttcttgtaatacactttgcttctggaaatctgcatgataatttgagagacgaaattcactcgttaatcgaaacgcttttcgctactcttcttgtctactcgctagagatttaaacctatgtacacggttgaggatagaaaggcgggtgctaggacccacctcgcgtgtgatgtgtaaactaataattgagcattgagcaaaacctgtgcaaaacgcatgctaaactaggtaagtaagtaagtaatgttttgtctgtgggggttcagctgatgtgtgtggtagcctcttaggacgcagctcccgcccgaaccgcctctgcggaggtgctggcgctgacctcctcgcaaatggtgtgcaacttctccatctccgagctggtcacgatgttgattgagctaactttggcccgctgataggccaccacggtgttctcgcccaaacacttgacgcacacatagccaatgagcacggcgatgcccactgtcatcacgcgcaccagcggatcaacgtacatttggatcaccacccaggcggtggcaccggttacgcacatcaaggtgatcaatataaccgtcttggaccaatgctgaatggtgaagcccttgtcccattcgagtctgtaatagagtgtcgtgttatcagttatttaccatcagttataaaatggtctaactgatagctatgtggcggtgacccatttccctatttgcaaatggcacttactttttggacttttcgatctcgtagggatgtccgcagaccttgcacgacaactgcgcctccgaattgctgcagctctccaccagccagcgcttgagacactcgtggtgcaccgaacttacgtcgccagtgcagcggcagggctggatgaggggctctggcttgtcggagtcgtaacagatccagcaatcctttttggttaaaaacgactggccctcttcgggcgagagcttgttggtctccgcatttagagtgggtatcgacggatcaatttggcgggatagaagcttgcgaggatttagaatccagagctgttcaggagccatcgagttccaaaggcagcagggaaaccagagagccacaccgatctcggcgatgcgaaaaatgatgtcatgccagttgcgcgagttaactggaaccctttgtggtggcgaaaagaaaagctttttgtcaaattggcagctgcaaaactaattaaaagcctctactcacttggtcttccagaagtcgcccaaagtttcggaagtcagaaagcccacaatcacgattagcatcacggcctgaaacagcagtccgaatcgcgactgatgcaattgtgaggcattcacaattgcctcgctgggaccgagaatcttgcccgtctggtcgtaaacgaaaccgccgcgcagcttaaagaacacttccacgccgtagatgaggaagaagaccaccacgatcaggagtaatactgcatagcatccgttgaagatgtgggcgtagtcgcgacgctccgcgttgatcagcgagttgaagacctctatgccaaacaggctgtacagaaagaagttgaaggccacgaagccgaggaagctcttcgacagaaactgcgacttctcccagcggatgtcgcgcaggtgaaagatctgcaatggcgaacgtagcaaatgtgaatgagtacccacgccgatttggttaccactaaaagtcgcccgcagttactatttatattccagatcaagtgctaatatacgtatgtacactcgccacccagcttaattacttgtgtcagcctatcgggaggccccaagataagttgtgccaaacacaataaaattggctcgagtacaattgcactcgactcgttatcgcgcatctgttagatacgaaatatggcaagtacaattggacgcactttgctcgataatggaattcacatcccagtactgaaagttctcagggttcgggtgcgatcaaatacgactacgtcaggctgtcgttcaatcgccatatttaagttagtggtggactcgtgacttgaaatactgcctataagttctaacttatcaccaaaatttataagagtttgtagcaccgcggaaacgttatctgtatcttaagtgttaaagacgcttagggatgagaataaaatgaaatattgcaggtcttgcttacatatagtactactggacaaaagctattcgatgcaattgaagaggtatattattatgtaatatttgcagatagtaacgtttacttgtttacaaccttatcttttgctcatgactgtcatagtcctaattgataccattaagatttcattttcaaaagtacacaattaagcgaaattttctattctcatttatccttccttaaatatctagcttatcgtggactcacctcggcccacatgcagacaattagcgaggcgcaggtcatgagcaatggatagtaggcggacatcagggtgacagcccattgtggctgcagatccagctgaaatgcaaggagattgatgaaatcaaacgatccgatcgaagtgggattgcgtttactcacgggtgtggtgaagtaggcacctcgcaacgaggccgccacaaagaccatgaagtagagcagtttctgggtggtgatgcgacaggcgcggagtacggagggctgcttcagccgctgatattcggccacgatgcagatgagcagctggatgaccgagacgagggccaccacgtagaagacggtggagattccggcgtagtagggcagattgaagatgtcgcactcgttgcccgcgtaccgaatgtcgcagacgcaggtgttgttgacgcaatcgccccgtcccgagcagctgagatcgttgtccggcgtaaaggggccgtagatgcccccggcggccgacttgctgtgcccattccgcatctggctggccgccgcctccagcggcgattgcagaactcgcttcgagcaacgcattaaggtatccaggctcggcagcatcctatgctaaatcaactgcaaatagagcgaacgtacatcttaattaatacatcagggcagcgcaaatcgatagtccggctagataagcaacaaacatctaacagcatgatactccccgccaaatgtggggccaaagggtgtcatttaaataaacattgaattctggtgtctggacgggctgctcgctggctctaaaagcaaatgcaaatgtttgcacagccgacgcagggcaatggtggcattaggggtactctctctacaactcgagtggttcactttctgtggcccacaaagcatgcacaaatgaaatataaattgaaaaacataactatggttcttacaataggaatacatatctacctttaagaacaaagaatacccgaattctttaggcgatagttgaaaaatgtcatatgcgtgtttcaactacctacgattcatttaattaaatagtatctggcctagattctatcttcgatcttagctatacactatacttaaaacaaatatgttaatggaatatggttcaacccctaccaaccacaaacacacaactgacagccacccagagtgctgatggcacacggaggaatatttcaagagggtaaactgggcccgctggcacttggcattattatgccagcaacgattctaagccggcacagcccaaccttccgcttccgtccgtctgttctgtccgtctatcaatcaaaaagcacacagggacatctgaaatggcgagagactggggcatcgataataatgcctgccagcaacttgacacccacgatataacacaatgaagtacgagtaaataaaaccgatccaacatcgggacaggccacaaactgcaattccattgagctgtcgttctacattagccaattgaaatgctcttcttgctgtggtcaaaaccaattgatccacatggccacatagggaaggaaaggtgtagaaaagggtaggaaagggcgtaccgacaattattacctattaactgggatattaattacaatgcgatgcttaaaaaccttttttgagctaattgctaaatttgtttttaatggttatgaggtcgttgtgtccgtcacagcaaatatatttgctcgtttcgaccgagcgcaagtgtgttctttttttttatcattgataagaaacgttttcttagaaaagcttctctctattaagtgctcctagttcggcggaaaaagcgtttataggtaattggaaaaagcaaatccgaaatacataaacaatagattttaaattgttcacctgggctcaataataaatttatttttagagctgttgctcaacgcgcagaaagcaaaccaaaagggttactttcgttccaaaattgtggattttctatttagtcaagaccaggcgaaagcggaaaccagactgaaatatcttcataaatcatgtgttgccatagtggaaaatccatttaaggccgaaaacaaataataaaatgagccggctaacaaatcataaataaggtgttaaggttatgcatttgcacacccatttggatgtttttttcccccattttagtcgagtgtattagtttagctttttgctgacggcgacaaactggcgataagataaagccagtcaaaagtcaaagacaaagccaactgagcgagactttttttcaaatttcaaatggaacgtggagcttttgtacagaaaaataagtttatcgagaaagtaaataaattttaccttatagggaatacaaaatgcatgattcatgctcctagaagttagtgtaatttgtcttaatttgataatgattaattgacttgatataaacacactgtatacgatgagtttgttgataagatacttatatagttcaagaagtatatcatgattactttggcaattcgcaggtaacaaacttgacaagacgctatatttatttgctataattttatattacaagtcatagcaactgcgttgctgaaatttaattagaatatttatacgataagagagtatcatgcctgcatagcctgaatttggttttgtttgttcaaatttggtcaaagtgcgttgccagcgaaagtttattagagcggaaatattgaaatacacgcaattgcaattcccagttggtccgattaaagtcacccaccattgtaataaattgaattttctgcgtttcgctttcggtttcatttgtggcacagacgatcatgggaaaccggaaaatgcaggcgcgcagcggacatatccaatagttttgcgtttatatctttcttttttttttttttttggggcagcactatcttctgttgtagtgtattgtaacaaaaatagcactagaaagtaaacagaatacgcgatatatttatgagtgccagccagtgcacatatgcgattagttagcagatacgatccgaacgatcagcgcccgactcgcaaagtattcagactgaagtgagtacatttttacgggcgatcctcgcctgctcgtaagttcatatgccactcaaagtgagtctccggctctccggttctctttcactcgcacttttgagtggcttcatcgagtgctgtgcgtactcgaattctttttctttattaacccaccaccaccagcaagtcggcaattaatttccatcacgagtcggcggcccgtccgctttggcttaataaatgtatccataaacaaacagacgaagttctcgttgttttttatccccggcggtatttggaaatggaaataaatttaaaattcgcatggactagcagcctatctctttgagcaattaagaatgccctgccaacaaatatttgaattgcataatcgcttatcagtggccaagtaagctcgaatgcaggaatttaattatttaattatttttaaaaatagcgattgcagcagaaacggaagcataattaaacaaacaagtcgctggattaatatccattaacttcaagtgcaaaacactcagttgtgcgtgctgaaagttattgttgttactcaacattaaaatgttaaatatatgggtataataatgtaaatatttcctgttagtggatgccttagaggaactcttcaacccacccatgcagtccaatcaaaagtgtgactcccctgcacctaagcacctaaacaacttttattccacacaaagaaaggcaaaaagtgctcaatcgtcgaaactagttttcatacgtccgcagctgagtgcttttcaacaggtttttcgaatctgtgcagctctccggagagacccgaatagataggtatagatatagatatataactatagatgccaagagctgggggcccttggttgaacgaacgctgggcaaaagttgtgggtttgtcgtgttttatttacacgtaccgagagtgcaaacacataatgttgatcacgtcacgacagtctttataagcaggtactccccatgtctttgttttttttttttttttttttcgtgagtctagcccattttagagtacgttggttggcagtgcacgccatttggctcgcccgtgcccataattgtgcctcaaataatgcatggtaattttaatttgattacgcttctaaggcgctcgtacatatacacaagtgatagaatattttataaacagctaattgctgcgacttccactggccatgagtatgaagtattaagtataaagtataaagtacggaatgtatatggaagtggcgtgtccgttacgcccataaacaaaattatagtaagtgacaagcgctgaacgaataatgatacccatttggctgagaggaaagttttgggcatgtaatttggccgaaaggcaggagcggctaactccttgagatagcaaatatcaacttgtatacaaagaggttaggcgcaccgaagaaggcaagtgagctagtgaagattgcacaactgcgacacgagccaaagaatatttgaattttaaatgctcttttcggcctacgtgaggcgtctcgttgaattgattgataataaattgatcaaatgactgaggaatactcgaaatgccagctcacgaccttcaaattaactggaaagcggtcgcctgagccaaaaagtttgccacactagttcggcgcgcataactcaattaatttccatttagccgtcattagcgttcattaaagaggaaaacgaaataatctcacaggcattattcgatcccatgaaacgtgcaactttcgagctgctaatcgagtctataatggagggaatgaatattctgcaaacaattttttggaaagccacgacaaattaaatcctcaaaacaaacaaaaattgtcgtatatgcatatgtatctgttcctttagtttatataaaagtagtcggcaatcaaccggtttggagccagttaaacgtggaccataaccaatattgtcagcttatatgcggttgggattctgatattattgtatacatatgaaagccatttttccgcattattttccgatggcaatcatgcttttaccaccttaaatagcatgactaactactatcttttgagatatgatgggcgtgactcacgtgtaattaacaataaagtttgattcaattgcatggtgattcatgtgcagagcaaatagtctatttcaatcaattgcatgtaaacaattgagtttcgcaagagcaaaataatacgttttaactcgattttcccaaagataatttgaacttgttaagtttgataattgaccagagcaacgccctcaaatttcttatcacccctaaaaacattagtagtagttaattatgatgtcacggaacttgaggttcgacagtgatagtcttttctttcttttaaaagtaattatagatatgtccatgcgtacaacacaatgattaaatgaaaagtaagtgctgctgaccttatatctgcaaatttgattcacaatttggcgcattgtgacgaaataatggcataatttaaaaatactgcaaatgagacaactaaaacctcataatgaccaactatttttttaattcttgtacattcggcgtaattgcatcattatttcggatattacgcaaatcccaggattgacgttgccattaaatcagggaagataaatatttcagctcaatcgattttgcaattagatatataattgtttatcaacaactgtaataaatcagcgagcaaaactggaaactactataaaaacaacatttccatgcagattacgtactaaataaacaagtcatgcgtttttaatggcttttggggcaagaaacaaacacctgtttctaagtacttacaaagtatccatttgagcgctacggtttttggagccctattggggtaatatgagtgcaaactgtggcccactatgttgtgctaagcgtatgctgaaagagaagcgctgatgttagccaaatactgaatatttaagccccaaacaccagaggctgcagagccatcggaaaataaaacaagagtaagtcatccacaaggcctctcgaaggcaaaagaaaactaaacaggccacacaaaaaaagggtggtactagccgtattatatgaatatattatttatggctttaaaagtggtggtatagaacgtatagaatctattgatatccccatggaaattatactaggttcattgcatacatttgagagccttagatctagcatttgaaaatcccaagacgtagttgataacacgcttgagctgccaaagtccttgaaaaaggttaatgaattacctaagaatttaacctacaaacaaaccgaattccttttacttcgtctccccagcttttcccacccaaaaggcgacgcttccgtttattcggaatacagaattacctgaatacatttgcattcgatatttgactacattacttgggcagatgccttccctcaaaagtttgcctttgagcgagcgcgtgtcatcgcaacttggaaaagcaaatcgtgcaatcaatgtaagcgaattaatgtacatatttacttatattggcaaagaagtgcgcggaaattgaccgttttcactgacctgggaaaattgcgagcgttgcagacaaatcatgagtgtaaacaaaaagattgacatattttacttattcatgtacatggggtgcctaaaagtgcacacaagagtacgatcaattaaactgattgaatcacttttaaatgaaatgcttcggcattgcgtgtgtcgattggagaagtgaaaagacacggagatcttaaaggaaaatacagtgaaataaatatatatactgaaccatatattattcaaaaactttaaaaattgcttatcagtcgtttttttttttttttttgggtgcaaatatcgcagcgaattcttgagagcttacattttgatttcaagtgggaaaaaactttattaaaatttaaaacgtacttttaacaacaaatctcgtcgtgcttatcgttcttttgaattaagctatttaagataccacagcgaatttgttagttttattttgcgaatttactgccttaattcttagtcataaagaaccagtctcctaatgaccgtttgtcattgaaatcaagggttccctgtactcgccaatcaacttttgagtgcaagtcaacagacagaagatatttatttgcggacacgtagataagttcagctgcttcttctttttttctgtgtctaaatatgataaaaatcatatgggagagcaataacaacaaagagagcaccgaggcaaaaacaaaaacaaatttggctgaatggaggtgggcttttgtatctgtgtgcgtgtatttgttatgtgtgtgtgcgacatgtatgaatgtttgaaagccgttactaatggcgaatgacgcggcaaagagcatggggcgtggagagcggaggaaagggaaaggcgcccggtgcaaattgagtgcaatttgggtgcaagtgcaccgggcggaaagtgggcggcgcacagtggggcaaaagcagcacaccttaaatgtcaaggttttatgtaagcaattgcccgcccctatttagttttatttatattgttattggctgttataggtttggtttttggcaacgatatatattgtaatatattattgaatatttattatgaggcatggcatttttaggatacagcaaaaacaattcaaaagtaatcaatgccaaatgcgaaaataacttctaagacctaatgattcttcagctaatgtaaatggaaataggttttttcgccattatggtacttatgattatcactgaggaccgtgcacctggaacggctcgttagtgagtcaggaattcagcacgcgacaacgcgagaatggaaaatacggcgaaaagtaaggggattattatgcttttgtttggggtgcacatgaatgtacatacgtacatgcatatgtacattagtacgtaatgctctataaggtaaggaactactcaccatgtactgtttgcgaaaatatgctagttacgaagtctgcctaatactgtccaagttgctgtggcgtccgtgtggaaatggttatgctattgcatcacatttatatattcttgtaactgagcaagttgcttaacaatttgttgcctctttgttgttctttgtcacatattttaaaggacgcgcagtttccgtttccaattggattccgttttcgttatgttgttgtggtaccaaccgactgcttgtaccctaaactactacaactacaacagcaccgtcacatttggcccccaggaatgggtaaatggttgttatgcctcgcaaatttaatatatatataactttttttcgtttcgcgacgcgatgaaaatcactcgagctctgaacttgcagtgtgaccgcgtttgctgaactagagatggccaagcatcgattgcactatcgattacctatgcattctcaaaaattcgcatccacaaagtaggaactatctgtttcgactaacggtcatactatgcaataaattcaaaatttgtttatactttttgcggacgaagagttatatatttcatattctgttttgacaaaggattgctgtttgtttataatcgtaatacaaagcatatgctattttggatatagaacactagaattcccataggcgaacttattcaaatatcaaattaattggttcctgaaagcacccgtaaattcttagtggctgaaaagtcttattggaagtcagaataattactccacacactaagcatcttagttatgctttgctttgagctaatcctggttctaactgccaccgaaaaatgattccattgtttatgccagaagtaaataaaacaatttcgaacgttatacgttaaattacaaagggaaatcgctttattaccaaatcaaaatctagctatgggtacgccacgcttagaagttcctgcaaggcgaaaaatgcgcgattagtggatgtccatcccggggattctagcacaaactcacttggtaatgatgccgtccttcttggccagacgcacgatgcagtcgtcggactcgcccatgcgacggatctcgccgcagatggcgtaggtcttggaaccgtcggtctggcgaccggtctcggggtccacatccacgatgctcagctgcacggaggcgtgatccttggcgtggatgatcctgttggacgccgagctgcagggaagggtatcggctggtcagtaatccattcggcaaattgtgcggggaacacgtgtttcacttaccatttgcggggcacgtacagatcaacattctcaccggcgtcgttctccattttattgggctgaaaggtaagggacacaattagcttgctttttattcagttttagtggcggccactgct

SEQ ID NO: 28058 - DNA, 2094 bp, DROSOPHILA
caagttcagagctcgagtgattttcatcgcgtcgcgaaacgaaaaaaagttatatatatattaaatttgcgaggcataacaaccatttacccattcctgggggccaaatgtgacggtgctgttgtagttgtagtagtttagggtacaagcagtcggttggtaccacaacaacataacgaaaacggaatccaattggaaacggaaactgcgcgtcctttaaaatatgtgacaaagaacaacaaagaggcaacaaattgttaagcaacttgctcagttacaagaatatataaatgtgatgcaatagcataaccatttccacacggacgccacagcaacttggacagtattaggcagacttcgtaactagcatattttcgcaaacagtacatgttgatttagcataggatgctgccgagcctggataccttaatgcgttgctcgaagcgagttctgcaatcgccgctggaggcggcggccagccagatgcggaatgggcacagcaagtcggccgccgggggcatctacggcccctttacgccggacaacgatctcagctgctcgggacggggcgattgcgtcaacaacacctgcgtctgcgacattcggtacgcgggcaacgagtgcgacatcttcaatctgccctactacgccggaatctccaccgtcttctacgtggtggccctcgtctcggtcatccagctgctcatctgcatcgtggccgaatatcagcggctgaagcagccctccgtactccgcgcctgtcgcatcaccacccagaaactgctctacttcatggtctttgtggcggcctcgttgcgaggtgcctacttcaccacacccctggatctgcagccacaatgggctgtcaccctgatgtccgcctactatccattgctcatgacctgcgcctcgctaattgtctgcatgtgggccgagatctttcacctgcgcgacatccgctgggagaagtcgcagtttctgtcgaagagcttcctcggcttcgtggccttcaacttctttctgtacagcctgtttggcatagaggtcttcaactcgctgatcaacgcggagcgtcgcgactacgcccacatcttcaacggatgctatgcagtattactcctgatcgtggtggtcttcttcctcatctacggcgtggaagtgttctttaagctgcgcggcggtttcgtttacgaccagacgggcaagattctcggtcccagcgaggcaattgtgaatgcctcacaattgcatcagtcgcgattcggactgctgtttcaggccgtgatgctaatcgtgattgtgggctttctgacttccgaaactttgggcgacttctggaagaccaaggttccagttaactcgcgcaactggcatgacatcatttttcgcatcgccgagatcggtgtggctctctggtttccctgctgcctttggaactcgatggctcctgaacagctctggattctaaatcctcgcaagcttctatcccgccaaattgatccgtcgatacccactctaaatgcggagaccaacaagctctcgcccgaagagggccagtcgtttttaaccaaaaaggattgctggatctgttacgactccgacaagccagagcccctcatccagccctgccgctgcactggcgacgtaagttcggtgcaccacgagtgtctcaagcgctggctggtggagagctgcagcaattcggaggcgcagttgtcgtgcaaggtctgcggacatccctacgagatcgaaaagtccaaaaaactcgaatgggacaagggcttcaccattcagcattggtccaagacggttatattgatcaccttgatgtgcgtaaccggtgccaccgcctgggtggtgatccaaatgtacgttgatccgctggtgcgcgtgatgacagtgggcatcgccgtgctcattggctatgtgtgcgtcaagtgtttgggcgagaacaccgtggtggcctatcagcgggccaaagttagctcaatcaacatcgtgaccagctcggagatggagaagttgcacaccatttgcgaggaggtcagcgccagcacctccgcagaggcggttcgggcgggagctgcgtcctaa

SEQ ID NO: 28059 - protein, 562 aa, DROSOPHILA; identical to SEQ ID NO: 5478

SEQ ID NO: 28060 - DNA, 3093 bp, DROSOPHILA
caatgacatcatggttagagctggcgaatgggatctatcctccagtgagaaactaaatccaccgatggatcgtcaagtgatcaagatcatggagcatgaggcctttaactacagcagcggagccaacgacttggcgcttctcttcttggattcgccttttgagttgagggccaacatccagaccattcgcttacccattccggacaagactttcgatcgaaggatatgcacggtcgcaggttggggaatgagatcgtcgaccgatgttgatattcagaccatccagcagaaggtcgatttgcccgttgtcgaaagttccaaatgccagaggcagctcagactaactaaaatgggctcgaactaccagctgcccgccagtttaatgtgtgccggcggtgaggagggacgggatgtctgttctctattcggaggattcgcccttttctgctccctggacgatgatcccaatcgctacgagcaggcgggcatcgtaagcttcggcgttggatgcggccaggcaaacgttccgaccaccttcacccatgtgtccaagttcatggagtggatcaatccgcacttggagcaagtgcttagcgtgcctggaaatatgcttcctgccatgtcataatatccttgcactaatgttatctataagcaagaaaactatacatttatccgcatcttaaaagttggtttatcccaaagaatttgcttatgtgcaagaaatacagccgcatcaatggtcacatttgtacttttaagtataatataaaatataaaaaatttatatatgtatatatattattcaaatgccaccatacatgttaatatatgtttcaagtacatatattttaaagctattacttgattgaatcgaagcgtttcgcattactgttctctgataacgaagagggtgattcttttttcccagaacacgagttcgaagaaaagatctctctgaatattttgagtcagtgttgattcagtcgttaagctagcaatgtggcggcgagtcatatttatcagatgctgtttctggacgctaactgagacgggagcaccgtgtggcctccagatggagtgcgtgccccagggactgtgcaaaacgagcgcttggaatcagaatgctatttcttggccgagcccgtgccagagatcagaaagttgctgtcacagttctcaaaaggtaagtgtggagtgaaccaagtttgattgccagatatatactcgtaatatataaattgcagttagtgatcggtgctccgctaaactgtggcaagagtaatcccaatggcctgggcggcacagtagaagaggttgtcgatcaggcgaaacccaatgagttcccttggactgtggctctgatgcaaaacttgatcaacttctttggcgcgggaactctggtcaccgaaaacattgtgataaccgctgcccacctgatgctagacaagaccatcaacgacttcggaatcatcggcggtgcatgggatttgaagcagctggctggtaaaacgattcagtggcgaactgcgaccaggattgtatcgcatccggacttcaacaaaatgaccggggccaacaacatagccctgatcgtactggaaacttcgttcgtgatgaagccccctattggacccatctgctggcccacttccggagtgtctttcgatcgggaacgctgcctggtggccggctgggggaggccggatttccttgccaagaactattcctacaagcagaagaaaatcgatctgcccatcgtgagcaggtccgattgcgaatccctattgcggaggacggcgtttgtccagagcttccagctggaccccaccatattgtgtgctggcggcgagcgggggcgagatgcctgcattggcgacggtggatccccgctaatgtgtcccattcccggccatccggcgatctacgagctcgtcgggattgtgaacagcggcttttcttgcggactggagaatgtgcctgccttatacacgaacatctcgcacatgaggccttggattgaaaaacaactcaatgacgaactgaataagccatacaagacatttcccatatataatatatcctatgactaaaatacaaagaccactttcataccttcttaattggattttaatcgtactttccacttgatctgaggagctgttcacaataatgtaacttagatcaacagaaataaaatgaagctaagggattggttccggctactgatagtgtcaatatttttttggctgctcgtcctagaagtgatcatattctataacagcaccagattcaccgatctaatcgagttggttcaaacgccgtacaaggagacgatcaactcctttgacgttggtctgcgaagtgagcactgggacgatgttcggattacgcgaattcttcaggagaatgtccgcgttcactgcctagtttatatgcaccgattggactacaagtacggcgctgagaaggctaggcatatcgaaaagacatggggtcgtcgctgcaatcggctgaccataatcgatcaaagggatatccctctgctgcaggcatatcgccagatttacgttgaattccacaatgaactcgactggctgctagtggtctacttggactcgtatgtcatcgtggagaatctgcgctacctgctggcgcagtattcgccatccgaggagatctactttcgtgcggaacatgccgtccatgtgtacgcccatgtaggtcaggtcagcaccacggactacatcttcagtagggaggcgctggagcagctggtcacgaggaactgcctgcagaatgagatctttctcagggagtgcttgacgcggatgcggaagggtcccagcgagtggctcctgccgtttgatgttccggatgcgctgatcccgtacagcctgcgcactaacttctggcattggccctgctcctttcgcgttgtttaccataatcatgtgagcggttatttaaataattctattccatattatattaccatttctagagctgggagagctgttttggaggagcagtgctctatccatattgccgcgccatgcaaatgtatgtccttgagttcttgctctaccacct

SEQ ID NO: 28061 - DNA, 1032 bp, DROSOPHILA
atgtggcggcgagtcatatttatcagatgctgtttctggacgctaactgagacgggagcaccgtgtggcctccagatggagtgcgtgccccagggactgtgcaaaacgagcgcttggaatcagaatgctatttcttggccgagcccgtgccagagatcagaaagttgctgtcacagttctcaaaagttagtgatcggtgctccgctaaactgtggcaagagtaatcccaatggcctgggcggcacagtagaagaggttgtcgatcaggcgaaacccaatgagttcccttggactgtggctctgatgcaaaacttgatcaacttctttggcgcgggaactctggtcaccgaaaacattgtgataaccgctgcccacctgatgctagacaagaccatcaacgacttcggaatcatcggcggtgcatgggatttgaagcagctggctggtaaaacgattcagtggcgaactgcgaccaggattgtatcgcatccggacttcaacaaaatgaccggggccaacaacatagccctgatcgtactggaaacttcgttcgtgatgaagccccctattggacccatctgctggcccacttccggagtgtctttcgatcgggaacgctgcctggtggccggctgggggaggccggatttccttgccaagaactattcctacaagcagaagaaaatcgatctgcccatcgtgagcaggtccgattgcgaatccctattgcggaggacggcgtttgtccagagcttccagctggaccccaccatattgtgtgctggcggcgagcgggggcgagatgcctgcattggcgacggtggatccccgctaatgtgtcccattcccggccatccggcgatctacgagctcgtcgggattgtgaacagcggcttttcttgcggactggagaatgtgcctgccttatacacgaacatctcgcacatgaggccttggattgaaaaacaactcaatgacgaactgaataagccatacaagacatttcccatatataatatatcctatgactaa

SEQ ID NO: 28062 - protein, 343 aa, DROSOPHILA
MWRRVIFIRCCFWTLTETGAPCGLQMECVPQGLCKTSAWNQNAISWPSPCQRSESCCHSSQKLVIGAPLNCGKSNPNGLGGTVEEVVDQAKPNEFPWTVALMQNLINFFGAGTLVTENIVITAAHLMLDKTINDFGIIGGAWDLKQLAGKTIQWRTATRIVSHPDFNKMTGANNIALIVLETSFVMKPPIGPICWPTSGVSFDRERCLVAGWGRPDFLAKNYSYKQKKIDLPIVSRSDCESLLRRTAFVQSFQLDPTILCAGGERGRDACIGDGGSPLMCPIPGHPAIYELVGIVNSGFSCGLENVPALYTNISHMRPWIEKQLNDELNKPYKTFPIYNISYD

SEQ ID NO: 28063 - DNA, 3814 bp, DROSOPHILA
tgaaccaagtttgattgccagatatatactcgtaatatataaattgcagttagtgatcggtgctccgctaaactgtggcaagagtaatcccaatggcctgggcggcacagtagaagaggttgtcgatcaggcgaaacccaatgagttcccttggactgtggctctgatgcaaaacttgatcaacttctttggcgcgggaactctggtcaccgaaaacattgtgataaccgctgcccacctgatgctagacaagaccatcaacgacttcggaatcatcggcggtgcatgggatttgaagcagctggctggtaaaacgattcagtggcgaactgcgaccaggattgtatcgcatccggacttcaacaaaatgaccggggccaacaacatagccctgatcgtactggaaacttcgttcgtgatgaagccccctattggacccatctgctggcccacttccggagtgtctttcgatcgggaacgctgcctggtggccggctgggggaggccggatttccttgccaagaactattcctacaagcagaagaaaatcgatctgcccatcgtgagcaggtccgattgcgaatccctattgcggaggacggcgtttgtccagagcttccagctggaccccaccatattgtgtgctggcggcgagcgggggcgagatgcctgcattggcgacggtggatccccgctaatgtgtcccattcccggccatccggcgatctacgagctcgtcgggattgtgaacagcggcttttcttgcggactggagaatgtgcctgccttatacacgaacatctcgcacatgaggccttggattgaaaaacaactcaatgacgaactgaataagccatacaagacatttcccatatataatatatcctatgactaaaatacaaagaccactttcataccttcttaattggattttaatcgtactttccacttgatctgaggagctgttcacaataatgtaacttagatcaacagaaataaaatgaagctaagggattggttccggctactgatagtgtcaatatttttttggctgctcgtcctagaagtgatcatattctataacagcaccagattcaccgatctaatcgagttggttcaaacgccgtacaaggagacgatcaactcctttgacgttggtctgcgaagtgagcactgggacgatgttcggattacgcgaattcttcaggagaatgtccgcgttcactgcctagtttatatgcaccgattggactacaagtacggcgctgagaaggctaggcatatcgaaaagacatggggtcgtcgctgcaatcggctgaccataatcgatcaaagggatatccctctgctgcaggcatatcgccagatttacgttgaattccacaatgaactcgactggctgctagtggtctacttggactcgtatgtcatcgtggagaatctgcgctacctgctggcgcagtattcgccatccgaggagatctactttcgtgcggaacatgccgtccatgtgtacgcccatgtaggtcaggtcagcaccacggactacatcttcagtagggaggcgctggagcagctggtcacgaggaactgcctgcagaatgagatctttctcagggagtgcttgacgcggatgcggaagggtcccagcgagtggctcctgccgtttgatgttccggatgcgctgatcccgtacagcctgcgcactaacttctggcattggccctgctcctttcgcgttgtttaccataatcatgtgagcggttatttaaataattctattccatattatattaccatttctagagctgggagagctgttttggaggagcagtgctctatccatattgccgcgccatgcaaatgtatgtccttgagttcttgctctaccacctgcgtccttatggccacctaactcccctgccggaactaaggtctcctaatcctctaacgaagatagcatcgaggccgctgaacgatcagctggccaagatgatgtataggtcggttaggattatctgcttggttttgacctggcccaagaagtatatgagtggcgctagggctataagtgaaacatggggtcgtcactgcaaccgagtgatttactatggcagctttccgggcactactatatctggcttggaaatagtgggtctgaatgccagtgatacccgcagtaagttgtggggcaaaacaaaggcggcgtttcgtcatgcgtacaggaattacggtcacgaggtggattggttctacaaggcggatgacgatacctatgccgtaatggagaatatgcgcaaactgctgaaaccctactcaccgagcaatccgatttactttggctccccattcaagctgggatccactctctacatgtccggaggagccggctatgtcctgagcaaaagtgccgttgagctattgaatcttggcgccgccgaaaattgccagccaggagatcagggcaccgaggactatgtgatgggcaaatgcctgagcctattgcaagtccaagcgggagactccagagatctgctcggacgacagcggttcttctccctgtcgctggaacactttctcattccgaatcgcgatgatgagggcttctggctgcaggagtatctctaccaaacaactggaacggtgagtataaagcgatttctaagtaatcatagaagagatatgtatctgtactttactttcagggattggaatgctgttccacctattcaatttccatacacaacgtctctccgtacgaaatgcattttctggaaacgattttgtataaaaggcgaccatatggacttctagctggacatgctcctccaagaagattaagcaaaaatcgtctaaggaaacagcagtataatttatgattatatataatatagtattttaaatatacatgcatttatactacataacaaatgaaagcttattgctagatggcatctactaaacataattcttaagtttcaggagcagttttagactcatttacgatatcttggttttactctttggcatagtctgttgcagtcaatccgaaatgaatgtattaaagtgccaatattattttttaaacttggaagtggtcttggttctgtaatttggtgtagtgacgttttttcttggcatcattttaatgagagcaatatggccgttttcctcttttgtggtctgtaaattaatcgacattggcctagaactggctttcttttttggcagtggaccaagttctctgtttatgccaaaaattcgtagcttgtagatgatatattcgagcacgtagaactcctgtgcgttgttgtagtgaaacgagatggccgtatttgagcagcagtcactggagttctaatacaaaggtgaataagtgtttaaataattcagtaactcatatttgtgagattccttacatctggggatgtgtagtagagtagtggctggtaccaatccggtggctggggataccagtgaagtggggagaaaggaatgaagcgacttaacccctgctcatcccgggaatcaccacccacgacgcccacaccggccagacatcgtcccagttccacatcctcgtagccataattgcgattggtgcaaatgctgctgttgctgaaacccagtttaatcagccgatggagggccattttactcagcacataaccagctcctccagacatgtatccctaaaaaaaaagattcataatttcttaagtggatttggagtttgaagcacactttttggcgactcgctgtaaatactggccttatgtagagaaaagaaaaaaatctaaactaaatatgacta

SEQ ID NO: 28064 - DNA, 1672 bp, DROSOPHILA
atgaagctaagggattggttccggctactgatagtgtcaatatttttttggctgctcgtcctagaagtgatcatattctataacagcaccagattcaccgatctaatcgagttggttcaaacgccgtacaaggagacgatcaactcctttgacgttggtctgcgaatacggcgctgagaaggctaggcatatcgaaaagacatggggtcgtcgctgcaatcggctgaccataatcgatcaaagggatatccctctgctgcaggcatatcgccagatttacgttgaattccacaatgaactcgactggctgctagtggtctacttggactcgtatgtcatcgtggagaatctgcgctacctgctggcgcagtattcgccatccgaggagatctactttcgtgcggaacatgccgtccatgtgtacgcccatgtaggtcaggtcagcaccacggactacatcttcagtagggaggcgctggagcagctggtcacgaggaactgcctgcagaatgagatctttctcagggagtgcttgacgcggatgcggaagggtcccagcgagtggctcctgccgtttgatgttccggatgcgctgatcccgtacagcctgcgcactaacttctggcattggccctgctcctttcgcgttgtttaccataatcatagctgggagagctgttttggaggagcagtgctctatccatattgccgcgccatgcaaatgtatgtccttgagttcttgctctaccacctgcgtccttatggccacctaactcccctgccggaactaaggtctcctaatcctctaacgaagatagcatcgaggccgctgaacgatcagctggccaagatgatgtataggtcggttaggattatctgcttggttttgacctggcccaagaagtatatgagtggcgctagggctataagtgaaacatggggtcgtcactgcaaccgagtgatttactatggcagctttccgggcactactatatctggcttggaaatagtgggtctgaatgccagtgatacccgcagtaagttgtggggcaaaacaaaggcggcgtttcgtcatgcgtacaggaattacggtcacgaggtggattggttctacaaggcggatgacgatacctatgccgtaatggagaatatgcgcaaactgctgaaaccctactcaccgagcaatccgatttactttggctccccattcaagctgggatccactctctacatgtccggaggagccggctatgtcctgagcaaaagtgccgttgagctattgaatcttggcgccgccgaaaattgccagccaggagatcagggcaccgaggactatgtgatgggcaaatgcctgagcctattgcaagtccaagcgggagactccagagatctgctcggacgacagcggttcttctccctgtcgctggaacactttctcattccgaatcgcgatgatgagggcttctggctgcaggagtatctctaccaaacaactggaacggtgagtataaagcgatttctaagtaatcatagaagagatatgtatctgtactttactttcagggattggaatgctgttccacctattcaatttccatacacaacgtctctccgtacgaaatgcattttctggaaacgattttgtataaaaggcgaccatatggacttctag

SEQ ID NO: 28065 - protein, 58 aa, DROSOPHILA
MKLRDWFRLLIVSIFFWLLVLEVIIFYNSTRFTDLIELVQTPYKETINSFDVGLRIRR

SEQ ID NO: 28066 - DNA, 3336 bp, DROSOPHILA
tctttggctcacgagatgctttatggaaacaatgagatgcaaacaaaaggtgaacaaacaatggatagcggacttggaatatcatttaacataaaatcaatttgacaataggattcctcgtgaataaatttcatattctgctgttcagatttaagtgaaccaataatattccaatgaaattcgacttttagtattctttcggctgacatgtgtcgttcaacttttgatggattacccaaattgcagtcttcaaatgagagaagaaattgccaatcagcgagacataagtacccgcgtatattttccactggggcaacccccaagctcccaaagtcccaggagtccgtctctgcaacaatggcagttcagggtcaaaggatgtctgacaaaaaggaaaagaggagccaagcacccaactcaagcagccatccgccgtccataattaatacgactcaagttgttaaagtaaacgaaatgaagtaaaatgcggaaaattcaaaacgagcgactacaaaaagcagctggagaacagaaccagcagctcggtgttaatattaatgaattcaattaaaggagaaagtgagcgaaatgggaaaaaactgagcaaaatcgtaaggggggatcccagccgttcaaagcgttttgcgtgggtgccattgtagaaacacatatatatgtatatatatatgtatatgtggatgggtggctggttgggtggctttgggagtgcgtgcccttggtggctaaggataagcacttttacttggtgcgtttggtgccactgccaccaccacccaacagcccgttttagatgacgccgtcagcgcatttctagtgtttcaaggatgcgagtgtaggagaaattgctaacgacttttgtgggatttctttgtagccacactcgagtttagcgctatttttaagccggcgacagcccggaaattaaacacacgcatcattaatatccatttacgttcagctactcattaaattttcactttgcagcaacaacacagcaaaacaaaatgccgccaaatgcaaaatcggaaacggacgccaaaccggaagcggaaccagcgccagcgtctgagccggcagcggatctggagtccgtggaccagaagctggaagaaacacatcactccaaattccgtgaagtggacaggcaggagcaggaggtgctcgccgagaaggcggcggaagcggccagtcaaagaatcgcacaggtggaatcaacaacacggagtgctaccacagaggctcagggtaagtccaaacggatttatatatttaaacaatatatttatttagttattattcgtacagaatccaccaccaccgcagtgccggtgatcaaaaagatcgagcatgtcggcgaagtggtcaccgaggtgatcgcggagcgcacggggctgcccacatggggcgtggtggccatcatcatactcgtgttcctcgtcgtctttggtataatcttcttctgtgtgcggagattcctgaagaagcgaagaaccaaagatggaaagggtaagaagggtgtcgacatgaagtcggtacagttgttgggatcggcgtacaaggagaaagtaagtgtctgacgcgccattaaatcttagtagttattgggttctggtatgtcataggttcagcctgatatggaggaactcaccgaaaatgccgaggagggtgacgaggaggacaagcagagcgagcagaagctggggcgcctcaacttcaaggtaggtctcccaattcccaatccccgtattccccaggacccaaccacacagcaggcctaatttccagcatacgaaactaaccaaacgtaactcagataggtgtaccataagtgtgggcagagttgatgttctagacacggggagcacactcacagagaggacaatataaactcaatgaatactgtaacaacttcctttataatgtttcacgtacactgaacaaaattccgtttccactgggtcatattcttgggcaaattaaattcggttctaatagctagtttcaatatccaaaatcccgaaattttaccattcagcggggaatctttccttgtgtgaaacctaatcaattagatcttggcacttacatacatattgacatattaaacaagcatatccttttgccacagtactaatatactattttccattgtctctttttggtccaaaaccaaaaacccctgttgttgccgcctttcgaatctctctctcttttagctggaatacgatttcaactccaacagtttggccgtgacggtgatccaagccgaggagcttcccgccctggatatgggcggtacctcggatccctatgtcaaggtgtacttgctgcccgacaagaagaagaagttcgagaccaaggtgcaccgcaagacactgagtccggtcttcaacgagacgttcacctttaaggtgagattggctacttttcatacaagtgctgaaaagaaatatcccttttaagcaattttctcagatttacagaacgatatcatcattatttttttgttataatgttacagagtttgccctacgccgatgccatgaacaagacgctcgtgtttgccattttcgacttcgatcgcttctcgaagcacgaccagatcggcgaggtgaaggtgccgctgtgcaccatcgatctggcgcagacaatcgaggagtggcgcgacctggtcagcgttgaaggagagggcggacaggtatgtagagctgggccggggtccacgtcggggtcaccagtactatccaagctatccgtaactctctctctctgtctatatactcgtactatatacaactcgatgtgcctctaagtgtgtttttatatccaactcaagaacatcagttgagatctgtctttcgtactcttatgattcgaaccttatgatttttcttatgcgttcgtttataatgatctaagtttttggagccgaaagcaggccgacactgaaatcgtgtgatatttgttgacttctgttctgtaatctcgaacacctacttactatatagtacgatgattgtgttttgtgtgtattttgcattcgaacttcagccacgaccaaaaaatatgaaaatacagcagacacccactgatatttgttttttaagtcaacgaacccatccccgagccccctccccagaagtacttttaagggcagggaacaaagacaattacagtgaaaactttccaaaacagatacaatatcaacaaacaacaatgaaaacttcgcggaacagacaagcaaaagttgttcgagtctcaaacgaaacttttttacacacccagttcaaaatgcaaatataaataaatcaaaga

SEQ ID NO: 28067 - DNA, 1213 bp, DROSOPHILA
tgcagcaacaacacagcaaaacaaaatgccgccaaatgcaaaatcggaaacggacgccaaaccggaagcggaaccagcgccagcgtctgagccggcagcggatctggagtccgtggaccagaagctggaagaaacacatcactccaaattccgtgaagtggacaggcaggagcaggaggtgctcgccgagaaggcggcggaagcggccagtcaaagaatcgcacaggtggaatcaacaacacggagtgctaccacagaggctcaggaatccaccaccaccgcagtgccggtgatcaaaaagatcgagcatgtcggcgaagtggtcaccgaggtgatcgcggagcgcacggggctgcccacatggggcgtggtggccatcatcatactcgtgttcctcgtcgtctttggtataatcttcttctgtgtgcggagattcctgaagaagcgaagaaccaaagatggaaagggtaagaagggtgtcgacatgaagtcggtacagttgttgggatcggcgtacaaggagaaacctgatatggaggaactcaccgaaaatgccgaggagggtgacgaggaggacaagcagagcgagcagaagctggggcgcctcaacttcaaggtaggtctcccaattcccaatccccgtattccccaggacccaaccacacagcaggcctaatttccagcatacgaaactaaccaaacgtaactcagataggtgtaccataagtgtgggcagagttgatgttctagacacggggagcacactcacagagaggacaatataaactcaatgaatactgtaacaacttcctttataatgtttcacgtacactgaacaaaattccgtttccactgggtcatattcttgggcaaattaaattcggttctaatagctagtttcaatatccaaaatcccgaaattttaccattcagcggggaatctttccttgtgtgaaacctaatcaattagatcttggcacttacatacatattgacatattaaacaagcatatccttttgccacagtactaatatactattttccattgtctctttttggtccaaaaccaaaaacccctgttgttgccgcctttcgaatctctctctcttttagctggaatacgatttcaactccaacagtttggccgtgacggtgatccaagccgaggagcttcccgccctggatatgggcggtacctcggatccctatgtc

SEQ ID NO: 28068 - protein, 216 aa, DROSOPHILA
MPPNAKSETDAKPEAEPAPASEPAADLESVDQKLEETHHSKFREVDRQEQEVLAEKAAEAASQRIAQVESTTRSATTEAQESTTTAVPVIKKIEHVGEVVTEVIAERTGLPTWGVVAIIILVFLVVFGIIFFCVRRFLKKRRTKDGKGKKGVDMKSVQLLGSAYKEKPDMEELTENAEEGDEEDKQSEQKLGRLNFKVGLPIPNPRIPQDPTTQQA

SEQ ID NO: 28069 - DNA, 4383 bp, DROSOPHILA
acggcactgtgttcctgttggagaatcttcgtttctatgccgaggagacgggcagcagcaaggacgataacaagaagaaggtcaaagcagatcccgcgaaggtgaaggaattccgagccaagttggcgcagctgggcgagatctatgtgaacgatgcctttggaacagcacatcgtccgcatagttccatgatgggcgatggctacaaggtgcgagcggctggtttcctgctggacaaggaactggagtactttgccaaggttctccacgatccggccaagccctttttggccattctgggtggcgccaagatagccgataaaattccactgataacgaacctcctgaacaatgtaacggccatgatcatatccggtggcatggccttcacctttctcaaagtgctcaatggcatggagattggaaagtccctcttcgacgagaagggatccgagttggtcaacgacatagtctgcaaggcgaaggagaaggacgtgaatatactatttccgattgactttgtcatagccaataagatcgacaaggagccggataaagtggaacatgtggatgccacacagggcataccggaggacatgatgggtctggaccacggccaggcatccagtcagatgtttgctggcgctatttgtgcatccaaaaccatcgtctggaacggaccgccaggcttgttcgaaaacgagctattctccaaaggcaccgagtccatgctggaggcagtaatcggggccactaaccgaggagccaccacaatcgttggtggtggggatacggccaccgcttgcttgaagttcggaggcgccgacaaggtctcgcatgtgtccaccggtggaggagcttccctggagttgctggagggtaaggttctgcctggagtggctgctctttcggatgcctaaacgcactgctttacaatggttattccacttatatgtacatgtatcttaaattcaatttggacaatttaaacaatcagtctctcaaaatacaaagttatttttattgtggaataacattagtcggttaaaacgtgataaaagggcgggcctcgatctcgtgcagcactactttccaactatctttttacctccatagatttggtctaaacttaaaatttatcatgttcctctttctcgcaacaaaaacttttgaaatagtaactaataaccgcgttcaactaaacaaaacatacattttttcgcttaacagccgcacgagaactttctgacccagccctgaagggtaatacaaatggaataacatctcttggattaatcaaagctaatcagttccgccgtagccggctcctcagctttaacgggcgcgggtcccggttcgttttgcggcggagcaggtgcagcagccaccgcttggacttgattgttggcgatttcggtaactggaggtgcctgtgctgctggaggagcctggtgctgctgcagcattacgtgacccatttggggttgtggctgaggttgctggacaggaatctgctgtggctgctgaccaggaatctgttgaggctgctgaccaggaatctgttgaggctgctgaccaggaatctgttgaggctgctgaccaggaatctgttgaggctgcggttggaatggtatttgaggaggctgggcgatcgaatgctgctgcggcagctggaggatagcagcaggattgttggcaaactgattttcgggcatgggcggcatcatctggggatttccaggtggcgcgggctgttgcattaatccgccgggctggagattcggcggcatcggctgctgtattgccggattgtacatgcccggcggaatggcctgaaactggccatgtccgttgggagccggtgcaggaccctgaggcaaatagccgggcacaccggcagcatagggattataaacgttgttgagctgatgcgagggcgaaccatgttgtggcaccgccgatggtggcatgtaggggaaaggtggagccgactggcccatcaaatactgcgccttctgctgctcctggcgcagctgcatctcgcgctcctgctcctggatgcgctgcaatgctagctgtcgttgatactgcagatactcctgcttcttcttgcgcattatgtccagtttctgggccatctgcatctgtcgctgacgttcctgctcctcggcgatcctgcgcagcttctccacatgctcctgacgcagctgatccagcgcagcacgcgagtccttgatctgggttagcttgtcctgcagctgctcgtaccacatgcgcttgtcgtccatctccttgatgtacgacaactgctgcgagtgcaacgaggtcagggtcatgaagagggtctgcacagaggagtcgttggagatgctgcgaccgcggctcgagttcgacttcatgcggttaacaaagatctccacctgcgtgcgcatattggcggcaaactcatcgatctgcacttcatccgcactcttgacctgcaggggcatgatctgctggggctgcggcgttggtggcatggggctcggtgccgagggacttgccatggatgacgattcgctgatcttgcgctgctcccagtagctgcggttcaagtacttggccagctccggattggtagcctcctccggctgctggtgatactccttgggttctggcggtgcctccggactgggagacctttgctgcatgcgataggcagcgggtggcagggattgcagcttgggcttctgctgctccgcttccgattgactgagggccagcgccagctgcagttcctcctcctccttgagttcctgctcggtcttgcgagctggtgtctagaaggaatatggttttgccattaatcggctgttctgtttcgattagattagctgttttcccagagtgactcacctgcacctgctgcgccaaagtgctgttcagatactccgccggtagctcgctgtccgccggacgtggtccggacttagcgcctccactgccgctcgtcggacgctggagggcagcgaagcagccgtcgcacacacgcacctccttttcgatgccgtacttgggcagcggacactgcttggccgtgcattggccacagaagacctggccgcagttccggcagtggtgcttccggttggtgaaggtgaactccacgcgacagcgatggcataccctgccatctgcccagttgggcgccgtgtccgccgtgaacatggcatctgcctcccgaagttcggggaaagtgtgccccttcgccttcaggatggtcatggtgtcctgcagagaatgggattgttagtaaagttagctgtagttatgtggcgtgagtctacaagggattcctcctcaatgctaagttcctcctccgagctcatttctattcaactgatgacatttcactgggttttgctacgcagcaaacagttgtttcctactaattaaattaatggcaaagcgcagggccggattttgaactaagtgtgcgctgggctgatgcaaagtgttatattcaatgcaaaagtatagagaaacccacaatctttttcaaagtgcatcaatcgcatggtaaagatccctttagatggagctgccaatcctaccttgatggcctggtacttgtccgaggagcggaaggcgtacgcccaggtctgcaccagctccagcatcttctggcgcacgttctcgtggggcgtcgactcgaggaaactgctgaacatctcgcagttctccttggtgaacacctcctcgtgaacgggtgcgccgcagttcttgacgatgctctcgaggaccaggagggaatagcaggaggagtgcgggttgggcgagttcatcttcttcttgatggcggcaaaggcattcttgggactggttttttgattaaaataataaatctggaatcgccgaaacttacgtgacatctttctggttgatttcatcgcaaatcagaagaattgatggccagtcgggctccagacgcaagtgactggtggcattttctgcgagtggaaagtgcgtaattgttagacctttgtgtgtttatcaaaatcttcaattgttttggagttcaatcgcctttttattgttacttctgaattcttcttccttgttttttttgtttttcgatgagtcattttttcttattggtttatttccttgactttggtgcttcttacctaagtttttgtcgaaacttgatcgaaacatgttttctgttttcttttatgctgcttctcgtcgttggttttctattgttattcgtttaaaataaggaaagcttattattattgttttgcaagcaaagaaattttctgcaatgcgctagtgctgccacatcaatgaaattaacatacccttacagtgctgccagatgacgaaaagcaagggcaacgc

SEQ ID NO: 28070 - DNA, 2251 bp, DROSOPHILA
atcagttgaatagaaatgagctcggaggaggaacttagcattgaggaggaatcccttgacaccatgaccatcctgaaggcgaaggggcacactttccccgaacttcgggaggcagatgccatgttcacggcggacacggcgcccaactgggcagatggcagggtatgccatcgctgtcgcgtggagttcaccttcaccaaccggaagcaccactgccggaactgcggccaggtcttctgtggccaatgcacggccaagcagtgtccgctgcccaagtacggcatcgaaaaggaggtgcgtgtgtgcgacggctgcttcgctgccctccagcgtccgacgagcggcagtggaggcgctaagtccggaccacgtccggcggacagcgagctaccggcggagtatctgaacagcactttggcgcagcaggtgcagacaccagctcgcaagaccgagcaggaactcaaggaggaggaggaactgcagctggcgctggccctcagtcaatcggaagcggagcagcagaagcccaagctgcaatccctgccacccgctgcctatcgcatgcagcaaaggtctcccagtccggaggcaccgccagaacccaaggagtatcaccagcagccggaggaggctaccaatccggagctggccaagtacttgaaccgcagctactgggagcagcgcaagatcagcgaatcgtcatccatggcaagtccctcggcaccgagccccatgccaccaacgccgcagccccagcagatcatgcccctgcaggtcaagagtgcggatgaagtgcagatcgatgagtttgccgccaatatgcgcacgcaggtggagatctttgttaaccgcatgaagtcgaactcgagccgcggtcgcagcatctccaacgactcctctgtgcagaccctcttcatgaccctgacctcgttgcactcgcagcagttgtcgtacatcaaggagatggacgacaagcgcatgtggtacgagcagctgcaggacaagctaacccagatcaaggactcgcgtgctgcgctggatcagctgcgtcaggagcatgtggagaagctgcgcaggatcgccgaggagcaggaacgtcagcgacagatgcagatggcccagaaactggacataatgcgcaagaagaagcaggagtatctgcagtatcaacgacagctagcattgcagcgcatccaggagcaggagcgcgagatgcagctgcgccaggagcagcagaaggcgcagtatttgatgggccagtcggctccacctttcccctacatgccaccatcggcggtgccacaacatggttcgccctcgcatcagctcaacaacgtttataatccctatgctgccggtgtgcccggctatttgcctcagggtcctgcaccggctcccaacggacatggccagtttcaggccattccgccgggcatgtacaatccggcaatacagcagccgatgccgccgaatctccagcccggcggattaatgcaacagcccgcgccacctggaaatccccagatgatgccgcccatgcccgaaaatcagtttgccaacaatcctgctgctatcctccagctgccgcagcagcattcgatcgcccagcctcctcaaataccattccaaccgcagcctcaacagattcctggtcagcagcctcaacagattcctggtcagcagcctcaacagattcctggtcagcagcctcaacagattcctggtcagcagccacagcagattcctgtccagcaacctcagccacaaccccaaatgggtcacgtaatgctgcagcagcaccaggctcctccagcagcacaggcacctccagttaccgaaatcgccaacaatcaagtccaagcggtggctgctgcacctgctccgccgcaaaacgaaccgggacccgcgcccgttaaagctgaggagccggctacggcggaactgattagctttgattaatccaagagatgttattccatttgtattacccttcagggctgggtcagaaagttctcgtgcggctgttaagcgaaaaaatgtatgttttgtttagttgaacgcggttattagttactatttcaaaagtttttgttgcgagaaagaggaacatgataaattttaagtttagaccaaatctatggaggtaaaaagatagttggaaagtagtgctgcacgagatcgaggcccgcccttttatcacgttttaaccgactaatgttattccacaataaaaataactttgtattttgag

SEQ ID NO: 28071 - protein, 647 aa, DROSOPHILA
MSSEEELSIEEESLDTMTILKAKGHTFPELREADAMFTADTAPNWADGRVCHRCRVEFTFTNRKHHCRNCGQVFCGQCTAKQCPLPKYGIEKEVRVCDGCFAALQRPTSGSGGAKSGPRPADSELPAEYLNSTLAQQVQTPARKTEQELKEEEELQLALALSQSEAEQQKPKLQSLPPAAYRMQQRSPSPEAPPEPKEYHQQPEEATNPELAKYLNRSYWEQRKISESSSMASPSAPSPMPPTPQPQQIMPLQVKSADEVQIDEFAANMRTQVEIFVNRMKSNSSRGRSISNDSSVQTLFMTLTSLHSQQLSYIKEMDDKRMWYEQLQDKLTQIKDSRAALDQLRQEHVEKLRRIAEEQERQRQMQMAQKLDIMRKKKQEYLQYQRQLALQRIQEQEREMQLRQEQQKAQYLMGQSAPPFPYMPPSAVPQHGSPSHQLNNVYNPYAAGVPGYLPQGPAPAPNGHGQFQAIPPGMYNPAIQQPMPPNLQPGGLMQQPAPPGNPQMMPPMPENQFANNPAAILQLPQQHSIAQPPQIPFQPQPQQIPGQQPQQIPGQQPQQIPGQQPQQIPGQQPQQIPVQQPQPQPQMGHVMLQQHQAPPAAQAPPVTEIANNQVQAVAAAPAPPQNEPGPAPVKAEEPATAELISFD

SEQ ID NO: 28072 - DNA, 4893 bp, DROSOPHILA
atattttgtagctattgggggattttaagtaatgttatgaaatcatacctttctttatttgtgtaaagtattcaatacacgcaactaacgggcaaaattggaaacacccaaaaattcaattttggcgcgcacagaaagctgcccttttggaatagattggcagcactctcgcgcacggtggcaacctcgtctagggactgccgatagcagcaagttccgcccgtgtggcaacaccgctagaaaaacagtctaaatttgctgtgcaacactggcggtttgcaaaaataatttcggtgctcgcgtcaatcagaaaaagccgaaaagaacggcctttatgtgcgcgaattaatcgccagccgagtggaacgcgaccaaaggaacccagcacacacacacactcagaatggaggccctaattccggtcataaacaagctgcaggacgtcttcaacaccgtgggctccgactccatccaattgccccaaattgttgttctaggcagtcaggtaaatgcaaactgcgaggtgcccaaaaatccgcacaccgaaaaccataaatccccgagctccgtaaaaggagtggcaactgagaaccggaatatggcgcagctatctgaaaccccaactcttgcgcttttccagtgaccgcaaaattatataactgagtgcgtttgccggcattttagttgtgttttcagtttgtagcaacatttcagccagctttcgctcttcgcggcgtccccattgtttatataattatttttggcactgctcgccgccgccatggaaaatcaatatgccacagtattatacaaaaacgaaaaaaaaaacagctgctggctgatgtgacacattcccccacgaacacactgcaaaaaacaaacgtacacatgtgtgacttcgatagttgtgtctgtatgtacatatatgtgtgcatgtttcgatcgctggcttaattgcactttgattcacgctctggaattaagtcagtatgactaaatgctcgcgcaactcattgataccgagtacagcggagctccaatatgttgaatctgtgccatttcttaccattcatttggttttctgttgcaaaggcttaagtttgagaaatttgcaatcacagaatggctcccattgccagataagaatagttaatctgcggttttccaagtgtttcctcgctgcaaacgcttgggagccaccttatcaggtcatcgtcttttatcagccgtcgttttaactcccagtaatacatacatttccccttttttccagagctccggcaagagttcggtgatcgagagcgttgtgggacgatcctttctgccccgtggaactggtattgtgacccgtcgcccactggtgctccagctgatctacagcccactcgatgatcgcgagaatcgctcggcggaaaatggtgagttgagacgtcagaagttcgggaaaacccaattgctaaaccacataacacttaggtacgtccaatgccgaggagtggggccgcttcctgcacaccaagaagtgcttcacggactttgacgagatccgcaaggagatcgaaaacgaaacggagcgggcggcgggcagcaacaagggcatctgcccggagcccatcaacctgaagatattctcaacgcacgtggtcaacctaacgctggtggatctgcccggcatcaccaaggtcccggtgggcgatcagccggaggatatcgaggcgcagatcaaagaattggtcctcaagtacattgagaacccgaactccatcattttggctgtgacggccgccaacacggacatggccaccagtgaggcactcaagctggccaaggacgtggaccccgatggccggcgcactctggccgtggtcacgaaactggatctcatggatgccggcaccgatgccatcgacatcctgtgcggccgggtcattcccgtcaagctgggcatcatcggcgttatgaatcgctcgcagaaggacatcatggaccaaaagcacatcgacgatcagatgaaggacgaggccgccttcctgcagcgcaagtatcccactctggccacccggaacggcacgccctacttggccaagaccctcaaccggctcctgatgcaccacatccgggactgcctgccagatcttaaggtgagtctagtctataaagactgcatatcgatttcacaaactatgcgagaatctcaggctaaaacttcaagaaaatgtaaaaaaatgaaacaaacttggcactcgattataatcgatctttatatttttctatggtaaagcaagagaagattaatggcagataaggttagaatagcatgttgaattcaagagaatgacttcccatattcttgcagactcgcgtcaacatcatggccacgcaattccaatcgctgctgaactcctatggcgaggatgtctccgacaagagccagaccctgctgcagatcatcacgaagttctccagcgcctactgctgcacaatcgagggcacggccaggaatatcgagaccacggaactgtgcggcggtgcccggatgggctacattttccacgagaccttcggccgcaccctggactccattcacccgctggcgggtctgagcaagatggacatactgacagccatccggaatgccactggtccacgcccggctttgttcgttccggaggtctcgttcgaactgctagtgaagcgccagattcgccgcctggaggaaccctccttgcgctgcgtggaactcattcacgaggagatgcagcgcattgttcagcattgtggcaacgaagtgcagcaggagatgctgcggtatgtgaactcatgatagctgaacgccaaaggttttcatcgatctcccctacagctttcccaaactgcacgagaagattgtggacgtggtcacccagctgctgcgtcgacgtctgccgcacaccaacgtgatggtggagaacattgtggccatcgagctggcctacatcaacaccaagcaccccgacttccacaaggatgccgctttggtgcccagtctgctgaaaacggacagcgatccctactcacagataaatctggggcagcggcgggccaatacaccgcgaaaccacatgtcgcctcagatttcgtcgcacagtgctggttcacagcagccgcagcagcaacagccgccgcagccgaattcctcacagcagcaatatagccaagtgcatgagcaggtgccagcggaatcttcatttatgtatgcaacctatttaacccattttcgtttcgctctctagaaccacgtcgccgagaactcgacgccttcgatggccagcacatggctgtcaaacattttaccgccggcaccaacgcgtccggacagcattgagaactcgaccaacaacactccggttcacaataacatcgtgagtccagtgaagccggtcaatctgctgcccgatgtgccggccaaccacaatccacgtcgcctcactgacaaggagcagaaggattgcgatgtcatcggtgggttgcacttaactcgggccacttaaagacctaactcaatctgactactttttgtttttagaacacctgatcaaatcgtatttctacattgtgcgcaaatccatacaagactcggttccaaaggccatcatgcatttcttggttaactacgttaaggacaacttgcagagcgaattggttacacatctgtataagtcggataaggctgaaaccctgctcaacgagtccgatcacattgcagtgcgccgaaaagaggcggcagatatgctgaaggtgcgcttggctagcttatacttagcttgacatcgttttaaacttacttttgatttcaggcactgacgcgagcgaatcacatcatcagcgaaatccgcgagacccacatgtggtaggctggtcagcgattggagcaacccgtttcgacttaataatccccgcatataagcaacataaaaactatttattgaagacgcgttcaaagagaacgaactcctttgttaaatgttccccctaccgagcactgaaatatcatcaaattgcatgcgacccccaaattctgggcctttcatttagccaactcgcatttctattcgcctggcatttgtctatcatcgagcctctccgctttttaaattaataagaagttgtagacgccgtgattggtttgattaggttactcaaagcacttattacacattgaatagtcaaataaagcagaaaaggttgattcaaacatagtagatgtgttttctgtcacggcagctaaaagtttacgaaggcaacgtcatcatgttgaatgatacacctggaatttcgattagataagccattatgttcgtaaagttgctaggctcagtctgaagattaataagtgtttaaatctgataggagttgaatcttcctgagttttgagatgcgtagcaattgcttagccttactaaaaacaaaatttttcttacaaattatgttacatgtaggtgtggcttgagtgaactagaagtacgttcgttcccctgattgaaatcactgccactcacctttcgtaataaaaactttaatacttggataccagttaaaatctaatttggaaaacgtcatttgtattgcggcgaagaaacagaagtgggttccagctggggcgtggcaaatcccgaagataaggatgtggtgtccagtgctccaatcctgtgttgattaaatgctccgcgatgcgtatgaatcggtttatggggcagggaacagttggggtagtgactctatgaccgcctttggctgtgctgatctcctctaggcgcgatttgtgtcggacagcacgcggacaatgcagcccactcctcccttggcgaaggccttctcatgccactgcagcaggtggccactggagccctccga

SEQ ID NO: 28073 - DNA, 2367 bp, DROSOPHILA
ctcgcgcaactcattgataccgagtacagcggagctccaatatgttgaatctgtgccatttcttaccattcatttggttttctgttgcaaaggcttaagtttgagaaatttgcaatcacagaatggctcccattgccagataagaatagttaatctgcggttttccaagtgtttcctcgctgcaaacgcttgggagccaccttatcaggtcatcgtcttttatcagccgtcgttttaactcccagtaatacatacatttccccttttttccagagctccggcaagagttcggtgatcgagagcgttgtgggacgatcctttctgccccgtggaactggtattgtgacccgtcgcccactggtgctccagctgatctacagcccactcgatgatcgcgagaatcgctcggcggaaaatggtacgtccaatgccgaggagtggggccgcttcctgcacaccaagaagtgcttcacggactttgacgagatccgcaaggagatcgaaaacgaaacggagcgggcggcgggcagcaacaagggcatctgcccggagcccatcaacctgaagatattctcaacgcacgtggtcaacctaacgctggtggatctgcccggcatcaccaaggtcccggtgggcgatcagccggaggatatcgaggcgcagatcaaagaattggtcctcaagtacattgagaacccgaactccatcattttggctgtgacggccgccaacacggacatggccaccagtgaggcactcaagctggccaaggacgtggaccccgatggccggcgcactctggccgtggtcacgaaactggatctcatggatgccggcaccgatgccatcgacatcctgtgcggccgggtcattcccgtcaagctgggcatcatcggcgttatgaatcgctcgcagaaggacatcatggaccaaaagcacatcgacgatcagatgaaggacgaggccgccttcctgcagcgcaagtatcccactctggccacccggaacggcacgccctacttggccaagaccctcaaccggctcctgatgcaccacatccgggactgcctgccagatcttaagactcgcgtcaacatcatggccacgcaattccaatcgctgctgaactcctatggcgaggatgtctccgacaagagccagaccctgctgcagatcatcacgaagttctccagcgcctactgctgcacaatcgagggcacggccaggaatatcgagaccacggaactgtgcggcggtgcccggatgggctacattttccacgagaccttcggccgcaccctggactccattcacccgctggcgggtctgagcaagatggacatactgacagccatccggaatgccactggtccacgcccggctttgttcgttccggaggtctcgttcgaactgctagtgaagcgccagattcgccgcctggaggaaccctccttgcgctgcgtggaactcattcacgaggagatgcagcgcattgttcagcattgtggcaacgaagtgcagcaggagatgctgcgctttcccaaactgcacgagaagattgtggacgtggtcacccagctgctgcgtcgacgtctgccgcacaccaacgtgatggtggagaacattgtggccatcgagctggcctacatcaacaccaagcaccccgacttccacaaggatgccgctttggtgcccagtctgctgaaaacggacagcgatccctactcacagataaatctggggcagcggcgggccaatacaccgcgaaaccacatgtcgcctcagatttcgtcgcacagtgctggttcacagcagccgcagcagcaacagccgccgcagccgaattcctcacagcagcaatatagccaaaaccacgtcgccgagaactcgacgccttcgatggccagcacatggctgtcaaacattttaccgccggcaccaacgcgtccggacagcattgagaactcgaccaacaacactccggttcacaataacatcgtgagtccagtgaagccggtcaatctgctgcccgatgtgccggccaaccacaatccacgtcgcctcactgacaaggagcagaaggattgcgatgtcatcgaacacctgatcaaatcgtatttctacattgtgcgcaaatccatacaagactcggttccaaaggccatcatgcatttcttggttaactacgttaaggacaacttgcagagcgaattggttacacatctgtataagtcggataaggctgaaaccctgctcaacgagtccgatcacattgcagtgcgccgaaaagaggcggcagatatgctgaaggcactgacgcgagcgaatcacatcatcagcgaaatccgcgagacccacatgtggtag

SEQ ID NO: 28074 - protein, 542 aa, DROSOPHILA
MATSEALKLAKDVDPDGRRTLAVVTKLDLMDAGTDAIDILCGRVIPVKLGIIGVMNRSQKDIMDQKHIDDQMKDEAAFLQRKYPTLATRNGTPYLAKTLNRLLMHHIRDCLPDLKTRVNIMATQFQSLLNSYGEDVSDKSQTLLQIITKFSSAYCCTIEGTARNIETTELCGGARMGYIFHETFGRTLDSIHPLAGLSKMDILTAIRNATGPRPALFVPEVSFELLVKRQIRRLEEPSLRCVELIHEEMQRIVQHCGNEVQQEMLRFPKLHEKIVDVVTQLLRRRLPHTNVMVENIVAIELAYINTKHPDFHKDAALVPSLLKTDSDPYSQINLGQRRANTPRNHMSPQISSHSAGSQQPQQQQPPQPNSSQQQYSQNHVAENSTPSMASTWLSNILPPAPTRPDSIENSTNNTPVHNNIVSPVKPVNLLPDVPANHNPRRLTDKEQKDCDVIEHLIKSYFYIVRKSIQDSVPKAIMHFLVNYVKDNLQSELVTHLYKSDKAETLLNESDHIAVRRKEAADMLKALTRANHIISEIRETHMW

SEQ ID NO: 28075 - DNA, 2030 bp, DROSOPHILA
attttacaggtatattttaatatccgttatttgtgggctaaagggtattcgatacttttcatgctttattttaactttccagctttagtaattcctgaaatgtggacgtctatacggacaagacggacggatggggcgttggaaacgcttcttctaccagctatacactttccatcgaatatagtataccctttgattctacaagtaactaagcctttgaaacactttaaaggctgacatattaggcaaaaatcagaggatttataattgcattggctttatattgtatatttaggagccacatattgagattacaatttttaaaggctttctcacctgatcaggccgcagtccgggtggcacccaggtgtactcctccagagcacagccactgtcgtcgtccgagtgcgactgccgctgcatgtccatgtgcggtccgcccaggaagggggcgtgggccgaggcagaggaagtgcctccggcgggatggtggagcagcgagggtggcgagggcgtcgacaaagccggcgatagctggtggtggtggtgcggcggtggcgggagctgggcattcgagtacttgggattggcggagcagcctggcgagtactgggggccaaggggcggtcctgctgctgcccccgatcctggtcctggtcccattccagctcccgggtgctgttggtgatgtggcggcaagtactgctggtggcgctgcagtggcagcggggaggtgggcaggattccggctgctgcctgggccgcgtagagggcactggcggaggagctgctgggcagacccatgccgccgctgccgagggctgggggcgtggccaggccctgcccactgggcgagaagtggcgcggaagcgtggggatcttctgcagataggagatctgcgttagcggagttcggctcgttatcatgcggcggaagttgatggagcaattgtcgcacacgatactgctcccccggactgttgacgtatggcactttgtcgtcgggtatctgcgagaagtacaagcgaacctgcgggagaacagagcagatggaaccgagtggtaagtaccttgcggaatggtcgagattacagttaaggaggcgcgggcaccaaagggttaagagccgccacagcgggcatggatttttgattttattacgctgatttctcggttcctgctcctccatctgtgcctccttgcgtttgagccaggttgaaaggtgcacaacgtgctaagccatctttattggccacgctcgccaagcgttctttcatcggcgggaagcggaaagcggacagcgagaagcgggacatggaaatgggaatggaaaatgccagctcgagcggcggctgactgacacatggcttatgccgcatcaacgtaaattgctgccacatggctgtaaataaattttcaattctgtttgtaaagtcacccagcgaaaagcgaggcaaaacgaagaaatgcattgctagacatctgataggcccgtcgggatgggatcggatggcatccgatgggaggatggctttaacggaagtcaaagagttgaacgcaaaagcgaaggggacccgaaaaaattccgattcagaggtcggagttggaaactgggcacttctgccgggcagattgtgaaagatttatttggcattgtcgcatattttacgcgaataatttacgagttcgtttcgtttcgtttcggttagcggcgcctggcaaataattgaaaaaagcacggccctgccgcttccagccacaattgaattggccattaaagtcaaatgcgaattgaggaatggctgctggccggcgggggagtcctccgcctcctccgcatgcttctcctcggaacgggcactcattagcactatctaattcaacagacggacagacaactagatccctagcctaattgacgcgctccagagcggagctggtcgcaatcgcctttggccagctgcactggccactccgctgcatcatctttcgactggctttcgaggccgtcctggccaccagtcgctgat

SEQ ID NO: 28076 - DNA, 4752 bp, DROSOPHILA
ttcctaatcaatgcagtgaccataccatactatacaatcaataaatattgattttttataaagtggtataaattaactagttcctaatcaatgcagtgaccataccatgtattttaaagaatatatgtaatgtacgaaagagtacaaaatgcttgaaacgccacaaacaaacgccgaatttaaataaaaaaaaaagtgtacaaaaaactacaatcatgtaattaaaattccactcgaagctaaatttacgaggaaaagctgaaagaaacatgtaaaacaaaagcaaccaaaaagcaggtacaagaacaaaatgacactgccgacaagaaaagacaacgagaactgaaaaataattacgggcccagaacaataataataagcaacatgagcagcctgtcaaccggtggaggagcaggaggctccagcggaggaccggggggagcagatgctgccgctgctcctgctgctggccaggcaacagtaacggccactggcaacatggagcctgcgatggtgccacgtaccgccaatttgctggcatgcaaacaatggtggcgcgtctgcttcttgtacggggaccagcagaaatattatcgacagctctatagcaaggcggcggcccagcggctggcggacgctaatcaggaacccgacaatgcccgcgatcgggagtacgacaccgtggactgcgatcttatcgccgggcaattagatgccgtcgaggatgcggacgatggcatcgatctaggcgatcactcgtcgaccccgaagggaggtgcgacgacggcgggccgtccgctcttcccgcattcctcctcaccgcggcgcagcaagaagctcctgagatccctgcgagcccatgtgcgcggggagaagctgccgaagaacgacactacgacggctaacgagtccagcgaggtgacccagcggaatgccagggtgaccgttctcgacgacccctttctattcggcatcgacgccgatcacttgggcgatctcgtggtgcggggcaagcggtacagtacgctagacgccaccgagaacatggccaggttctatgcggagcaggaggccacggcccaggtcctggagatcatcgagcaggaagaagaatctcccgagcaggaagctcccaagcccgccctaccgcccaaacagaagcagcagcgtcctgtgccgccactgccaccaccaccagcgaaccgggtcacccaggaccaaggaacgcaacctgcagcaccacaagtgcccctgcaacccctgaccgccggcgatcttcagtttctaaacttgagcctgcggcagaggagtttaccgcgcagcatgaagccgtttaaggatgcccacgatatcagtttcactttcaacgaactggacacgagcgccgaaccggaagtggcgacaggagccgcccagcaggagtcaaatgagtgccgaactccgctaacgcagatctcctatctgcagaagatccccacgcttccgcgccacttctcgcccagtgggcagggcctggccacgcccccagccctcggcagcggcggcatgggtctgcccagcagctcctccgccagtgccctctacgcggcccaggcagcagccggaatcctgcccacctccccgctgccactgcagcgccaccagcagtacttgccgccacatcaccaacagcacccgggagctggaatgggaccaggaccaggatcgggggcagcagcaggaccgccccttggcccccagtactcgccaggctgctccgccaatcccaagtactcgaatgcccagctcccgccaccgccgcaccaccaccaccagctatcgccggctttgtcgacgccctcgccaccctcgctgctccaccatcccgccggaggcacttcctctgcctcggcccacgcccccttcctgggcggaccgcacatggacatgcagcggcagtcgcactcggacgacgacagtggctgtgctctggaggagtacacctgggtgccacccggactgcggcctgatcaggttcgcttgtacttctcgcagatacccgacgacaaagtgccatacgtcaacagtccgggggagcagtatcgtgtgcgacaattgctccatcaacttccgccgcatgataacgaggttcgttactgtcactcactgacggatgaggagcgcaaggagctgcggttattctccacgcagcgcaaacgcgatgccctgggccgcggcaacgtgcggcagctgatgagcgcccgaccctgcgacggctgcgacgacctaatctccacgggcgacatcgccgtgttcgccacgcgactgggccccaatgccagctggcatccggcgtgcttcgcctgctccgtctgccgcgagctcctcgtggaccttatctacttccaccgggatgggcgcatgtactgcggacgccaccacgccgagaccctaaagccccgctgctcggcctgcgatgagattatcctggcagacgagtgcacggaggcggagggcagggcgtggcacatgaaccactttgcctgccacgagtgcgacaagcagctgggcggccagcggtatatcatgcgggagggcaaaccctactgtctgcactgcttcgacgcgatgtttgccgagtactgcgactactgcggggaggccatcggggtggaccagggccagatgagccacgacgggcaacactggcacgccaccgacgagtgcttctcctgcaacacttgccgctgctcgcttctgggacgcgccttcctgccgcgacgaggggccatctactgctccatcgcctgcagcaaaggagagccgcccacgccgtcggacagctccggcaccggcatgtacaccacgccaactccgcccacacagcgggtgcggccccatccgcaagcgcctctgccggcgcgcattcccagcagccacgcctccagctcgccgcctatgtcgccgcaacagcagcagcagcaccaggctaccttcaaccaagcgatgtaccagatgcaaagccagcagatggaggcggcgggcggactggtggaccagagcaagagctacgccgcgtccgactcggatgcgggtgtggtaaaggacctagaacacggcggacatatgggcggaggagatctgacggacttttcgggtggacgggcctccagcacctcgcagaacctatcgcctctgaactcacccggcgacttccagccccattttctgcccaagcccatggaactgcagagacagctcctggagaacccccacaccgccagcatgccggaactggcgggtaaactggtggcgcctcctgcacacatgcagcacctgtcccagctgcacgccgtgtcctcgcaccagttccagcagcacgagtacgcggacatcctgcatccgccgcctcctccgcctggtgagattcccgagctgcccactcccaacttgagcgtggcctccaccgccttgccgccagagctgatgggctcacccacccactcggcgggcgacaggtcgctgaacacgcccatgtccacacagtcggcctcccacgcgcccccacatccggtctccatactaagcggcgcctcctcctcctcgccgatgagcggggagccggccaagaagaagggcgtgcgcttcgagggaattccggacacactgccccgatcacgcagctactccggtaacggagcgggaacgagtggcggcggcgagagggagcgggatcgggacaaggacaaggagggaggaggtcgccatggtcacggtcactcctcgcgaaggcgaagacgtcgcaagtcctcctccagctcgtcgcaccatcgcagcggcagcggtcatcgctcccactcgaccactcgagcggacacctatgcacctgcgcaacccctatcctcgtcctaccagggtccaccttcggttctgcaggctgccaacctggtccacgagtcacccagccgacagcagagggaacgggagcgcgagcgggaacgcgaggagtccgaggagtctgacgtgtgctccacctgctcctcgagctcctccagctcggaggactacatgatgatgtaccagctgccgcagaggcgccactacggcggcgtgcgcgtgagctatgtgcccaacgatgcactggcctacgatcggaagaggaagcccagtgaactgggcggcgacaaggacaagaactgcatcatctcgtgatgccgtccgccggaggggttccaatcagagccgaggttcgagcacaggtccagatgctgatgcagatccagatccagatcttattaatgtggagccacgggcaactccatctcgtggctaacgaagtggcccagaacgctcgcggggatcatcaattcctgggaagggaggcaactgcctctccacaaagcaaaataaagttcaacttgacattaaggcgcctagttaaggtacactcacaaacatacatatgcaactccggaggaggagaccctacaataagagccaacactgttccaaatacacatccctagttaagctaattgaactatatacatatatttttattattaccgatagcatagcgaagatacattgcagataaccctatttatacactttatttatatttattgcattctaggcttaccaattacactaagtatatgcctagacaaataagtagaaatgctgacgattgggctaatgaaactctacaataacttagtttaagcgaaatcactgtatgacattcacgagaataaagttcaaaaggagtaa

SEQ ID NO: 28077 - protein, 1268 aa, DROSOPHILA
MSSLSTGGGAGGSSGGPGGADAAAAPAAGQATVTATGNMEPAMVPRTANLLACKQWWRVCFLYGDQQKYYRQLYSKAAAQRLADANQEPDNARDREYDTVDCDLIAGQLDAVEDADDGIDLGDHSSTPKGGATTAGRPLFPHSSSPRRSKKLLRSLRAHVRGEKLPKNDTTTANESSEVTQRNARVTVLDDPFLFGIDADHLGDLVVRGKRYSTLDATENMARFYAEQEATAQVLEIIEQEEESPEQEAPKPALPPKQKQQRPVPPLPPPPANRVTQDQGTQPAAPQVPLQPLTAGDLQFLNLSLRQRSLPRSMKPFKDAHDISFTFNELDTSAEPEVATGAAQQESNECRTPLTQISYLQKIPTLPRHFSPSGQGLATPPALGSGGMGLPSSSSASALYAAQAAAGILPTSPLPLQRHQQYLPPHHQQHPGAGMGPGPGSGAAAGPPLGPQYSPGCSANPKYSNAQLPPPPHHHHQLSPALSTPSPPSLLHHPAGGTSSASAHAPFLGGPHMDMQRQSHSDDDSGCALEEYTWVPPGLRPDQVRLYFSQIPDDKVPYVNSPGEQYRVRQLLHQLPPHDNEVRYCHSLTDEERKELRLFSTQRKRDALGRGNVRQLMSARPCDGCDDLISTGDIAVFATRLGPNASWHPACFACSVCRELLVDLIYFHRDGRMYCGRHHAETLKPRCSACDEIILADECTEAEGRAWHMNHFACHECDKQLGGQRYIMREGKPYCLHCFDAMFAEYCDYCGEAIGVDQGQMSHDGQHWHATDECFSCNTCRCSLLGRAFLPRRGAIYCSIACSKGEPPTPSDSSGTGMYTTPTPPTQRVRPHPQAPLPARIPSSHASSSPPMSPQQQQQHQATFNQAMYQMQSQQMEAAGGLVDQSKSYAASDSDAGVVKDLEHGGHMGGGDLTDFSGGRASSTSQNLSPLNSPGDFQPHFLPKPMELQRQLLENPHTASMPELAGKLVAPPAHMQHLSQLHAVSSHQFQQHEYADILHPPPPPPGEIPELPTPNLSVASTALPPELMGSPTHSAGDRSLNTPMSTQSASHAPPHPVSILSGASSSSPMSGEPAKKKGVRFEGIPDTLPRSRSYSGNGAGTSGGGERERDRDKDKEGGGRHGHGHSSRRRRRRKSSSSSSHHRSGSGHRSHSTTRADTYAPAQPLSSSYQGPPSVLQAANLVHESPSRQQREREREREREESEESDVCSTCSSSSSSSEDYMMMYQLPQRRHYGGVRVSYVPNDALAYDRKRKPSELGGDKDKNCIIS

SEQ ID NO: 28078 - DNA, 2279 bp, DROSOPHILA
gcctgtaataatcacacagtaaacaggcagcggtcagaagacttgactggggtggggatggcctggatacactgagaaaaatgtctgctgtttgttacattaaacaaattacatgctaacttcatattattaaattatattttggtcaatgaatgaatttagcttttcaacttgattttacatttgaatttgaatgtattttggcaatctaaagttattatatgcaatcttttatcttttctctccctgtactggacttcggcgtgggaatggccaacagaaagccaaagaaaggaaagggctttggactaactgagtgcgccagaggagtaggcccctctagctcctcctgctccttcttctcccatctgaccagttgtaattgcaacgtcaacgtaaatgcatggcacatgcagcagcgactcaggaatttcacggatgtgcgatgtgcgtgcattttgcagatgctcgagctgaccgccgcttggacatcacgtattcgcacagacacacggacgcacagacaacggaccgcatttgattgcattttcgctgctccagaacgcggatgagcccgggggtagtggggcaaacggagtagcttgggaactctgggacttgggaactggacgcactgccctcgatccactcctcgtgctcaagatttatctgtgcgcgtttattttaatgttacgttctggcatctttgctcaattttgcctgccgcatacccttcaccaaaggtattctacctggtagccagaattgaaaaacaaattataaatatatcttctcttcattcaggattaaattatgaaacatttatgaaattaagattccctattaaagaatcgaaacaaaaacttccatctcaagtgaagtgacaaacatttacataaaacatgtcacgtttgtgtaaattgtttaaagtctaattaagatgtcaatctccttcagttgaatctattgattgtgcaactatcacagcactcaagtgcatctaatcttcgccagacggacttctggctgggactttcgtctgcttaagcagcctctttcgatgcattgcccattggctggatgtctttgtgtttatggagccatgtccgcaggttgccatcttcatctggccatcagcagcaccatcatcatcatcaaccgaatcactagaagcgggagcaggagcagaagctgatgcagaagctgcatcctcgatggcgtgccattcctgaacgtggtacgttgaccgctcggaatgttgattcatcttcttgggcataactgctgccagtttgcacggactactctctgttttattttcctattttcacaactccacttgctcttttatgtcaatcagcagtttggcatccagctcctcggctggctgctacacgtttatgggccatcattgtggccatcgagacggttggaaaaatggttgcgtctatttttagtggaacacatgcgtcgctttcgcctgctctattctattcctgaccgaccagcactcgttcatactcgttcagtatgttagatccccaggcgggtctctattatccccatattgccataataagcgaagattgcccttaagtggctggcggggattgggcgagtactcgccagtgcattcttctttatttttagcacgatctcggcctgtctgggcctgttacatgaataattgccagttaggcttacaggcccacatgatcgccatggataattgtaaatgggcatagaacttaattgcatttaaatgccgacaggtgtgggtactgcacaaaatcagcgcatgagaattctggcaaattaaaggcttccgaagtagcaactacattgtaagccaatacatttcattagaaccaattaaagtagggaattatttaaaattggattttacaaaatgtaaattctacgaattgaatgaatatcgcagatatttcttgtgccaaagatgttctttttacaaaacgtaaagaggaattcctgagttgattcttattcctcagaaccttttaattcagaaccttaggcttctgagagtaagatgttatattttaatattattttggcaatattcatgggaaacccgtaaaaggaaatcatgcacgacttgccagcctttgcttaatattcgtctcaccggaatccattcggctgactgtcattagcaattcgggcaatcaatgaacaaaagataatgttaatttgacagcccccggcaattgattcccagccaactgacaaacgcacaggccgcactgcctgattga

SEQ ID NO: 28079 - DNA, 279 bp, DROSOPHILA
atgcccaagaagatgaatcaacattccgagcggtcaacgtaccacgttcaggaatggcacgccatcgaggatgcagcttctgcatcagcttctgctcctgctcccgcttctagtgattcggttgatgatgatgatggtgctgctgatggccagatgaagatggcaacctgcggacatggctccataaacacaaagacatccagccaatgggcaatgcatcgaaagaggctgcttaagcagacgaaagtcccagccagaagtccgtctggcgaagattag

SEQ ID NO: 28080 - protein, 92 aa, DROSOPHILA
MPKKMNQHSERSTYHVQEWHAIEDAASASASAPAPASSDSVDDDDGAADGQMKMATCGHGSINTKTSSQWAMHRKRLLKQTKVPARSPSGED

SEQ ID NO: 28081 - DNA, 14664 bp, DROSOPHILA
ttaccaaatgcatttgaaaaaacataaaatatataacacctgctatcgtgatgcactggaaattcatcttagcctacgttccagatttcacaacggcgtcgatacgagttttaggtagaactgaaactaactactttgctcaaagccaataaacatttattatgacaaaggctaattaaaattcaattatatgcgcggcatcattattaaccgatttaaataaattcgctgattagtgtggatctttataacagtattaacaaaaaaaatttaatttgcaataagatcgattaattgttgtactttctgctaaaacgattaatttattcatatttaaaaaaccttacttcctacaaaaacacattacatttcgccttaagactagttattacagcactaaacaatcatttagacgacgaccaggtcggttagatttaattatacaacattatcatatcatcatcctactgactcctccgttcttgctctgctctggttcgttgtgaaaaaggtattacgtggatatggacaggttcgatatctgcagatcttccgaattgaggcgcagtatctgctgatcctctgagtttatgtgcaccaactgcccgctatcgaagctaagcagattgctgagcgttggcccattattatccgcttgattgccagcggtattattattgttattattgttattaaggttggcattgttgttggtgggcgcagtattgtcgtactgctgctgctgctgctgctgaagctgctgctgctgatgaagcgtatgctgattgtgctgcaagatggaaggtttcatgttcagaaatagtcatattttttttcttttttgttccaagtatttcaaaattgatatcttgcttcttaacccaccagatgatttgtggtcaggttccactgcagattgttggcgttgccaggacctccgcccgatgtcagcaggttgtgcatggtgaagggattgttgagattgctgagattattgctattgccgttggcaggtgctgctcctgtcgcagttgctgccgctgctgcaacagctgccgccgagaatttactttcccagctattgccgccaggattgccaaagggattggcatgaaattgcaaggactgttgctgttgctgctgctgctgctgctgctgctgttggtgttgctgctggtgctgatgctggtgctgttgctgctgctgctgatgctgctgctgctgggcaaggacctgctgggcaaacggattgtagttgctccccagatcagttgctccatattgctgctgttgctgttgctgctgtggatggttgggcgacatcagttgctgctggccattggtgggcgtgaccgcggaggccatgttgtagggcgagggcgtgctgttgtggttgtagttgctcgatggcgacagcggctgcggcgagggtgtgagctcaggaggcgcccgataagaaagcccaaagggttgtggcgaggtatctacaaagcgaagcgagccgtttttaataataatcagtcgaaattccatttacacttttaaagtaggccatttgatgtttatggaagttttaactaggttttttttttgtagttttagtgtataaaactcacctcttggttccgttttaatgggcggtatgttttgtgtattccagcaattcatgttagtttgtcctacaataaaaccagcaatcaaaaataaaaagttaacaaatcaagcagaacgtgtaaagcaaacaatataaaaaccaaagattgaagtaaaccataaaagattagatagtatttagattcgttagtgcggcgtacagattaaaaactctgcctgggcaatgggaaacaattaaaaatatcgctgtttttgataaaaactaaataagcaaaataataaaatgtaatcatgcatataaatttccgaaataaaacaaaaaaggtcaaagactgaaatgaactgttttgaactccgataaagacttactcagaactgtaaactcttcttggaagtaagaaatcctagagcaaaacttacttcaacctataaacagttcctttttaataaaataaactttactttttttttttgaatttttcttgattttttttttttgttttattaagctacaatattttatacaaaatatttttaccaaactcttaatttttcgtatataaaaatatcaaatattcttcgcatgtaaacgagtagaaaagcgacaaaaatttcatattgatttcgaatcaatctctcattttcttgactataatttcgactaatcatgtaaatcaatatataaatatagtggggacattacccccctttacgtagatttcatggtgttctgggtgagtggatttgtgcattgattgagtgctttctaatagtttctaaaagagtctattcgagtaatacgtcatcgggggcgatgatttgttaagtagtctttggtataccgaagaaaacatcaaatatatatgatgctatttgactaggtaggattcagttagatgtctagcatccatctcaaaacaaagtatgtgtacccaagtggattcaaacacatgggaaaaaatcgactcaaagtcgcgacagacacaatagaggatagagaagaccgacaccagtttgggaaaaatctcaacagtcaacttactgccatcctggtggtcattctgcaattgctgtttctgctgctgctggagcagcaggtgcatgggatcaccgccagtcttctgacgtttccgcctcaagtgcgctggatctataagacaaaatatacacaccgtgttgtaggtacatatgatcgggttttcggtttcaatttaaacaatatattcgattccattgggaaatcttacgctactctgaaaattgagtgatttcgcttaaatacaatagttaggttggccccttcaaatgggccacctggacaacaaacaaatcattgggtttgacccatttctttggggtcttttgcctggtatcacttacaaattattttggggatacttttagcacaattattaattataaaacaaatacaaattcattaaggtactgaagacattgcgctccagccggccttacaacaagtggacaatttgtggcgccagagttaatggaaacagattccgagaaatacaatgcaatttccactggcttgaagccaacttgcttcgttattgggtttcgttcgaggattttcctcggttcgtttgcctataaagaatataaacaatcaaatcaacaaatctagatgccatttgccgcagccaatcgcttggccacctcatccggcgttaaaatctcgccagcatccacgggagcatagtaggcggaggtctcgtcaaattcactggccgccgcaagtggcggaatactcgtgtacagggcaaagtgctcggcctcggtcagatccaaattggggtccagttggacattgaagtgaccctctatggagctgaccaaattgtgtagactttgtcgatcggcaatggcaaccagttccattccgccctcactaattggtatgtcagccagctgtagtgcagatgcagtgcgtctatccaacccagctcccaccgaaatcgtactggattgggagtagccctcggttcgctgttgctgtggcaaactattgacactgtcacctttcagcggtatatgcaccacatcagcattcaggtaggcgggtctctttccggaaacactgctcacactcctgcccacgggcttggtcagctttgatcctggtttcttggccttgacaggactggatttggcaggcgctggattcgagatgaacggggcagctgacttggaggagcgcagcgatgccctcatcgggtcttgcatgttaaagtgacctatacttggctccctgctatttgccttggaatccaatatagagctgttctcctgcccctgggccaaatctggtttgctcttgcggcgcgaaaaaagcttcgaaaagaatcccggcttcttctgcctgggcagtgtattaaagttcgggttctttggagcaggtgggagtcttttgtttagaggagactcgcctgtagatggcttggtctgaaccgtattggcctcgattgatcgattctcagcattgctgtcctgctttcgaattcttttcggtggcaatgggggcaacttatcctcttctggtggatattgaattgttagaattgccggcgggactggaggaactggtcgcatcggagtctccggcttgcgggcctgagagttcacctcgacgggatcgtaatgctgatgggcatcttcgggagcgcattgcgacatgggcggagttggaggcattatatcatccatgggtatgaggacgggattcttgaaggcaatctgtaagcttgtgtaggtggcagcgtcatcgaagctatcctccacctgcagcggcgcacgaccctgaagtcccgccaactcattttgtatggtattcttgtacgtatccctctgaactttgaagtccgtgtatatctcatccagttcggccacggtctcaaggagttcgtcaagggtcttatctgccttggatatctcaagggcggagtccaaaacatctgcctcagcagtgggactgggctcatggacttgctgttcaatctcactggacttcatccactcggtgatcttatcgttggccgtcaaaggacgtggctccaactgctgacccaaatccagttgctccagttctcgtaccttttcatcgataatggtgtcaatctctttttcctgctcggatcgcaggcgatgggcctcggcttctgcatgggcatccgccgcctccatgtcctcgggaatatgatctgaggtgtgatcgggcaagtgatctatagcctgatcgaacgattgctgcgctggtagttcctgatcctgttgcatcggttcttcgagctgaaaagattgctgctgttctagttgttgtaaatattgttcctgctgtaatgattgctcttgtgtatattgctcttgttgcaatgattgctcttgagtatattgctcctgttgcactgactgctcttgctcaagagctggctctgattgctgagattcctcatgattaaattccatttccgaaggtatctcacgttgcacatctattttcggtgtatccaaatcgataacctcaatcgttggcggctgcacttcccgtttggcgtccaacctgaggatctgctgaaagagatcttcgtccggcttccgcttgaggtgccgatgaagattccagaatgtatgtttacctgagtccattggcacgtactcgaagggcagggcctcgctggtaactccatccgagggacgtcgcagttgaataaaaacctaatggaacatagtttcttttaagagctgaggaatccttcttgataagctttaacgcaccttggcgggctctgtgatgtccagggtatgatagcgcggcgtcttaaaggtaatggcagtctgcttgtggacatccgtgtgctggaagtcaccaaaggcctcccaaacactctggccattcttctcctcaaagaatcgcacggagatgtcctccttggccaccttctcgcagagcaggatgatctgggtgttgccgaaaacggtggccgagcagctacacagccggcagatgaccaggtcggacatggccttcttatcgaagatgggctccgaaactaccggcggcagtggcgaggtgaatcgacccttctgctcgctctccatgaatacttgaaagcacaatcgcaccgaattcagatctatgctcgagggctggaaacgatgcgaaaagccagctaaagaaagcaaatgcaaagggttaaactttaaggctaacaatttttgtgttgtacaagaccacctactcttaaacggatccacacggatctcctcgcgcgccttgagcgccgcctcaatgtccttctttttgacacactggatacccaagttactgaacaccgctcgcattgtctcactgttgatctccagtgtacagacgcccttcttgcagccctccttgccaactaaattgtggggatgaggactgaaatgggaaagggaacacaattatttaattattttatacctacatatatatgtatccttaactcaccgatatggcgtatcctttgtgacgcaggagacaacaactacggcgcgtcccttgtagcccacaatttcgattgtcggataggtcttgttctccggcgtagagttcacgcccggaatggatcccgccgagcgtccctcgcactcgtagcgaaaccttagcgcctttcctgccggttgttcggtgatctttacgtagggcttctttcgcacatttttcgtggactgtgccaattgctgctgctgctgggcgggcaggccgttgtagttgaggctctgttggccatcaactgctggaccctgcccaggagcggctccattgttctggttcggaaacattacgtggccaaaatattatctaaaaattaaataagagtagcatacgttagaaatgtaatatttttataaataatagataagtattttaactagattcattgcaaagaataagaatatatattcttgataagatatagttgatctctgacaagtggccggctgtttgtctgtaaatggaatggaactcaggaactatcaatgtcgactcttgtttcgctttttaatcgttgttttgccaattcttattgatatttcaaataaatttgaaaatttctggctcgcttaggaacaagtttttaaatatatggtcttcgttaatcgtgagcatacaatatcaacatgtgtttcaagatctcacactaacttttcttatgggatcaacagaattcctcattttagaaataaaaatattaatgcaaagatttgcatttattgttgttgaaattttggtaatacttctgtgaattaatgcatatattgcttttgagttgatgtaatccactagaatagacacttttgttacaaagccagtgccgtctgatttaaagttatggccaatggcaaacgaggaacaattccttggcaagcagcaaatcgaaggcccccagacacgacaaacgatgacgacgccgatcgaaaataaagcctccaagactcgtgcagtgtgatctgctatataagtaagattctcctgaccacaggctatgacgaaccgaaccgtaaaacgtctggcagctaacggaaaaggtggaaaactctcccgcagacccgtcttttcagcgtgggtggtccgtattgccgtctgcgatagatggcattaattacaatattttaggggtcattagaaaaattgtatattttcataattctcatcggcatgtgatgcatgtgcagtgggtgcgtttttgcgatatgtttttcattttggccgggtccggccccggtctggtccggtgtagtccggctaaaggtccggacgccttgtttaaaaataacattttgcgtaacgcggccacaaagcgacaaaaactctgcctccccatatatatcaggtggtatatataggtgtatatatatcgatacatatacatagatcgcctcgcagactggcctccccggagctgggatggcattatattttgttttatttttcgcaagattggagcaattcaaacaaaacattttatcaatgatgccgcggcgaattgtcaacgaaacgagtcgtcgttcagtcgggtcgatcatttcaatacgcactaagttctactagatatatatatgaagactaagttgctgtgtgacctcagagtttgttctctgatcatgtctagacattggtctgccgttgacaaaagacgtcaatggctaaaaaaaaaaaaaaaaaagaactaatgcccgtgcattggtcccaaccaaacttggctgatttgtcgggggaaaaaggagaggaagccaggaaacgtgtgccaattctgttgatacatacaagtatatggaaatttaggaaacttatatgccttacacgaaaaaatatgaccgaagattgataccataaaaaaagatttcgttttcgtgccataaacatcattgtcatcaagattaaaataatattatcattagcagtttaatctttaaaatgaacacaaacttaaattcaaacaaatgataaacatagtcgatagcagtgattcattcctagtgcgattaataatatatctataatatataatatatttaaaagatcgtagtttttcttaagacttcgtcttactttcctttgcatttgttttagcttatcaaaatatatacgtattccattcacatctgttttatttctagaggaatttggtctaccaatcgaagtttcgcagctgccaaaggctttttgtgcgtcaactagaaatacatattttccttataaatcatgtccaatggagggacagtggtcaaaattacatattcaatggacacagcagcaaaccgataaactttatacaagatatagtataagaaatgaggacattttccacgcgccgttatttcacaaattagctttgccttgaaaatcaattgttgaggacaaaaaccaatcagcgtgcacaaaaatattggggtagtattacgtcatgaaataatttcagttttggcgaatatgaaaagctagttggacagaagccagcaaatgtaatacaaatgcaatccagttcatataaatattacacatgcgtatttatctttgtttcatttatgagaattgatcacctttcagttatcacggccaaactttgatggtaaaaacttcaccacacagataagatcgcaaattttcggatattaactaagttttattatttattaattctaatgttgacaacacaagttgattaatttacgagttgtttataatttatagtttataactatatgatccgttttttattgtagatggtagctttggtttttaaactgagcacctatgtatatattcgtatctataggtgctaccgagagaaatgttcttgtagaaccgatcaaacacacgcggaaaacgtcttgagtactcgccaaatgtctgaacactgaactgagaaaatgtttttgagaagaaacacagaattctttatgcacgcctgcctggcaaaagttttctcgtcgagctttctgctatttttattttcactaatattttaaaaatgtattttcttaacattttttttgcttgtgtatggatgtgtatttgtatcttgtcatgaatttatggcttttgcttgcaaggaattttctctttcgacgagcaagttgtccccatttttgagcaaaaaaatactcagacttcctttactacgtagcacgtcgcaagaaaatggaaattcaaacttaatttccgatgtcaataaactttagctggcaattgtgtaaacaaattgaaattattgagattggactcgagttttattgactcgtaggcaattgaatctaatgttaataaaaggttgctactttgtactacaatacaatgtaaaatatgtacaataatgaatttgttaactttgtgcttatatttgccgggtgataaattcgagcaattaaaatttaaaacaaaaaactaatcaaaatcggcaatttcctagaacataacattgtcactttttccaattgactatgtgttggccccaacaaaatgagtcacctttcattaagtggaaataaccgaatcgcacaaaatgcgcccaatctaatcaaaagatgcaaaggtagctaaaaattaacataaaatgcattagcagaggattgtttgtttttgcagtgaatataaacacacattatacaagtacatttgtttgtgtatctatagtaggcatttggttttaggctttggcatttccgtttcaatatccacggcaaaaacgaaaggaaaattcgccacttgtcaccgttcaatctgccttgagcacttggcgccagttgagaaagctctctaatgagtttgcaaaacccaattatacgatctatgctgggcagaggatatataggatatatgttaatatgaagatatgcctctgccagaatgaatggattgcattatattcgtacccagagatttttgaaaacaaaatatctcgattttgactgggacacgaatttccacgaaacacaatgagtcacaaaacaaatttcttgctatgtatgtatattgaaatatattgaaatatgcaaggaattcgctcgtgtgccacccactgtttggcaagaatcattcactaactacgtgactttctcattgagaacaaggtatggaactgaacgagaataggtcagttaccctgaaaattaaatctaatattttgaggatatcaaaatactggaaattcccatagtttcaatcgattaaccaatttaatatgtcattcaaaggctaacaagaattatactgccaccgaatttaattgcaatacactatttacgatggtttcatccgcagctatattgagattagaaccatttgcaaccacacaaatttgccaccgtttattcccgtcagatagaacctgcggcattcagactgataacgctcaggtgttgagcgtagaaaatccgaaaaaaaaactcaaagataaccaaaagtaagataagaatataaaaataaatctaaatgacgatggcctgagaatgtatcgatagatggtttttggtttaagtgttttgcaggggagttatattggaatttcctatggttttgcccttcgtttgctcaaaacaataaataatttatttgattagctattaattttcaccatgtcttgcaaaaatccacacgataaattcaaaagaaaaaagtctatgctgttaagccataaaatgaattaataaaataacgttctactcgttcaacgataactacttttggcgaaaaataaaaaaaaaaggtaagtaaacaaaataaaatgaacatttcgtttcgatcatttaacatgctaattttatgcaatttccaatagcaaagacacacagaaaaaagttcttttggcgccagcaccacaaattaagattaagatcaacatcaaagcatcagaagcagccaaaaattcctcagtgaaacgggttccgcaaaaaaaaaaaaaacaagaactccagacagacaaatgttttttaacgatcgttggcgtcaagcaatttacagctcaaataaaaataaataaccgatatgctgacaaatcgatggaactagttgccaaaagctatgttttgtatcgtatgaatacaagtccattatccttattttccacaccaaacaatgtttgttaaattagccgatcagggattattgtgcacatgtgacttccggcaaaaatgcagatacatatcttatccgtatctccaattataacggccacgatctttcttatcgagtggtttaaatgatattcgcctaaaatagaatccctattgattgatgatttgcatagcggagggccttacccacagccagatcgtgtatcaatcatgactcggatttagcatacggggaaactaccagtagatataaccaatattatctattgacttggccttagatctctgttagcacacaaatctctactcgagctttgtaaatcgccgatgacttgctggaaacgagttgagcgattttagcgctttgattttctttggtcccggagacgagagtctgatgttatgagtcagcacacggtttgcatttaacttggttgcacttttcgagtttacaccgtattagcagctaaaagcatttcttcattcttcataattacctgcgaatcaaaccaagaaccagtgaacactcatgacgaattcggtttcactttttgcttttatttgggccacaaaacgcacactaaccgcagtttgttctttcaaaatggtacttttcaaattattacttaaaaataatatcgaaccgttagggaattttaaaaatatttaataaaaataaaagaatgttagcgcaaacacgaccgcaggcgcatcgagtcgatcttagaatgaaacaattgaaaacctctccggcgtatttgagtggcagcaaaaaataaataaatacaaggggcaaaagcttttccacgagccccaccccctctgggccccacggcccccctcgcccacccacgtgcccgtaagaaactttcatttatggcgacgtcgaaaagccactgcgactgcgctgccatgtacacaggtgtttcggttgtattatttaagtttatcgtttgcattcaccgtagattatttaatacgcaggtggataattgccacccaaaaaacacaacaacaacaactgcggttacactacaaaggattgaatacgttctaatagtttttttttaacatcttaactattatttgtcatgcagaaattgtgagctattacaaatcttagcatccaggaattttaaacattgtcaaaatgttaaaactatttaggatgaaaaatattaatatgcgagaaaagtgaccagtcttggtttatcaaaccttaaaagtgtgaataatggttgataaatcacgatgttgttgctgtaaacattgttccgaaacgataaggcgtccaatgactcaataaggttatatttttaatatgtttaatgcaagatgcgtttctttgtaatgacattttgcgtctttggaagcaatagttgtgtacatatttattaaaatatcaagacccttctcgcaaaacgcagccattaggattttccaccgcactttattaatccgtgcaatcaatgttcagaatcaataaattaagctaggctctatagggggactcacctaagtcaaggagtgatctgaaatctcgcttatatgcattgatatcactgggtttgctaagtaaatcggacacctgaaattcaacgcgaaccaattagtacacttttatgtacattatttgttaagtttcttattgtgttaattggaaaattagtccgttgcacagcgagctaaataagccatttatttatagttgagaaatatggcgcttttttcatgttaatgttaacacatacacaagcacgcacggcaggaaccggtttatttattattttttatatataaataatttattcttccctccctttctcactcactctctctctctctctctttctgattcttcttattttattcttttttaacttttgcgcgcgcacaaagcgggtgcgataatatcgataataacgacaaaaacaacggatgggggagaacagttcgaacagaaactaatgaaaagttaagaaatcgaagtccgaagaaagagagagtgggcaaagagcgcgagagagcgcgtgacgtcgattttttctagggaattccgggctttatgcttatgcgatcatcgacgtacgactaccttttgtttttgtttttcgatttattcgatttataatttagggtaatttgttatcgcgctctgccctccattttctttggttattcttgcgatgtttgtggttaaagtgtcgatgtgccgtgtaatctaatcggtaaacgttcagttttaatagaaattatcaatacgtgcgccgagttttttatttttgttttttcctccgttatattggtgggtctcttttttttgtcactcgtaatacgaaaaagcaagtgaaacttgcttagagctcaattgaatttatgcgtttttatgcagctcttttacttttcgttttatttttatctactggtatttcaacctgccttcgagctccagaagagcgaaagagagcggaagcttaaagcacagcgaaaaaggtaaataaggcacaatttggaggtggagataaaatacccgtaacacacgcactaccaaccgatctcgacgcccgcgatttgaacactaactgcccaccaagaagaaacaggcgagccaaactttcaataccgtatgcgccactgaaaaataccgcaaaacttgcagatcgcgaagctttcaacggagttaagtagtcggccccaagctctgctctttgcagtctcgacttaagctcagaagagagacaatccgaagagcctagcttggcgaagagtgcgagatcagcatgtgctgagtcacgtacgattgaagttttccacttgcgacttatagcttacagatgtccacatcttccacaaatccgagtttcgaggaatacgcgatgattgcataaaggcgaaacaatatatacatacatataatataaatgtttttatctgactgataccgattagtaggaatgcaggccagttgtttctttcaaaagcttttaaaatgtgtcaccttttaaatctataacacgtattatattgaaggaatacctaattaattgaaaatgcatatctttttattaggagcatcccaaaggaatcggaaaatataaatattttgtttttcttaaatattgagaattcaactgtatggtaaccaatcatcaagaattcgattttcaatgtgagattcgtttaaatagccgaatattccaactatatatgcatatttacgaaaagtaaaatataaatggaaaaaataacttccgtcatttatctcagtgtctttcacatgtgactcatctccacgagcgactgcctccgaaaagctttttcagcttttatgaatgaaacagcacggtgagcactaactatctgtgtgtgtggctgcgagctatccatttaagaccccactcccacccatgcggttgg

SEQ ID NO: 28082 - DNA, 4560 bp, DROSOPHILA
aaaaataaaacgaaaagtaaaagagctgcataaaaacgcataaattcaattgagctctaagcaagtttcacttgctttttcgtattacgagtgacaaaaaaaagagacccaccaatataacggaggaaaaaacaaaaataaaaaactcggcgcacgtattgataatttctattaaaactgaacgtttaccgattagattacacggcacatcgacactttaaccacaaacatcgcaagaataaccaaagaaaatggagggcagagcgcgataacaaattaccctaaattataaatcgaataaatcgaaaaacaaaaacaaaaggtgtccgatttacttagcaaacccagtgatatcaatgcatataagcgagatttcagatcactccttgacttagataatattttggccacgtaatgtttccgaaccagaacaatggagccgctcctgggcagggtccagcagttgatggccaacagagcctcaactacaacggcctgcccgcccagcagcagcagcaattggcacagtccacgaaaaatgtgcgaaagaagccctacgtaaagatcaccgaacaaccggcaggaaaggcgctaaggtttcgctacgagtgcgagggacgctcggcgggatccattccgggcgtgaactctacgccggagaacaagacctatccgacaatcgaaattgtgggctacaagggacgcgccgtagttgttgtctcctgcgtcacaaaggatacgccatatcgtcctcatccccacaatttagttggcaaggagggctgcaagaagggcgtctgtacactggagatcaacagtgagacaatgcgagcggtgttcagtaacttgggtatccagtgtgtcaaaaagaaggacattgaggcggcgctcaaggcgcgcgaggagatccgtgtggatccgtttaagactggcttttcgcatcgtttccagccctcgagcatagatctgaattcggtgcgattgtgctttcaagtattcatggagagcgagcagaagggtcgattcacctcgccactgccgccggtagtttcggagcccatcttcgataagaaggccatgtccgacctggtcatctgccggctgtgtagctgctcggccaccgttttcggcaacacccagatcatcctgctctgcgagaaggtggccaaggaggacatctccgtgcgattctttgaggagaagaatggccagagtgtttgggaggcctttggtgacttccagcacacggatgtccacaagcagactgccattacctttaagacgccgcgctatcataccctggacatcacagagcccgccaaggtttttattcaactgcgacgtccctcggatggagttaccagcgaggccctgcccttcgagtacgtgccaatggactcaggtaaacatacattctggaatcttcatcggcacctcaagcggaagccggacgaagatctctttcagcagatcctcaggttggacgccaaacgggaagtgcagccgccaacgattgaggttatcgatttggatacaccgaaaatagatgtgcaacgtgagataccttcggaaatggaatttaatcatgaggaatctcagcaatcagagccagctcttgagcaagagcagtcagtgcaacaggagcaatatactcaagagcaatcattgcaacaagagcaatatacacaagagcaatcattacagcaggaacaatatttacaacaactagaacagcagcaatcttttcagctcgaagaaccgatgcaacaggatcaggaactaccagcgcagcaatcgttcgatcaggctatagatcacttgcccgatcacacctcagatcatattcccgaggacatggaggcggcggatgcccatgcagaagccgaggcccatcgcctgcgatccgagcaggaaaaagagattgacaccattatcgatgaaaaggtacgagaactggagcaactggatttgggtcagcagttggagccacgtcctttgacggccaacgataagatcaccgagtggatgaagtccagtgagattgaacagcaagtccatgagcccagtcccactgctgaggcagatgttttggactccgcccttgagatatccaaggcagataagacccttgacgaactccttgagaccgtggccgaactggatgagatatacacggacttcaaagttcagagggatacgtacaagaataccatacaaaatgagttggcgggacttcagggtcgtgcgccgctgcaggtggaggatagcttcgatgacgctgccacctacacaagcttacagattgccttcaagaatcccgtcctcatacccatggatgatataatgcctccaactccgcccatgtcgcaatgcgctcccgaagatgcccatcagcattacgatcccgtcgaggtgaactctcaggcccgcaagccggagactccgatgcgaccagttcctccagtcccgccggcaattctaacaattcaatatccaccagaagaggataagttgcccccattgccaccgaaaagaattcgaaagcaggacagcaatgctgagaatcgatcaatcgaggccaatacggttcagaccaagccatctacaggcgagtctcctctaaacaaaagactcccacctgctccaaagaacccgaactttaatacactgcccaggcagaagaagccgggattcttttcgaagcttttttcgcgccgcaagagcaaaccagatttggcccaggggcaggagaacagctctatattggattccaaggcaaatagcagggagccaagtataggtcactttaacatgcaagacccgatgagggcatcgctgcgctcctccaagtcagctgccccgttcatctcgaatccagcgcctgccaaatccagtcctgtcaaggccaagaaaccaggatcaaagctgaccaagcccgtgggcaggagtgtgagcagtgtttccggaaagagacccgcctacctgaatgctgatgtggtgcatataccgctgaaaggtgacagtgtcaatagtttgccacagcaacagcgaaccgagggctactcccaatccagtacgatttcggtgggagctgggttggatagacgcactgcatctgcactacagctggctgacataccaattagtgagggcggaatggaactggttgccattgccgatcgacaaagtctacacaatttggtcagctccatagagggtcacttcaatgtccaactggaccccaatttggatctgaccgaggccgagcactttgccctgtacacgagtattccgccacttgcggcggccagtgaatttgacgagacctccgcctactatgctcccgtggatgctggcgagattttaacgccggatgaggtggccaagcgattggctgcggcaaatggcatctagatttgttgatttgattgtttatattctttataggcaaacgaaccgaggaaaatcctcgaacgaaacccaataacgaagcaagttggcttcaagccagtggaaattgcattgtatttctcggaatctgtttccattaactctggcgccacaaattgtccacttgttgtaaggccggctggagcgcaatgtcttcagtaccttaatgaatttgtatttgttttataattaataattgtgctaaaagtatccccaaaataatttgtaagtgataccaggcaaaagaccccaaagaaatgggtcaaacccaatgatttgtttgttgtccaggtggcccatttgaaggggccaacctaactattgtatttaagcgaaatcactcaattttcagagtagcgtaagatttcccaatggaatcgaatatattgtttaaattgaaaccgaaaacccgatcatatgtacctacaacacggtgtgtatattttgtcttatagatccagcgcacttgaggcggaaacgtcagaagactggcggtgatcccatgcacctgctgctccagcagcagcagaaacagcaattgcagaatgaccaccaggatggcagacaaactaacatgaattgctggaatacacaaaacataccgcccattaaaacggaaccaagagatacctcgccacaaccctttgggctttcttatcgggcgcctcctgagctcacaccctcgccgcagccgctgtcgccatcgagcaactacaaccacaacagcacgccctcgccctacaacatggcctccgcggtcacgcccaccaatggccagcagcaactgatgtcgcccaaccatccacagcagcaacagcaacagcagcaatatggagcaactgatctggggagcaactacaatccgtttgcccagcaggtccttgcccagcagcagcagcatcagcagcagcagcaacagcaccagcatcagcaccagcagcaacaccaacagcagcagcagcagcagcagcagcaacagcaacagtccttgcaatttcatgccaatccctttggcaatcctggcggcaatagctgggaaagtaaattctcggcggcagctgttgcagcagcggcagcaactgcgacaggagcagcacctgccaacggcaa

SEQ ID NO: 28083 - protein, 999 aa, DROSOPHILA
MFPNQNNGAAPGQGPAVDGQQSLNYNGLPAQQQQQLAQSTKNVRKKPYVKITEQPAGKALRFRYECEGRSAGSIPGVNSTPENKTYPTIEIVGYKGRAVVVVSCVTKDTPYRPHPHNLVGKEGCKKGVCTLEINSETMRAVFSNLGIQCVKKKDIEAALKAREEIRVDPFKTGFSHRFQPSSIDLNSVRLCFQVFMESEQKGRFTSPLPPVVSEPIFDKKAMSDLVICRLCSCSATVFGNTQIILLCEKVAKEDISVRFFEEKNGQSVWEAFGDFQHTDVHKQTAITFKTPRYHTLDITEPAKVFIQLRRPSDGVTSEALPFEYVPMDSGKHTFWNLHRHLKRKPDEDLFQQILRLDAKREVQPPTIEVIDLDTPKIDVQREIPSEMEFNHEESQQSEPALEQEQSVQQEQYTQEQSLQQEQYTQEQSLQQEQYLQQLEQQQSFQLEEPMQQDQELPAQQSFDQAIDHLPDHTSDHIPEDMEAADAHAEAEAHRLRSEQEKEIDTIIDEKVRELEQLDLGQQLEPRPLTANDKITEWMKSSEIEQQVHEPSPTAEADVLDSALEISKADKTLDELLETVAELDEIYTDFKVQRDTYKNTIQNELAGLQGRAPLQVEDSFDDAATYTSLQIAFKNPVLIPMDDIMPPTPPMSQCAPEDAHQHYDPVEVNSQARKPETPMRPVPPVPPAILTIQYPPEEDKLPPLPPKRIRKQDSNAENRSIEANTVQTKPSTGESPLNKRLPPAPKNPNFNTLPRQKKPGFFSKLFSRRKSKPDLAQGQENSSILDSKANSREPSIGHFNMQDPMRASLRSSKSAAPFISNPAPAKSSPVKAKKPGSKLTKPVGRSVSSVSGKRPAYLNADVVHIPLKGDSVNSLPQQQRTEGYSQSSTISVGAGLDRRTASALQLADIPISEGGMELVAIADRQSLHNLVSSIEGHFNVQLDPNLDLTEAEHFALYTSIPPLAAASEFDETSAYYAPVDAGEILTPDEVAKRLAAANGI

SEQ ID NO: 28084 - DNA, 3027 bp, DROSOPHILA
tattgccgcaattactggagcggtaatcaaatgttggttcctcatacaaacaaaaattccgggtaacgcaagtatgtcgacaggcattgcccataaggacacttgctaagagtagagttccgattgcccaacaatgcttcatgtttgcttcagaaaactgagtgaacgaacggctggcagtgggtatcattatatttctttgctgagcagcttaaaagcttatcagccgacaaagatgtattcgaagtacatatgtacatgtacatatgtacatgcatatgcacataaattgtgttattcccaaagattgcacagaaaacgcttaagttaagagattgcgaaagagatatttccgaattctttggaaatatccattaaagttttcaaaaaaaatgttcagattaattaaactggtaacgatcattcccaggactatacatatatatctcacaggatttgatacgcttaattctagctgttacataccttttaactaatcgagttatgtatctaccctttaccttttcgagtaacgtgacctgtataacacgtaataaagtttcaatataaaaaaaattttttttttatgtacgcatatataaaaaaaaaacataaagaggaaagaactacaaatatgcgtacaaaagaattatcatctgaaatatgtacacatttatatacataacactgaccttaggatgcatggattatcgccgagtgaaatgcctattttttttccaatttgggattttcctagccactgtcgatttgtactatttttcctatttttttgtaaatatttaaagctatataaatgcaacgctatatattcagctgaatattatggacatcgatttaaaaatctttgctaatatcgtctcaaaaaccttttttaatgaaaaaatttttaaatttgattttgattaaaaattcatttattttgtatatttatacaataatgcataatcacaatcttaatgaagaattgatgtaataatctttaagcgttagccaaagtatgctatcctattataaatccaacttctgaacattgccacattggtgtagattcccgggaggtccaatccacaccccatgccccaggcgacgatcccagcctgctcgaagacgtgtggattctcatctccgagggagcagaacaatgcataacctccaccgccaaagcagaaatcccggtttatttcacttcgggcgcaaatcagactcggatgaagatcaaaattcctgcccaaagttgtatttctaaactgagccacgcatgtcgttctgtccaacacggttaactctaatttctttataattctcatacggctttgatcatgggaactcaccaagtcccaaccggcaaccgtacagcgacgtccctcgaacgacgcttgtcggcttggcaacgtcaatactccaatgcgatcgtttagcacgaacggtgtttttacgaaaataagagccacattattaatacccgactgaaaaatgaatccttcatgtctcacaatcctttcaacaacgcgctcctcatactgaatgggttcatttgttgtgttcatgacaaactcgccggccctaaccacaattctatcttcattcattttgttcattgtgttgtgggctgccgttaggatcacttttggactaattagtgagccgccggtcaagtaaacttcttcgtaaaatagggctaccacccaggaatatagaccagtcgtattgcacctgcctcctggctgtgtccgttcagttggctttggttgctcagcttgcgcaccatcatttgttggggcgcccgatcctttaagtggccaataagtaatgggtacatcaggttccgtagaaacattgttttggggctcacttgagactgttggtctcgttggaaaatagataaaggttggtatgttttcctcttctgtagaagatgactgaaaagttgaaaatttaatattaaacagattcaattgcaatttaaaataataagcatactgcagactcagaatcggattcctcattcggtccgctagggatataaggactctgcaaattatgaaatattaattccaaatctgcgtacagggattctaatcaaaatatatacacctttatgataatgtcacaacagacgtgattaaatgggcaactatttagttttcgacttagtattaagcacttctccatagggacacaatacctacaggcttcgcccgaaaggacgcagaataaaagaatagctgctgtggccacgatcgatcccatgtttgctcgggatgattaaattgactgagagatagagcaagctttccgatgctttagtacactttatattatattaagtcttatcagttacaaaaaaaaaaaaaaacaatatgtgaaaaggaatttctgtaaacatttttcgaaattttttcataattttataagtcttgtaaatttttatcgatttgcaaaaaaaaagctttttgccacgcccaatctaacgagatttcgccgccgaaatctaaattttttctcattttattcccagaataatgatgaactttcgcattcgcattcacattagctgagtaacgggtatctgatactcggggaactcgactgtagcattctctcttgttatatttttatcgttttgtttaaattatatgctataattatatgcttatatgctataggctaatctaattcttattcactttcctacttaaggcacactggagaattggaacaattgcgtgagagtgctcaacaaatgtcgaacgaaatcacagagttgcgccaggagatcaaccgaaatcgcaacggtgtcttcggtgattcctgctgtcgcctcggactcggacgcctccacgaccatgtgattgcgccctttcaaggcaaccatatctggataaaacttcgacgctattcctttaacgtgatatatttgtttgctttgtatctgctgcctggaatgtctctcaaatatcgtcaaaactaaacctaattaaataaactttctataaaaatattttc

SEQ ID NO: 28085 - DNA, 1027 bp, DROSOPHILA
atgaggaatccgattctgagtctgcagtatgcttattattttaaattgcaattgaatctgtttaatattaaattttcaacttttcagtcatcttctacagaagaggaaaacataccaacctttatctattttccaacgagaccaacagtctcaagtgagccccaaaacaatgtttctacggaacctgatgtacccattacttattggccacttaaaggatcgggcgccccaacaaatgatggtgcgcaagctgagcaaccaaagccaactgaacggacacagccaggaggcaggtgcaatacgactggtctatattcctgggtggtagccctattttacgaagaagtttacttgaccggcggctcactaattagtccaaaagtgatcctaacggcagcccacaacacaatgaacaaaatgaatgaagatagaattgtggttagggccggcgagtttgtcatgaacacaacaaatgaacccattcagtatgaggagcgcgttgttgaaaggattgtgagacatgaaggattcatttttcagtcgggtattaataatgtggctcttattttcgtaaaaacaccgttcgtgctaaacgatcgcattggagtattgacgttgccaagccgacaagcgtcgttcgagggacgtcgctgtacggttgccggttgggacttggtgagttcccatgatcaaagccgtatgagaattataaagaaattagagttaaccgtgttggacagaacgacatgcgtggctcagtttagaaatacaactttgggcaggaattttgatcttcatccgagtctgatttgcgcccgaagtgaaataaaccgggatttctgctttggcggtggaggttatgcattgttctgctccctcggagatgagaatccacacgtcttcgagcaggctgggatcgtcgcctggggcatggggtgtggattggacctcccgggaatctacaccaatgtggcaatgttcagaagttggatttataataggatagcatactttggctaacgcttaa

SEQ ID NO: 28086 - protein, 339 aa, DROSOPHILA
MRNPILSLQYAYYFKLQLNLFNIKFSTFQSSSTEEENIPTFIYFPTRPTVSSEPQNNVSTEPDVPITYWPLKGSGAPTNDGAQAEQPKPTERTQPGGRCNTTGLYSWVVALFYEEVYLTGGSLISPKVILTAAHNTMNKMNEDRIVVRAGEFVMNTTNEPIQYEERVVERIVRHEGFIFQSGINNVALIFVKTPFVLNDRIGVLTLPSRQASFEGRRCTVAGWDLVSSHDQSRMRIIKKLELTVLDRTTCVAQFRNTTLGRNFDLHPSLICARSEINRDFCFGGGGYALFCSLGDENPHVFEQAGIVAWGMGCGLDLPGIYTNVAMFRSWIYNRIAYFG

SEQ ID NO: 28087 - DNA, 4099 bp, DROSOPHILA
tagcttcaggtgctgtgactgtggatgccagcaacatgcccaattggtttaacgagcagacgagcgacagtaaagtggacgtgaatgccaattggcgaaaggatattgtgaacaagttgcagcgacgtcaggagaaactggccaagcttcagactgtggccaagttcgagaaggcagtggagctttcttcgtgggtcaaatcggcggatgcgcgctatcagcgacctggaggcgagtttgaggattgtatcatcgaacttgagtgggtaagcagtggcagtggcactgacacaaatagtagtgaaaactcgcgatccggggactctggaacttttacggtacttagtccggatggagccgccacgaagattcagttcccgttgtcagacatcacctgtgttcagtgctgcagtgaagccggagcaccgcggatcgctattcatgctcctcatcttcccgtaaactgttcgcccgttaagctacagttctccagtgactcggaaatggaggactggttgtcccacctgtcgtcagtctgtagccagatcaacactatggtgggaaaaccggctggcaatgcgatctggataaccagcgagttgggcgatgtctttgtgtttgatcccgccaacatgaaggcacatcagacaagtgaacccagcgagggatacgtggagaagatggatgtttccacttgcgaaactccatactacaatactctttacaatgggtaagtgggcttaaaaacttacctgtcggtcgaagattctattaaaatttatgtggtaggattgttttgtgaagtatgtaggtattatattgtttaaactgctatgatagaaaaatatttttgagtgatggataaatctagcgctggagttttgttgaattcaaattgttcaatttatccaagcaggcaatttaccagaagcttcgtattccatttaattctaaaagcttaattttttaataattacctcctgtatatgttaatttcagaatgccatgtggtactgagctagagatatctggctgtgtgtacgatgacgctgatcagattcgtttcgacttgcagtcgcattctgcagtaaaagttcagcctcatcgcgtggagaagcatcgggtcattgctctgcacctgaatccccgtttcaacgaacgcaccacggtgctcaactcgatgaaggagtccgaatggctggacgagattcgcaatgacaaaatggcctttgctcccggagcaactttttcgttgaaaataaggtaggaatagaatcctgggaatgaaatcgaatgcctaatacatacttgaatatccttacagggctctgcaagatcactacttgatcatcgtgaacaatgccgtatataccgactacaagtaccgcatcgatccggaaagcgtgacgcggctttatgtgagtggccgtattaagcttttcaatgtactctaccgctgcccctccctaattgtctcaatggagcgcatgcactggcgccaaatgggcggtcacattaagaggattttcaacagcggcgtggatgtggtgtggggcatatcctgtgacaacactggctgggtttacaacggaggctggggaggaatgttcctaaagggcttggaggggtccggcaaaattaacccaatgattgacacacacacctactatgtgtacgaaaatcaacgttggaatccaatcagtggtttcacggcgaagagcctgccgacggatcggcacatgtggagcgatgctactgggcggcagaagcggagcaaggagcacaccaagctgctgtctacgcactgcgaatggatctccgattgggccattgactacaacattcctgggggcgcggacaaggagggctggcaatacgccatcgacttccccgccaactaccatgctcacaaaaaactcacagattgcgtgcgtcgacgaagatggatgaagcgatgtcgtcttagcagcagcggaccatggcaggagcttagtcagtccaaaatccttgatgctgccctgcaggtatggttctacttaaaaaattctcaacatggttgttttttaaacattttcctactaggtattggatgaagatgtggatcacagctgttcgggtgagagaaacacagcagtggctgcctgggcgattgcctccaatggtgatgtcctcatccggcatggtgtatgcagcttaaaccctcgtggcgatgcctgggagcacataaccagcgaccagccgttagttgggatcagcgtggggcccacaggtcaggtgtggactgtggcgcgcaacggcatggtgttcttccggtatggcatcagcaggcagaatccgtgcggcgatgcctggcaacaagtggaggcacccgcgggtgtgacctttaaagcgataagcgtgggtcgggctgggatttgggcgctggacaaccagcaacgtttggctgtgcgtaaggagatttcgaggactttccctgagggctcccactggcagtttctgcccaatgccgccaatgtgccaccgcacacggatcagcattgtggcttccgctcggtgtccgtgggctccgaggtgtgggccatctccctcaatggtatcatttgcaggcgctgcggaattacagaggaaaatcctgcaggcgtaggatggaaccttggcattgcggtatgcaatctaaacattgggttggttgaatttataattaaaaaaaaataccctctccatttcagggccaatggcaaaatgtctctgtcgaaggatatatgtgatggagttgaatactttatttgtgcattcctatttacttacggacgatcctgtttgttgtatttattcatatttacaagcttatatgtgaccatgccaacgctttttccaaagtatatgaaaataagatgtttcctatttaagctatttgaaacgtattatttacacatatttatttataatttataataataatttataaaagtatgtatctaagtcaaatgtttagtttaagtcttttgtttagtttaacaaatccagcagccgtgattgtatttcctttttgtaagcaaatatataatgaattacgagaataaatatatgtatgtgatgaaagatgaaatatgtcttatctctcacagatcaaaaatcatttgattttaatttttttaccaagttaatgaatggtttgagtccgtactttttaaaatgtacgcttacagtattttattggtaagatatcgatagccgatagaccagctcatctgcgatgttgtatcgcatgtttgtttattgtgttgtaaaccaaaactatatcaacaatttacctattttgtgacgatgtcagactacgatcatgcacgcattaagaaattggttctaaaaggcgagaaactcaagtatgtaactacaaatctgccaatagcatcaattgaaattctcgatttgtagaaagagcaaaaaacgcaagaaggaaaaggatgaggctggatcttccaaaaaggccaaggtagtagtggatgaggatgccgtgaagcacggcggttggtgggcagcaaagacagcggccgacatcaccggtacagtgtccatagagtttggcgataggagttacctaaaggccatggacaatgggtaatagtgaaaaagatctgcccattggtactttaattataccgggtgtccattaacattttagtctcttcacattgggagcaccacacaacgctggcgatggcccagatcccgaggagattttcacggcttttcccatcaacgaccgaaaggtagcgtttaagtctggctatggcaagtacttgaaaattgagaaggatggaatggtcacggggcgctccgaagcagtgggcggcatggagcagtgggagccggtttttgaggtaagtcttacctatatacaaatgttttgaaacgataaaactaatcaacgtaattaaaggaacaacgaatggctcttctatccgaaaccggacactttatgtcgatcgatccccaagacgacgcctgcgtggcattgcgaaagaaggtgggtcagcatgagatctgtaaagtgcggagtaatgcgagcagggatgtggtcatcgatacggagccc

SEQ ID NO: 28088 - DNA, 1915 bp, DROSOPHILA
atgccatgtggtactgagctagagatatctggctgtgtgtacgatgacgctgatcagattcgtttcgacttgcagtcgcattctgcagtaaaagttcagcctcatcgcgtggagaagcatcgggtcattgctctgcacctgaatccccgtttcaacgaacgcaccacggtgctcaactcgatgaaggagtccgaatggctggacgagattcgcaatgacaaaatggcctttgctcccggagcaactttttcgttgaaaataagggctctgcaagatcactacttgatcatcgtgaacaatgccgtatataccgactacaagtaccgcatcgatccggaaagcgtgacgcggctttatgtgagtggccgtattaagcttttcaatgtactctaccgctgcccctccctaattgtctcaatggagcgcatgcactggcgccaaatgggcggtcacattaagaggattttcaacagcggcgtggatgtggtgtggggcatatcctgtgacaacactggctgggtttacaacggaggctggggaggaatgttcctaaagggcttggaggggtccggcaaaattaacccaatgattgacacacacacctactatgtgtacgaaaatcaacgttggaatccaatcagtggtttcacggcgaagagcctgccgacggatcggcacatgtggagcgatgctactgggcggcagaagcggagcaaggagcacaccaagctgctgtctacgcactgcgaatggatctccgattgggccattgactacaacattcctgggggcgcggacaaggagggctggcaatacgccatcgacttccccgccaactaccatgctcacaaaaaactcacagattgcgtgcgtcgacgaagatggatgaagcgatgtcgtcttagcagcagcggaccatggcaggagcttagtcagtccaaaatccttgatgctgccctgcaggtattggatgaagatgtggatcacagctgttcgggtgagagaaacacagcagtggctgcctgggcgattgcctccaatggtgatgtcctcatccggcatggtgtatgcagcttaaaccctcgtggcgatgcctgggagcacataaccagcgaccagccgttagttgggatcagcgtggggcccacaggtcaggtgtggactgtggcgcgcaacggcatggtgttcttccggtatggcatcagcaggcagaatccgtgcggcgatgcctggcaacaagtggaggcacccgcgggtgtgacctttaaagcgataagcgtgggtcgggctgggatttgggcgctggacaaccagcaacgtttggctgtgcgtaaggagatttcgaggactttccctgagggctcccactggcagtttctgcccaatgccgccaatgtgccaccgcacacggatcagcattgtggcttccgctcggtgtccgtgggctccgaggtgtgggccatctccctcaatggtatcatttgcaggcgctgcggaattacagaggaaaatcctgcaggcgtaggatggaaccttggcattgcgggccaatggcaaaatgtctctgtcgaaggatatatgtgatggagttgaatactttatttgtgcattcctatttacttacggacgatcctgtttgttgtatttattcatatttacaagcttatatgtgaccatgccaacgctttttccaaagtatatgaaaataagatgtttcctatttaagctatttgaaacgtattatttacacatatttatttataatttataataataatttataaaagtatgtatctaagtcaaatgtttagtttaagtcttttgtttagtttaacaaatccagcagccgtgattgtatttcctttttgtaagcaaatatataatgaattacgagaataaatatatgtatgtgatg

SEQ ID NO: 28089 - protein, 527 aa, DROSOPHILA
MPCGTELEISGCVYDDADQIRFDLQSHSAVKVQPHRVEKHRVIALHLNPRFNERTTVLNSMKESEWLDEIRNDKMAFAPGATFSLKIRALQDHYLIIVNNAVYTDYKYRIDPESVTRLYVSGRIKLFNVLYRCPSLIVSMERMHWRQMGGHIKRIFNSGVDVVWGISCDNTGWVYNGGWGGMFLKGLEGSGKINPMIDTHTYYVYENQRWNPISGFTAKSLPTDRHMWSDATGRQKRSKEHTKLLSTHCEWISDWAIDYNIPGGADKEGWQYAIDFPANYHAHKKLTDCVRRRRWMKRCRLSSSGPWQELSQSKILDAALQVLDEDVDHSCSGERNTAVAAWAIASNGDVLIRHGVCSLNPRGDAWEHITSDQPLVGISVGPTGQVWTVARNGMVFFRYGISRQNPCGDAWQQVEAPAGVTFKAISVGRAGIWALDNQQRLAVRKEISRTFPEGSHWQFLPNAANVPPHTDQHCGFRSVSVGSEVWAISLNGIICRRCGITEENPAGVGWNLGIAGQWQNVSVEGYM

SEQ ID NO: 28090 - DNA, 4482 bp, DROSOPHILA
ttcgggtatttgccagatttcggcagaaattgtttctgctactttgtagagctagctacccaattcagtcagtctctcttcatctcaattataattcgattttggaatcccgcttttgtcaattcgcaaataaaacgacccgttagcattttgatagattttctcatttatggttttttttttgtttcgacagtggcttttgtgttttgccattggcatttgagcatctcattttgaatcaattcgtttcagattcagatagctttggttttatgacttaaaaatgtttgacatttttcgttggagacgaagcagataatttgccaaaggggtctgtgaataaagttcaaattgagtcattaaagtgaacatttgaataattgcgaatatgggaagatggacgatttatcttcaatttacttatcttcgattataaaacactattttaaaaaatgcggatgatcttatttagcagctaatttaatcttcagccgcaaaaaaaacacattcagatacagatacatgataatcacggcaaataaaccaggacacggcggccaacatttgttaatgtaaaatattgtaacactatggttgataataaattgccttaatgctcataaagccaaaacaacaaaccgcacggcaacaaacagaatttatggcagagtaatggtacacgtcgagaagtggggatgcataggaaggcggcaggcggtgggcgtggcggaggggccagagggcgtttggggttgaaatgctgggcgcaagtggcagcgtttttaaaccaacattaatcatgagctcacgagagtgcctcgctttctccctaccgctttctccgctcctcgtctagtgtgtgtgtgtgtgtgtgtgggaaattggcttttccatgccgggctttttaataatttataaaagaatttacgagcaaaacagctgaggcatagaagtgcgttaactacatgcacacaaatattcccataattaaatttgaagaatgcacaatcagcaacaatttcccgcttctctttctctctcgttcttggctttgcagcaatccttgctggcaggacgcattccggtggcctccatgacaggacccattaaacgcggactgctctggcagcaaagggatcggctcttctctcgctggaaggagcggtaagtacactgaaagaaaatgctatatttttacatatttaattataccaaatagatctatattatctgcaaaatgttagatacttctataaacaaatatgcataatatatcatgtaacttctaaattttactatattaaattgattagctgctgattacagacatataattcttatccataagaactatgtcccaatattgtccaataatttgctatattttcataaaataccatttaaatttgatgcccagtttcttttgtgttcgagtggggatgcataaatgttaagcgcttttaaatttacctccaccgcaatctgcattggctgaaggaccagacatgaacgcacccccacccccactgaaaaatatgcaaaaatatttcacaacctccaagggttgttaattgcgaaaaagggcataattgacagtggctgcatgctggcccgtccttttttccagataatgctaatagggggaaaatggagcatcgaaatccaggggttccaccatttgacagctcttttgtttttgtttcccccaagctgcatttaattgaaatttaattatgttgcaatgcaattcggtgtttttgtttcactttcggcttttgccctttcgaaccgataattacgtttatcgcttttcatttaacggcgccattttaattgacacttaatgaccaactaagccgggtatttcattgatcaatattcgatttgcagttttgcatcaagcttaattcgatttactaaacagctctgaaaatacaagcttagcacgttgttttaaatagctctaaattgtcagcacacagtgggtttttatccatgttcttaatcgatttaatggaaaataatattgtagacctaaatttttatttatctatttttttttttatttcgaatcatcttcattttgtagtactcagcttacaaaaagactccacttattgcatttctttggcttagatctcggcattcaccattaagttgcatgcctcggacatttaacaagctaagctaataacagaaccgcttattatccacggcaaacaatcttctcttctctcttctaaaaaaccacccactgaagaaaaacgagaaacccgcaagccatttaactctttcgcggaattgaacatcaattttcttggctcaatttacttgaccacggtaataagcctaacaaaatgataacttccacctaggaagtgagccattaggcgatccaaaaaatccaactaaaaaccatttataatttctgttcagcttgagaacttttcgctcgtgtatcgcttgctacggcttgtacgcttcatacataataaacaaatgtgaaatttatgtgcatcagaatttgactggccacatggccacattaataaagtcgattttcattgctgcaaaataaaaaaataatactattatcgtttgaggaagtcgtaaagcttgaagtacttctctgctcaaatctgagcaacggtttttaactttttgccgcataatttatgatttattaataacatatcgaaatgccatcatcgttggggaagggctccaaaattttattggcaacacttaaagtgcccggctttttgatgccggtttttgatgtggattatctgacctttaactgaagactgtcggcagatatacatacatgaatttaaaggtcactcctacaattgtgaacggatttgtactgactaaagccaatctcctattgcagatactttgtgctcactcgtgactacttgcactgcttcaaaagagcctcgggatcggccaatgaacgtgcctcggatatgggacagtttatcttcaaggtaagtggatgcaaactttaagataatctataaaaaaaaaaaagtagcatgcaaaatcttgacaaagggagagttccttaaaagtttcaagtccgcgtttatatccccttttcaaaacgcctcggcttcaccaaagtgtcaagcgaacttttatatttactgcgcattgtgttaaattctattgcagccggaaagagatttatgctcagcattatgaacaacccatgaataacctgttcgtggttaaggggggcggttttttatagagtggagttgggacacacctatatgccttaaaaatgaagtctttttcggttgacaatgcccgacacatgaagtcacgttttgcaattgacttctcagccagatagatgaaagatatccgtccatataggggactcaattgataggtaatcttcagtggaaatccgtataaactatgccaattgtctgggtattattcctcttttttagtcaaacaaatcctgatcgaagggggaataaaaacgagctaaaaaacttcaactaagctcaactaattggctaaaacttgcatccactgcatgttaatttgcccaactcctcgcccctcccgtcttcttggggcgccacctcttcgagtgccccccttttcgctcacttcgcacaacttttgcgatgaaaacaaggcaaatacgagaaatactaaaggcgaacgggcaaatattgcacagaggcaacaacaaaacacaaacaggaacaacggcaatagaaacaacaactgtgaaaaacacaaaaacaggaaaatgctaatcgcgaaaagtcgatgcataaacactctgaaaaagataacattgaggtttctttgaaatgttttgaaaaatctgaaaatattgtaaatattattctcttgtttaaaccgatatatttccaaatcaaaaggaaaaaatatttaagacatttctcggaattaatcatttgaaaatcagttcatcagtttaatatactattattattatttaatagtttgaaaaaatatttaattttttgcaaaaaattcaaatcttaattttttatttattaaatcattcgaagcctcattaattaacagcatatgcatttatttatgcatacttaacttttaaccttttagacataacaaatgtttaagtgagagtattagatacacgattgccgtgaaattgttcattacctcagctaccgatgtgttttgttgttgctgcttaaacaaataaggaaaatgcacataaaactgcagcaaaacaacaatggcaacgccactgcaaagagatcatgggaaaattactttagcgctttttccccctcttgaatttaattttattttgttttaaatttgtgtcgttttttttttttgctggcacttttctgctcaaatctctctcttaaaagcagtgtcaatacacaaccagcagcaggttgttgttgtttacagtttaatttaaaattaaaatacattttttttctcgca

SEQ ID NO: 28091 - DNA, 276 bp, DROSOPHILA
atgcacaatcagcaacaatttcccgcttctctttctctctcgttcttggctttgcagcaatccttgctggcaggacgcattccggtggcctccatgacaggacccattaaacgcggactgctctggcagcaaagggatcggctcttctctcgctggaaggagcgatactttgtgctcactcgtgactacttgcactgcttcaaaagagcctcgggatcggccaatgaacgtgcctcggatatgggacagtttatcttcaagtcaaacaaatcctga

SEQ ID NO: 28092 - protein, 91 aa, DROSOPHILA
MHNQQQFPASLSLSFLALQQSLLAGRIPVASMTGPIKRGLLWQQRDRLFSRWKERYFVLTRDYLHCFKRASGSANERASDMGQFIFKSNKS

SEQ ID NO: 28093 - DNA, 3152 bp, DROSOPHILA
cgtgcgtcccacgcccgaagaggttcgacgcttcaatggtgccaatgatcaacgtcgtgctcgaccatttcgcgagccccacggaaactggtcgaatttcggttggtcaccgccaccacgcgatccaacgcctccacgaaggaacaaaaaattcaactgtatcatttcataattgtggcttctttgggagctcatcacaatctatagggacaacgtgattgcttggccgaacaagtgatctcgctgtcctctttttgactttgctattggcatttgtgcgatctgcgatcatccatgcgccaagtagcaaaaaaaaatcccccaaatagactcgcaactgatgtgcgtccatccgaagaacaaggccaaaagcttgaggctttccatcttcgatggaacgcatcctttgcgagtgtaattgattcgagcaaagacatggagcgctcaaagtgaacacttttcggttgcaaaagcccgacgctttcgagttataccacgaacccattaaccgtagtataagtcgaaagcattgtgtgcacttcagtcttcaggtttgaccttgagtgttataatgaaaatagtattttactgaatagggggaatggggagcaggttaaaacctatctatatttccccacaaaaaaataaacatgtaatccgcacagaatattatcttttgtaacaatttcatatttaagtaaaaacttgctgactccttgtgtcatcggttctgaagacttgaaacaatttgacaatgtagaaaacaatatgtatatgcccgacaaactattttatacttaaaaaaattatctaaataataaattctaaattatcggattacaattcaactgtttatatttttttttgtcttgtgatttggattggatttggcttaggttttatttgggtaggttttgggttttgaatgcatttcgagtaagggtttagataagtatgattccataccaagtaggcctttataacgacttcagtgtcgggccttaagctctatggcttagtacattcgtttttcgttaccgatttcaaacaattgaacttgtaaaaataaaagtattaaagctaactaaaaattttaagtatatacaactgccgcagtaacgcaggataccaataacccattgacgtaatgcattcagccggtaggagcagtgggcaaagtgcgggctcaacaccccgaggtggaggacccaacaccatctccggggccacagtgcgttccaagttagcggcacctctatcgacgcagacggcgggaacacggcgaactgttcacggcggagcgggcgatgggggaaccgatgcggcttggaagcagaccggtcgtcgccttggcaagcataatccaccttctcggctggtccagcccacggtagcctcttcgctgagggccagcagcaacaggcagacggccaagcagaagttcgagagagcgagaggacatgagaagtccagattagtggtgcccttggccaaggacaccgaaacggaagtcaggaagccaacgaaacagcgtgtgatgtcgcaagcggccaaacaggcggcacgggatcgtctctggcccagcaaaccggcgggcgtgggtttgaactcgaatttccgcaagaataggcagccagtgccagaggattccaatattttgccggatgtcgaggaggagtcagaatcgaaggcgtccaagtctcagcagctactggagaccggcgtccagacgaatgagtctgagatcctcgatcataagctaatccttggcgaggtgaagatggtatgcccctccgcgcagctggtcgatcaaatagatcgggaacggctcgagcttaaggaggaaagagagcgacaatcatcgcgcaggtttgctgctcacgagcagcaggaggaactgcatctggacgaactgaaggagttctcgttccggaatgccgtgaccaagagggcgcccaagaagccaccaacgcaccagtacgctcgctatgataatcagtatcagaacgttttcaagtccatggacgatttcttcagccgggtccaaaactctatgcccaaatcagagtccgtgtccaccatccaggatcgcatcaagcgcaaggaagaggagctgctcaggctcttcgacaacgtcgagctaaacgaataatctaaaaactataggaaattctatatcaaattgtctgtgtcgtgcacgtaaagtagtagtccttttcaattcaatggtcatttatgacttttaatgggtgcttgggttttatgatatatgagtggtatgttctataaaaaaaaagaattttggacttcaaaactgagactaactgccgatacaaatcaagaatatatatatatatacgtttaagaactggttatttaggttataactttgaggcttattttactccaacaacattatatcgccactgtttatgatccaataaaagccgtctgagctaactaatggcttggaaccacaccttttggggaaaattcagcgtcagcaagtacacagacattaactgaagtcgtatttaaattgagcttagccaagcggcaatggagtgccatactagccaggccagcaccagcaccagcaccagcagctgacactttctctctgggccgaaagcggggtcaagacgctttcatgacgggcggttcttcagtcaacgctggcaactgatcgcgcgagcaatggaaaatacgcctctcaagtttccacacgaaattcgcgatgtggaggagtccaccaatgctgagctattggatcacttccatggtatgtttatagcgcgcaaatggcttgtgatgcacctagtatataaaaaataaaaaaaaaaaaacaggtgagcgaactggcttcgttcaggtcggatcggagggttacttctttccgcacaagtacaaggacgaggccgagcggtactacaactttgaggcacggccggatgacgtgtggatagccacggtgcccagatcgggcaccacttggacgcaggagctcatttggctggtggccaatgggctggattttgagcatgcccaggagcgaccactaaccgaacgctttccattctttgagtgagtgcttgtcgcgcgatcctatcttaattaagtgaactccaaccgcccttagatttccgctcttt

SEQ ID NO: 28094 - DNA, 1152 bp, DROSOPHILA
cttaagctctatggcttagtacattcgtttttcgttaccgatttcaaacaattgaacttgtaaaaataaaagtattaaagctaactaaaaattttaagtatatacaactgccgcagtaacgcaggataccaataacccattgacgtaatgcattcagccggtaggagcagtgggcaaagtgcgggctcaacaccccgaggtggaggacccaacaccatctccggggccacagtgcgttccaagttagcggcacctctatcgacgcagacggcgggaacacggcgaactgttcacggcggagcgggcgatgggggaaccgatgcggcttggaagcagaccggtcgtcgccttggcaagcataatccaccttctcggctggtccagcccacggtagcctcttcgctgagggccagcagcaacaggcagacggccaagcagaagttcgagagagcgagaggacatgagaagtccagattagtggtgcccttggccaaggacaccgaaacggaagtcaggaagccaacgaaacagcgtgtgatgtcgcaagcggccaaacaggcggcacgggatcgtctctggcccagcaaaccggcgggcgtgggtttgaactcgaatttccgcaagaataggcagccagtgccagaggattccaatattttgccggatgtcgaggaggagtcagaatcgaaggcgtccaagtctcagcagctactggagaccggcgtccagacgaatgagtctgagatcctcgatcataagctaatccttggcgaggtgaagatggtatgcccctccgcgcagctggtcgatcaaatagatcgggaacggctcgagcttaaggaggaaagagagcgacaatcatcgcgcaggtttgctgctcacgagcagcaggaggaactgcatctggacgaactgaaggagttctcgttccggaatgccgtgaccaagagggcgcccaagaagccaccaacgcaccagtacgctcgctatgataatcagtatcagaacgttttcaagtccatggacgatttcttcagccgggtccaaaactctatgcccaaatcagagtccgtgtccaccatccaggatcgcatcaagcgcaaggaagaggagctgctcaggctcttcgacaacgtcgagctaaacgaataa

SEQ ID NO: 28095 - protein, 334 aa, DROSOPHILA
MHSAGRSSGQSAGSTPRGGGPNTISGATVRSKLAAPLSTQTAGTRRTVHGGAGDGGTDAAWKQTGRRLGKHNPPSRLVQPTVASSLRASSNRQTAKQKFERARGHEKSRLVVPLAKDTETEVRKPTKQRVMSQAAKQAARDRLWPSKPAGVGLNSNFRKNRQPVPEDSNILPDVEEESESKASKSQQLLETGVQTNESEILDHKLILGEVKMVCPSAQLVDQIDRERLELKEERERQSSRRFAAHEQQEELHLDELKEFSFRNAVTKRAPKKPPTHQYARYDNQYQNVFKSMDDFFSRVQNSMPKSESVSTIQDRIKRKEEELLRLFDNVELNE

SEQ ID NO: 28096 - DNA, 11673 bp, DROSOPHILA
tatccgcgtgtaattgttttattgtttacaggctacctatgtatctgctcgactagctgcgaacagtatcagcaaataatttcaattgaatttccttatttcctcctctttcctatgttttttttttttcgtttgtttcgttttgtttaaataaataatacctcacgattcgttggctcaacgtattaaacttaacttacagaacaactgtgcaaagttgggcaaaaaataaagagggggttcgaatatgccctcctagcagtgaggcgctgtaaatgtggatgggttaatggtatgtggataccgcgtcttcgtattcttttattgcttgctcgggacccgtccacacacaattcgatctgggtgccccgtagaatctcgcgttgttgtttatactaggggtttgttgtctactaattttatataattttcaattatatacgctgcttcggcgtcggcccaggcgattatcctgctctctggctcaagttatactcaatgtaagcatgcactttcaacttttgaagcgagtttgtaattatattagatcgaaacgcaacgattcgaatcgaaaattgcatcaaatgttcttttttttagcttagttgtagtacttcacaaacagatttctttgatattaaattgcttcgcaaacgatccccgatctctgaggaggatgtccccaccatatctcacgctttctcttttagggtttgtcttagttcttaactaatttttatctgcagctgctcgggatcggtcttatcgttactcccgctctgattctgattcagatctatctatataatgtgtacgtttaaatatataggtttttttaagcttttacgttttcctgtttttagtaaccataatttgtcgcactgtccactcgcattcctatatagatctcatcctataaataaatactccgactccacacacatttagctatatcaagatttaggtttagaaaacaatcagtttggtttcctcatccaattcacagcagcgatatatctgtcgttggtagaaacaggattatattaaaggactattatgagcaataaatgaaatcaatggtacctttattttcgtgactatcagcagtgactagcgtggtggttgccgctgtgctcgtcagcaagctgttgttattgttcaggtgtagatcttgtgactcgatgctcaggtcaatcagctgggtggcgaccggagcgactacgtcctgcagcagattgatgtcactacaatttgttgaacgttaataataattgagagaatatcacttccctccactcacttcttgttgttgacattctcgatgtgtccattgccgttggccaccgccggcacagtattggtgctctcaaagtccaccagcaacttgccgttgctcacctgctgcaggttcttggcattctcatcgatgatcatcgtggagaagctattgatgagcgagttctccttgtctagcaccgattgctcgtacatcgcctgactgtttggcgcctcctggacagtttccgttgccgttggtgctggcgtggaatctgctgcgctgggcgagccctcagccgagttgttgctgctcccggtgacgctgctgttgctgctgctattattctctggagccgttgcggcaggagctgctttgtcgttagcgtcctatatacaaacatttgaacaggattaatgaattgaagatttacgcttggttgtaaatttccaatgctagaacataccttggagggtgtggtggcagcgcctcccttgcgggtgcgcagcatgatggcctccacccgcttgcggcgttcctcgcgctccttctcctcccgcttaaggcgctcagccacctcgacgcgctgcttctctgcctcctccttggccttcttctcggcctcctcacgttccacgcgctgtttctcctcctcctcgcgccggcgtttctcctcctcctcacgctgttgggcttcctgcgaagcaaagtgagtaataaattggagtcctttgttttctttgtttccggttgggcgtcgccaacttacctcgatggccttgcgcaggcgctcctcctccccgcggcgctgttcctcggccaggcgagtggactcctcctcgaacaggcgttggcgctccgcctcctcctcttgggctttgatctctgccaggcgttcagcctccagtcgttggcgctctaattccgcctgtcgttcggcctcctcgcgggccaggcgtcgtctctcggccaaagcggccttggcctcctcctcggtcgtgatcttcttggccatcatcgaagcggtcatcagatcagcaccctctggtggggtcagttcccgcacctctgagttctccttgctgcgcgatggtttcttgggcgcagcctgctcctggggcttaggaacctccttctcattgccctcatccgatttttcctctacattaattgaggtaaccaaagcttcgggcacagattccaccgctaaaatttgctcctcctcctgacgcgccccttcctccgttttctccgtgttcaatgcttccttctcagccttgctcactgatggaacaacaacgggagcctcggtaggaacttcagcctcaggaactggctcatctgcagtagtcttctctacctccttggccacaccgttctgctcgggaactggagcggatgtgggtgcgaccggggcaggagctggttttgtgatggtggaggtactgctgctggtgacaatcatcgacctagtcattgcagaggtatccttggttttcggttccttggtaagcctactgatgcgctcggaactggctgtgcgacttggcagcgcctttgaagctgatgctgccttgggtaccggaggttcctgtagattcaaatacgattcaataaacgtaatgggcttcaaaggaatacgaatcttacccgcttcgaaggcgtcttcttttcggcgctgctcagccgcgatgagctggaggtcacgatcagggaggtggacataaggtttgcagttcgtttgggtgtcgtttgtgcggatggcgaggcggctgtcgtcttcacgggcggcttctgatccctcttgagtttgttaatctctacgaggtttaagggtttcatgtctgacgttctaagtgttcttcaagcggacttaccctcgagagacatgcccgttccggcgatactggcgggcctcggtttccggggtgccgttgccggtcgcctgggcaccagcccggatgtggacatgtttgtcgatgtggacatggcgctgccgggccttgagttattgaagtgtccgccgggcgtggcatttcccgatcgcgagcctaaagattacagatttcattagaacagttacggaatgagagattacagggggcaagggggtgtcattatggatgagcttatgtggagcaccaaataaagcgtacgtgagtagtgaccgtcaccagagtttaccattattgcaggggggaaacacagggaaacacaataccaaatgtaggacacaagttaaccaaagatccaacagagttcaattcgtacacatatagcgagcgaacacataatgaggatacagaacataaaaccaaggaccaaatatcatatacctaggagtacacagactcatctgagcccataaatacttatgtttatatgcgtattcaatgttatgatatggctaaaatgtaaaataaatcaaaatgataataatgataacaattaaataaatgtaagtttcgcttcaccatctaataaaacccgatcaaagcaagtgtaactatggatacatacgaacaaaacgaccgacagacggcgacaggcagcaaacaatatggaccagggaagctccgaaaaggatcgattatgataatgtgattatgatgatctagaataatgtgaaatgtgaagcctatatgtatgctttttgaaattcttttttaagatcttacaaacgtttaacatgtggtttgggattaaatgatcaaatgaaaacacaatgtgttttactggatttatcatataaacggacttgcggatgtaatggactaacatatcaaaggttgttgaaaccgcatgagatcacatgtggatcacaaattgctgctcagatgaactacaaacaacctcgatcggtcgttcttcgtatgtcctctatgaaccgagggaattgggaaacaaaagcctatgcgggtgtacgagttcgatttttggagtgtggtgaaagttcaagttagtcgatttcggtgcgcgagttgttgttctagtggtttgtggtgggggctatcagtaggtactcgagtaaatggatagatggctacaacgctatacgcaatctgcggaggatttagattttagatttagtgagtagtgtggtggtggtgctagcgtgttctttggattggtgttttttgattggtagttcgagatgtttggttgtaatttaggtttttgtttaaatcgcacacacctgcattcactaacaaactagcagagttcatgagcaacaatgagttgggatcgagatcgagaaaacggtgggggttagtagagatcgcatattgctgctgccggccacgaccagtcgcgttcgcgcggaaggatgcagagttgaaggatgaggctgaggcaaatgatgactggaggtatttcttagttgccgcagtttgcaggccgagtgtggactggcgcaggtggtgcaggtggttgggtggtggttgctgtggtgctgtgctgccataaaccgaccaactgctaatctgtgtcatgctcttactggtggagtcccgctgccctccggctccgctggccagcggacggaagctggtcgatatgccgcctcccagcgagtactttccgcgctcccgctggccacctcctccggccaggtgtgtcatgctgcgggacattatgccggcggcactggagctaccgcttccggcgcttcccgcccgccgtgcacgcgcgctggaccccgcaccgcgtcgcccccctcctccgcccagcgaggcggtctcgtccagcatctccagctcccgctcgcggcgttcccgctccagaatcgcacgcatgtgctccccattgcggcgtatcggctgcgccagctggtccaagcggttcatcgagtaggcccgtcctgcggttcagttgaaagttgaaattggtttcgtgaatctttttttgagcctggctctggctgtggatccttagggagctagctaagcttaacccacggatgcgttcgaaatagttttcaaggaattttcaaaattgtcttaaatatatctattgtattctgaaaatcattaagatacgagaatacctgatataacttttataaaataagatttaataaaactttactatttcgaacgcaactgcagttacaggaagacttcacaaaaagatgtggacaaactggtctacaaaatggtgtgtacaaggtgtgttttgaaaaaggtgtgttcaggtggctggtgtgttttttacagtgtgtgtttcaagtgcgtggaataaagttctggtgttttcaggtgcctggaagagaaagtgttccatattttctcactatatctctgccgaaacagcattgaacccgggaaacgacagtaaaaagtcaggggctaagggcaactcttggtccggaatgggctaaaccaaaaggaaacacaactaatcggatggagggatgtcgaatgaagagctgttgatgcgtagatagacgatgaagctgatcgctggatgagcatgattcagatagctatgggggtgtgtcggttggatggactggaggatcgattgggtgggtcttacctggggttctggccggcgtcgagctcagggagcctcgcgaaccataatgcccgtctcgggggctaggtattgtcggcataaggtccgttttcctgcggtaaacgcttcggaacaccatgggtgatgagtcaacgctatcttctgcaatattcgggttttgggttgttttggtttttgttttgtacatgattttggattttgatattcgatttttggatgcaactgccgaaatgattcacttgcgatttcggtctcaaaattatatatgaaaaaacttaatatctaggaacgatagaaaccaaaagcgaaatagctaaaacttaagtgtttacactgatactcctgatggtttcataatagattattaattttagaatcggtaattaatacagtcagccagtgtaaacactttcggtacaaaataaccatgctgttggggatttacgttgaattctttacagacggtcgatcctgctttcgagggttagcttcaacgaagagcgcttgggatctgtacaatctggagggcgtaaaaacatcatgcaaaactgagaagctcaaggcatgccattggtttgggttacgggggtagagacaacgagagttacgagcttacggcggggttacgaatacagggttaggtttggcattggggttacggcaaaacaaaaaacggggtcagaacgagaagggttaagaacgagaaggaggagctgagtagagtagaagaaccctcacccttacgatacgagttattgttgttaaagttgttgtggcctgcagtagtggtgcttgttgctgtggttgttgtgagatttgtaggtctgtgcgcgttggctgtttgtttggaagtgggcggcggatggggattggccggcccatcgatatttatctcgctgccggcaatggagagcgagaaccgcttgggcggctcgtcattggaatagccccaattgaacacctcgtacatggaggaagacttgcgtcggtgatctgtgtgaagtcggtagttttttcgatttgtttcaaatatagaagtgaacgttacagaggtgtgattgctgtttgcttttgggtgcaaatcatattagaaaacaaatacaagaaaaaaaaataaataaaaagagaagaagggagcagaagtgatcgtgccgtgtgagaagtctgtgggtgctaggggtttgtatctatacaataatagtaattcacatgtacaccaactgggcacagtgggagataacatggtagagggttatagaaatctccggtttgcggggcacatgtaaacaataactgggacttgtcaattacaagatttacgagtgtctaaggtaacgataacgataactgcaaagtaaaatttaatctcattatgtgtgtctggtgtctcagcgagtgtggagtgttcaagagtgtgtgtatatctgtttcggggatgactcaagtgctgccgggggcagcgcgactcaccatcttgtcggtccgtcgatgaggaggcacgcttcttagcaccactgtcggcaagttcacgctctgaacttcgacgtgtgagcgaggcgcccgctacgttcgatatagatgtggacctgcaaggggaagtcatgtttagtactcaaattcaaatatctaagcgcaaaaatataaacttcgaattgcctcaaaatggccttgctacttcataacgataaaacaattagctatttgccattaagaatatcaaagtttacaatgaaaacctgcttaatcattgtgaaatgggttttttcaacaattgattggctactagctcactatctttagtttcatgttagccaattatttgctttcatttcgcgacatttactaagtcaataattatactaattgtgatttatatattttggcaaacaatttcgtcattaaaagttcaagaactgataaaaataattaagtaatgccagtcagagtgcagcgctaattagtcatgtgcagcgcaaagcacatatgaaatcggccaaaatatatactaatctagatagccatgaatggctacatattagtgtgcgcgttttgtgtgagtttttggctttgtgctcagataactttcattcggatctcacctccgctgaccccaaaaggcactgggcgataccagaccataatccgcgggcacatccagcaggcggggagtcgaggagccaaatgcgaagccgatggagtttctgtcccgttttttcacttctatccgggactcgcgttcctgtggatgatcaaaaacaagaattataatagaagttcattggaatcgaagcgataacgcacgcacctgattctttttgaggatgtactcgcggcgctccttctcggcctcgaaaatggccttcttgcgctcctccacctggtggcgcttctctgtgtcccgggtacggatctcctcgatgcgtcgacggcgctcctcctccttttgttcacggtaccgctgggcggcctccgcctgggcacgcagttcctcgattttccggtggcgctcctcattttggcgatcgcgggcatattttagtttctcctcacggtctttggacgctaaaagcgtagcaaaatgaatagagattcgaattcgcacatacttataagggcataaattgaatttggataaacaagttacggttcgcaagcaaataaaactgggaatattttcatcagttgctacctgtggcccaacaaaaatcgataaatatctgcttaatatgtgtagtattataccccatttttcgacttttgccggcgagttatttacatgagagccgagagctgacgtcatcgacaatgtacactcgcattttgtgggtcaattgacaaactagcagcagcaacaataacaaatatggcacaaatactcggacaacaataccgccgcccccgcttcaaatttgcctatgtgcaaaatgggcgaacaacaaaaaaaacaaatgataaaaggaaaatagaaagcaaattgctaatgcaggcgcacattttgttctattgaaatgacattgaggcggaaaaatgcaaaaaaaaaattaacaataataacaataatattggtagcatgcggtttggctgccaaagtctgcataatcgaactgggaactggttcttatcgccttatcggttaagatatttttggaattccatgacgtaagcaagacgacaaaggaacaactgcaagtcaatctttttgccagttacaggtgcgaaaatatcttgcaaatgggaaattatcagctgtcaaggtcgcaggcaaaattgctggattttaacccactgtatgccatatttacttgtgtttttggaaagccaaaaacattgcaattgatttttcgcttgataaaatccatttcctttttgctctcgtaataacatgtagttcaatttaacttaacaaactttgagaacattgttattaagatcaaattcccaataacttaatcattccttgttttgcattctcacaatgatttagtcaaatatgactatacatatttttaaaatttgtataattagagttggacttgccatctaaaatcaagctagaccttaagtgtagataacattttgatcttttaggtgttaattgaagatgctttgagtttttaataacccactttagtgggtaacatctagacagtttagaaactacagtgatttaaagcgtgtcactgggtgagaatagataagaagattttcttattagaaaaacagctatgaaagacttgcaatagaccagtgacggttaaaatcgcgataaggcggactatgggtcttatttgttagtgagatcatgcggcaaacattcggagcattcgttttggaggcggaacagaacggggcgtggctgtggaagactttggagcagcctgaatggaatgccaactaccttgagagtcgtcttcactggcggagatttgaccgcccacctgggcgaaccaatgcaaggttgcgccggcgctgcagcccgagatcttggcaggtgcgaatgcgtgggctgtggttcgagttataggtgatgttaaagcgattacatatagtgcgtatgtgtgatatacattggtgccgattttatgtaactcgcaagataatccgcatagaaggcttaccttttcgctcggcgctgccctcgcgactttcgggtcgcttggctgtgttttccactgcaaaagaagtacgagaaaaatggacgattgagtttcgctgcgattttccggagttttacacggacttttggctttcgtgtgtggggaaaatcaattgccgttgcgttttggcaaaaaggaaaggtgacaagaaggcgaaagagcgaggaaggagggggacacaaaaacacacacacacacgcacgaacacaagcgcacggcagcagctgcgatgacgaagcgagagagacagtgagaagtacgagaaaataatgtatgtttccctctctcttgttccaacgacttttccgactggaacttatttataaactcaaaactccggttcggaatcggggaactcgaaatacatatatcccccatttctagggggcagacacttttggcttctcggcttttctcttcttttcttttctgtgcctctcgcctcgctgttttttttcttcgtttttctctcttcactccgtttttgctttttggccgtggtgtgagtgccgttttgctgcgcagtcgaccagcactttttggccactgaaaacgccccgaaaacgcgtagatcctggccgattttcgacgcgggggcattcgtccttcgatttcgcactctcagcgggttgttttcaatgcgtaccttctggattagtcgaaatatttccgtgttggcccccaagactcgccatatttcactttactttagcgctgcaaacagtgtggccagctctgtagtgctgcgataatctacttaatgcgaccgtactgttgtatagtggtgtgctctacgaaaatactagaaatgttaactaacgtattggtttttatgtataaaaactaactccggttttatgtataaaaactaatgatcattcggtcctataaatacattatctaatgttgtatgataatttcagcttccgataccaagggcgcaataattaacactccattagggacgatatgctctaagtgcgctgacatagaaattaacattaatctgttaactaacggtgcccagtttaaaatttaggtacacttgtattcaatactgaaaaggacttatttatctccaattttatttatctctgagatttctttaacctatagttcatattaaatctaatgcttctcggcggcaatgcagagtttggccagaagggcggtgagctgcagcagcgagttgataccatcgataatcttcatgtgggtgattccgatctcacggataaagtccagcttcaaatgctcatcgatgttgatgcgcttgcagacacggaatatgttcgcaatgatgtcctccggcgagtatcccagcttccacagcttggccaggattttgtaggccttgtgtatgtcgttagcagcgcaatggtggatcatctcctctaggagctttgggtgcggctcgtcgcagaccttaaagacgttctcagcggtgatgtcgccaaatccctgagcggtggactgcaggttgttcagtccctgtcgcatatcaccttgggcagtgaatacgatggcctcaagtccgtcctccgtgtagttaagcttctcccacttggccacctcgatgagcttggccagaacttgcgcatcggacagcttggtgaatcgtagcatggcgcagcgggactggataggctctatgatcttctcgctggtgttgcaggccagggcaaaacgagtggtgctgct

SEQ ID NO: 28097 - DNA, 2655 bp, DROSOPHILA
tgaaatatggcgagtcttgggggccaacacggaaatatttcgactaatccagaagtggaaaacacagccaagcgacccgaaagtcgcgagggcagcgccgagcgaaaagcccacgcattcgcacctgccaagatctcgggctgcagcgccggcgcaaccttgcattggttcgcccaggtgggcggtcaaatctccgccagtgaagacgactctcaagcgtccaaagaccgtgaggagaaactaaaatatgcccgcgatcgccaaaatgaggagcgccaccggaaaatcgaggaactgcgtgcccaggcggaggccgcccagcggtaccgtgaacaaaaggaggaggagcgccgtcgacgcatcgaggagatccgtacccgggacacagagaagcgccaccaggtggaggagcgcaagaaggccattttcgaggccgagaaggagcgccgcgagtacatcctcaaaaagaatcaggaacgcgagtcccggatagaagtgaaaaaacgggacagaaactccatcggcttcgcatttggctcctcgactccccgcctgctggatgtgcccgcggattatggtctggtatcgcccagtgccttttggggtcagcggaggtccacatctatatcgaacgtagcgggcgcctcgctcacacgtcgaagttcagagcgtgaacttgccgacagtggtgctaagaagcgtgcctcctcatcgacggaccgacaagatggctcgcgatcgggaaatgccacgcccggcggacacttcaataactcaaggcccggcagcgccatgtccacatcgacaaacatgtccacatccgggctggtgcccaggcgaccggcaacggcaccccggaaaccgaggcccgccagtatcgccggaacgggcatgtctctcgaggagattaacaaactcaagagggatcagaagccgcccgtgaagacgacagccgcctcgccatccgcacaaacgacacccaaacgaactgcaaaccttatgtccacctccctgatcgtgacctccagctcatcgcggctgagcagcgccgaaaagaagacgccttcgaagcgggaacctccggtacccaaggcagcatcagcttcaaaggcgctgccaagtcgcacagccagttccgagcgcatcagtaggcttaccaaggaaccgaaaaccaaggatacctctgcaatgactaggtcgatgattgtcaccagcagcagtacctccaccatcacaaaaccagctcctgccccggtcgcacccacatccgctccagttcccgagcagaacggtgtggccaaggaggtagagaagactactgcagatgagccagttcctgaggctgaagttcctaccgaggctcccgttgttgttccatcagtgagcaaggctgagaaggaagcattgaacacggagaaaacggaggaaggggcgcgtcaggaggaggagcaaattttagcggtggaatctgtgcccgaagctttggttacctcaattaatgtagaggaaaaatcggatgagggcaatgagaaggaggttcctaagccccaggagcaggctgcgcccaagaaaccatcgcgcagcaaggagaactcagaggtgcgggaactgaccccaccagagggtgctgatctgatgaccgcttcgatgatggccaagaagatcacgaccgaggaggaggccaaggccgctttggccgagagacgacgcctggcccgcgaggaggccgaacgacaggcggaattagagcgccaacgactggaggctgaacgcctggcagagatcaaagcccaagaggaggaggcggagcgccaacgcctgttcgaggaggagtccactcgcctggccgaggaacagcgccgcggggaggaggagcgcctgcgcaaggccatcgaggaagcccaacagcgtgaggaggaggagaaacgccggcgcgaggaggaggagaaacagcgcgtggaacgtgaggaggccgagaagaaggccaaggaggaggcagagaagcagcgcgtcgaggtggctgagcgccttaagcgggaggagaaggagcgcgaggaacgccgcaagcgggtggaggccatcatgctgcgcacccgcaagggaggcgctgccaccacaccctccaaggacgctaacgacaaagcagctcctgccgcaacggctccagagaataatagcagcagcaacagcagcgtcaccgggagcagcaacaactcggctgagggctcgcccagcgcagcagattccacgccagcaccaacggcaacggaaactgtccaggaggcgccaaacagtcaggcgatgtacgagcaatcggtgctagacaaggagaactcgctcatcaatagcttctccacgatgatcatcgatgagaatgccaagaacctgcagcaggtgagcaacggcaagttgctggtggactttgagagcaccaatactgtgccggcggtggccaacggcaatggacacatcgagaatgtcaacaacaagaatgacatcaatctgctgcaggacgtagtcgctccggtcgccacccagctgattgacctgagcatcgagtcacaagatctacacctgaacaataacaacagcttgctgacgagcacagcggcaaccaccacgctagtcactgctgataatatatcgctgctgtga

SEQ ID NO: 28098 - protein, 882 aa, DROSOPHILA
MASLGGQHGNISTNPEVENTAKRPESREGSAERKAHAFAPAKISGCSAGATLHWFAQVGGQISASEDDSQASKDREEKLKYARDRQNEERHRKIEELRAQAEAAQRYREQKEEERRRRIEEIRTRDTEKRHQVEERKKAIFEAEKERREYILKKNQERESRIEVKKRDRNSIGFAFGSSTPRLLDVPADYGLVSPSAFWGQRRSTSISNVAGASLTRRSSERELADSGAKKRASSSTDRQDGSRSGNATPGGHFNNSRPGSAMSTSTNMSTSGLVPRRPATAPRKPRPASIAGTGMSLEEINKLKRDQKPPVKTTAASPSAQTTPKRTANLMSTSLIVTSSSSRLSSAEKKTPSKREPPVPKAASASKALPSRTASSERISRLTKEPKTKDTSAMTRSMIVTSSSTSTITKPAPAPVAPTSAPVPEQNGVAKEVEKTTADEPVPEAEVPTEAPVVVPSVSKAEKEALNTEKTEEGARQEEEQILAVESVPEALVTSINVEEKSDEGNEKEVPKPQEQAAPKKPSRSKENSEVRELTPPEGADLMTASMMAKKITTEEEAKAALAERRRLAREEAERQAELERQRLEAERLAEIKAQEEEAERQRLFEEESTRLAEEQRRGEEERLRKAIEEAQQREEEEKRRREEEEKQRVEREEAEKKAKEEAEKQRVEVAERLKREEKEREERRKRVEAIMLRTRKGGAATTPSKDANDKAAPAATAPENNSSSNSSVTGSSNNSAEGSPSAADSTPAPTATETVQEAPNSQAMYEQSVLDKENSLINSFSTMIIDENAKNLQQVSNGKLLVDFESTNTVPAVANGNGHIENVNNKNDINLLQDVVAPVATQLIDLSIESQDLHLNNNNSLLTSTAATTTLVTADNISLL

SEQ ID NO: 28099 - DNA, 3021 bp, DROSOPHILA; identical to SEQ ID NO: 4900

SEQ ID NO: 28100 - DNA, 2020 bp, DROSOPHILA
tttagcgtcacatcaaactagtttctaacgctgcttccatgtggcgaactgacatattgaaggggaataaactttttcgaccatgagagcgaagagaggagcagtcggaaaggtgatgatgtccggttctcgccataacaaattggcggaatcatcccgcgttcctccactagctagggaatatatcagcgcaatggccacggaccgggaattagatcgattcatggccctttcgtcgacggcaagcagtggagccagtggcagcacccacagttgtgccctgggatcagtcccgccgccaggatgtgcctccatggaacatgaatcgcgaccagaatcaggccacaggcgtcgcacgaagagcagcgatcatcgttcacctgacgaacggggggaagcaaaggaacagctccgggaactgtcagtttcaccaccacccagtaagcacaaaatcagtcagttcacatcaccgaaatcggaagtaactaagacgaaaccgaatgaatacactataattcctattgtattggccagtagccccagttttcgttccgtagcagtcacccaaaccatgtcccaatccgcggaggacatacgcacacctaccaagtcgccccagatgcaaaacaaaaaaacgcagacaccagagtctgtccttaagtcacacaaacgcctggagtgggatccttctgccgatgtgggctactgcaagagggcaatgtccatgagtaacatcagcacgctggagcgatccgttttggaggattgcagctggcgtcagccaacacagcagcgacccgaggcgaatttggatggagtgcagccccttttggccgaggaaccgtcaccaatgttggataagccaacgccgccactggcttgcagcacgtttgtcaatcgcagcgaacgcacgaagtctctaaactctggaatggaaagttcattgagctccaataaaggagatcctagaaagaagtgccaacgtaaatccaggagacaggattccgaagttagctcttgtcagacggactgtcgcagcagctcgcaaaaggagtcaacccaaggcagttctgaagcaaaagatattcgtggaaattttacaacagaaggtacccaatgcagttacaatagaaatgataccgaaattgactccataatggaagaagaagaatcaattgacaggcgtaagaaagacgatttaaggattagttcgcgagtacaagatccacagataagttctcgcaggccatcggtgagtagctcgcggagggaatcgctgagcagttacagaagagacgactccaggctcaactcgccaaatagctccagattgggatcagaagtcagctcaagggtggagagctcgcgttccagttcaaggcgggaatcacaaaccaactcggtgtacggcagtttgtcggccagtagctttgattatcacatgcatatggcgcaggaagtcgaggtgctcaaacacaatcaaaggagacaacaagagatggaggttgagccaaagaagcaactggaaaaagagcagcaccaaaatgatatgcaacaaggggaaccaaagggaagagaactaaaggacaagaatcatcattcgggaagggagcagcaagaaattcagccactcatgagagaccaaaggaaagctgaacagcgccatgaaaaggatcatcaactggaaagggaacagcaaggaatccagcaactctcgaagggccaaagaaaagctaaaaagcgcgaaaaggagcgcgagcaagagcgacagtacacggcggctcagttcgagaaaattcggagcaataggcggcatgtgaacaaggagaaccagaagcccgagaaccctgtagtaaatccctccaccggcgttacagcctccacatcaaccacctcattagacgttggatccggtagtagaccgggaggggaattggatctaggaatcgatttgctgtgttctttggtaaaatctcgcagcctcagccagggacagaagaaaaaactcgtccgtgatata

SEQ ID NO: 28101 - protein, 646 aa, DROSOPHILA
MRAKRGAVGKVMMSGSRHNKLAESSRVPPLAREYISAMATDRELDRFMALSSTASSGASGSTHSCALGSVPPPGCASMEHESRPESGHRRRTKSSDHRSPDERGEAKEQLRELSVSPPPSKHKISQFTSPKSEVTKTKPNEYTIIPIVLASSPSFRSVAVTQTMSQSAEDIRTPTKSPQMQNKKTQTPESVLKSHKRLEWDPSADVGYCKRAMSMSNISTLERSVLEDCSWRQPTQQRPEANLDGVQPLLAEEPSPMLDKPTPPLACSTFVNRSERTKSLNSGMESSLSSNKGDPRKKCQRKSRRQDSEVSSCQTDCRSSSQKESTQGSSEAKDIRGNFTTEGTQCSYNRNDTEIDSIMEEEESIDRRKKDDLRISSRVQDPQISSRRPSVSSSRRESLSSYRRDDSRLNSPNSSRLGSEVSSRVESSRSSSRRESQTNSVYGSLSASSFDYHMHMAQEVEVLKHNQRRQQEMEVEPKKQLEKEQHQNDMQQGEPKGRELKDKNHHSGREQQEIQPLMRDQRKAEQRHEKDHQLEREQQGIQQLSKGQRKAKKREKEREQERQYTAAQFEKIRSNRRHVNKENQKPENPVVNPSTGVTASTSTTSLDVGSGSRPGGELDLGIDLLCSLVKSRSLSQGQKKKLVRDI

SEQ ID NO: 28102 - DNA, 22137 bp, DROSOPHILA
attgcgccaacaactttatcgccccgaaactggcaaattctgcgatccaacaacgggagaatatctagacctaatcgaagccatccattcgggtttcatagatcccgcgactaccgtatttaaaaaccagcttactggtaaggagttaccgctaacagaagctattgagaatggtgatattgatgtgtccaagggtagagtatttgatcccaagtctaagtcagcttataactacgacgtggcactctcgcgcggaatcctggtcaccattactcggccactaaccgatcgcaatgatgtggtacgtcgccaggatagcgttgaattactaaatcaaacacccgtgagtgttgtgattagcaaaccgcgtgaaatgtctctcgaagaggccattcgttacaacataatcgatcccaagaccgcgctcgttcgcgatttcgatagctttaagttcctgccttactcggtagccgtggaacgcggtctcgtggacaccaccaagcgcacactcgtggatccaaaggccctgtactttgccttcgatcccactttaatagtttacgtacgtgaaccggtcacctttgaccaggcggccgagtccaagtgtctggacttgcagaccggactgctgacctatgtgccagcaagtgtacctggatccgcaacagcggcaccagccagcgacgatagcgcaaacgattcgctgactgtcatcgagacgcccaaggtatacacgctcaaggaggccgccagtgccggtgtggtggatcccgactcggctctagtcaaggacttggccaaggctaagctggtccgtttgccagaggccttccgaaagggcctaatggatgccaacaaggcgaacgtgctcaacacccagacctcgaagctctgcaccctgcaagaggcctacgaaagtggcctgatctgcacgcctaagcgttcattcggtttgctagaagccatcacctttaacttgtacaacccaaccaatggctgcctagttgatcccttccaaatgcatccagatatcatccggcggcgcaagttcacgctggccgaggccattggctcaggtctggttgatccatcgtcgacagtggtgcgtgaccccagcactggagtcattgtcccactgacggctgccattagcagtggtctaatcgatgccaccgagggacgcctgaccgatgccaacgagccgaagaacaacatcgacctagtgaaggccgccgagaagggtctgctcctgccggcagaacagagggtaagtctcagaacactcgaggtgtactctttcaatttctatcaacaccgatctcgaaaacggaattgcgaatgcaagaaattactgaattattgcaagaaattacagcaaaattattctaattctaaattaaaagctttgttcgtggcatgtttggtattgtactatcgatattgatttcgatttttttttgagacattttgatcagcgcgctgtctttctatttctttctgtctatctctgtctctgccttaatctcaaattctatatcatcagactaaccaagatgtgagctttccacaatgaaaaaaaaataagaatcattctgcaaatttactttgcaaatcatatttattattattttgcaaatctcttatattgcagcgcatggcattcagttttatgttctatatatcgtatttttcgctgagatcgctttaagttctcaagcgacagcagccaaaaataatgcaatcaatcagagtcagcaagtacatcacagatcacatccaacagacatgcatccataaatatcgtactccatcgatcgcgctttatcaagccgaagagcaatgcgttatgtctcatactcctccgcataaatgacgtcggcaataggacaccatatgcaatactctatatactcaatattctatcgatttgtctataacactagcatacgaatcttttttcattcgaactcgcactcatctatttcttgttatttcttttccctatatccaattgtatcccaggcagtattttatgtaggatcagatcaatttttaactgactctaatatgcggttaaaaactgatctgactgagttagtgggattttccccgaaatatcccacaattcactagtctctatttagctcttagttttggagtaaggttacatatcctttttcagccccaatgcaatagcccaggctttagttattatttttgaaatcttgtttaaataccaattttctacctattttcagcaaccatatataaatattttttacatattatttcgtttgcagttttaatttgaaaaaataaacccaaaccacaattaacactaaccaatataaaaatccaacaaaacgaaaccaaaccaaaaacaaaaaaacaaaaccattaaaccgtagttagtgcatactaaaagtaaaacaactcgtagttgctagtccccagtagtgctcgttacccaaagtagtgaaccttggtgcttgtatgtctatattattgctttggtttatgttaactgcctatatacttcattgtatcttaatgcttgttataaaaccgctttgccctaagtctttgccttgcaatattttcaacaaacaaatgtgtttcttccagctatgtttgtgttttatatatattttgtgttccatttatctattgacacttatacgatatctatgaaatctctatatgaatccctttatagcgacccgtatcgagctaagaagtcatttcttttcttaccacttttctaataaattatttgctttgccctcccccacccataatatgtcacatatatagcaagcagtattcgagaagttcaacatgtgcgaagagaatgtcaacgatctgttgaaatgggttaccactgtggaacagaaaatctcaagtgtcggcggacctcgtgaaaagattgatgagttacgcaaccagattaatgcccttaaggttggtactattgatttatatacttgttacaaaattgaaaacaatgtattctttgtttaaatagcaaatcaaggatgagatcgagtctcagcaacggccagttgccacttgtttggagcaaatccgtcagatcgtgctcaccggtggtgatgttttgtctgcccccgaagtgaccactctggagaactctggccgggagttgcgttcgcgtgtggatcgtgtcaacgatcgcaccgtgcgtttgctccggcgcctggaagcaggtcgagatgagctcaccaaactgcgcagcgaattggatgtattctccgattggttgcaagtcgcccgacgcactttggaggacaaggaacgttccctgtccgatttgactcggctgccctctcaggccgattcggttcgtgagtttgtcagcgatgtgattgggcaccaggccgatctgcggttcatcacaatggccgcacagaagtttgtggacgagagcaaggagttcttggccatactgaacgacttccgtacttcactgcccgaacgcttgccacatgttgagccactgtccagtgccgagagtcccatacgccaagaggtatcgctggtctcggcacagtacaaggatctgttgaaccgtgtgaatgctctgcaagatcgcgtctccggtttgggtggacgccagcgtgagtaccaggatgcattggacaaggctaacgagtggctgaggagtgtacatccgcgtgtgtcgcgcattatctctgaaccgattgccggcgatcctaagggagtacaggatcagatgaacgaggccaaggctctacacaatgagctgctttctagtggtcgcttggtggacaatgcgcaacaggcacttgataatctgctgcgcagccttggtggccaactcagtcccatggagatcaatcagttggaactgcctattgccgatctgaagaacaactaccagcagcttctggataatcttggtgagcactgcaaaactctggacaaaactttggtgcaatcgcagggcgtacaggatgccttggacagtcttgtgggatgggttaaccaggccgaggataagttcaagatgaatctgcgacccgcctcgcttatcaaggagcgtctgcaggagcagatccgcgagcacaaggtcctgctagccgatcttcaatctcaccaggccagcatcgacagcgttcaagtttcggccaaacatctgcttgccagcgcatcgaatgcacgcattgccaagaaggtggaatcgaatctaaacgatgtgaccgtcaagtttgagaagctctacgagaaggccaacaaacgtggtgaattcttagatgacgtttacaaccgattaagccgctatctggatgaaatcagcaccgtggagcagcgtatggccagcttacaggaggctctagatagccgcgagacaagcctgctttcaactgaagagttggctcgccgcatgaacgaactgtcgcgtgacaaggaccaactggctccgcagtttgaggattgcgtgcgcagtggcaaggatctaattagcctgcgtgatgtcaccgatactggagttttgcgcgatcgcatcaaggcactggaatctcagtggcgcaacattaacatcagcatcgatgagcgcgccaagctgtccaagcaaaaggccgaacaacaactggcctacgagggactgaaggatcaggtcctctcctggctggccagcactgaagcgcgagttaacggccttccgccggtagcaatcgatctggacaggattaagcagcagcatgacgagctgaagcccatatgcaaggattaccgcgactatgcaccaactattgataaaattaacgatattggagcacagtacgatgcgctaatccgtccagagagtcctgcccgcaaacgctccacttatagtccgattaagcggaccagtccgttgcgccgcatgtccggagacgctagaagccccagccccaccaagggaggcatcctgtcgccactatcgactggttccagtggattcggtagccgcagatcctcccaggatggtttccagctgtctgagctatctccggtgcagcagcagctgagcgagatcaacaatcgctacgggctgattggcgtgcgtctcaatgaccgccaacacgagctggacaacctgaacgaggaacttcgcaagcagtacgagaatctgaagggactagctcagttcctggagcgcattcagcgccaattgcccaaggagtccgtatcaaacaaggatgaggccgagcgctgcattaagcaggcgcgcaagatcctcgaagacatgtacgagaagcagagtcttcttgacaccaccaaggctcaggtgaaggatatcctccgccgcaagtcagatgtgcccggtgccgaacaattgcgccaggagaacgatagcatccaagagaagtggaagaatctcaacgacatctgcaagaatcgcattgccttctccgagaagctgcgtgactttttggacacccatggaaatctgaagagctggctggacagtaaggaacgtatgttaaccgtgctgggacccatctcttccgatccccgtatggtccagagccaggtgcagcaggtgcaagtgcttcgcgaggaattccgcactcagcaaccacaactgaagcatttccaggagcttggacatgatgttgtcgaccatttggccggcacacccgatgctcaggcggtcgaaatcaaactgaaggacattctgggcaagtgggatgatctggttggaaagttagacgaccgggccaatagtttgggcggtgctgctgacagttccaaggagttcgatgctgctgtaaatcgcttgcgtgaggctctgcagaacataagcgataatctggatactttgcccacggatggcgatcaccaggagaatctccgcaaaatcgagaacctggagcgacagcttgagggtcaacgcccgctgttagccgatgtggaacaatccgccgccactctatgcaacattctgggtgatcccgcctcgcgcgctgatgtcaactctcgtgtcgcagctctggagaaacagtatttggcccttcagaagaaactggataccaagaaggcagaaacagaggcttcccttcgggatggccgccactttgccgagaattgctcaaagactcttggttggttgggcggagagctctccaacctgaccgacaggcttttggtctctgcacacaagccaacactgcagcaccagattgacacccatgagccgatctatcgtgaggtaatggcccgtgagcatgaggttattatgctaatcaacaagggcaaggatctaaccgatcgccagcaggatcgcggagttaaacgtgatttggatcgcatccagcagcagtgggagaaactgcgccgtgaagccgtcgatcgacacacacgactgcagacgtgcatggagcactgcaagaagtactcccaaacttcggagacattcctggcctggctgcgtaccgcggaggataagttggctgatcttacacccggcgtattgtcgaaggcaaagctggagacgcgtctgcgtgatctgcagaccttccgtagtgaggtttggaagcattccggtgaattcgaaaacaccaagggattgggagagacattcctcagcagctgcgacatcgataaggaacccattaaggcggaacttcaagacatccgcgatcgttgggagagactcaacaatgatctgattgcccgtgctcatgaaattgaaaactgctcgcgtcgtttggacgattttaatgatgagttgcgaaacctggatcattctttaggtcgttgcgaggatcgacttgctgcccacgatgctctcggtggagctgccaaggatcccaaacttttggagcgtgttaaggccatacgcgaagagctcactaacttgagcaagcctttgcagtcacttaaggctctggccaaggatatcagtgctgaggctagagctgctggcggagatgctgatcatttgaccagtgaagtcgatggcctggccgaccgcatgtccgagctacagggtcgcctggatgatcgctgcggagaactgcaatctgcagccaccgccgtatcccaattcaacgaacaaatgaagagtttgggcattgatctgaacgatctggagaccgagattgaaaagctttcaccgcccggtcgagaaatcaagattgtccaagtgcaaatcgacgatgttggcaagatccagaccaaattggatcgccttgtgggtcgtttggaggatgcagaacgtgccgctgatgttttggtagatgcaggattcgctgcagacaccacccagacccgtgagcaaatctccacgctgcgtaagacattgggtcgtttggacaacagagttcgcgatcacgaggataatcttcattccactttgaaagcacttcgcgaattctacgaccatcaatcgcaaactctggatgacattcaagacgtaagcgatgagttcaagcgcatgaagcccgttggctcggagttggatcagattcgccgccagcaagaggacttccgtaacttcagggagcgcaaggtggaaccactggccatcaatgtggacaaggtaaacgttgctggcagagacctagtgcgttcggctggcagtggtgtttctaccacggccattgagaaggatctggaaaagctaaacgaccgctggaacgatttgaaggagcgaatgaacgagcgcgatcgccgtttggatgtggctctgctgcaatctggaaagttccaggaggcgttggccggtttatccaagtggctcagcgacaccgaggagatggtggctaatcagaagccgcctagctccgattataaggtggtaaaggcacagcttcaggagcaaaagttcctcaagaaaatgcttttggatcgtcaaaactctatgggctctctagccaatctcggcaaggaagttgccaaccactgtgaacccggcgaacgtgcctccattgagaaacagttgaacgatttgatgaaacgctttgatgccctgaccgacggagccgagcaacgtgagttggatcttgaggaagccatggaagtggctaagcgattccatgacaagattagtcccttggaactttggctggacaacacggagcgatctgttaaggcaatggaactgatacctactgacgaagagaagatccagcagcgaatccgcgaacacgaccgtctacacgacgaaatcttgggaaagaagcccgacttttccgaccttgccgatgtcaccgcccagctgatgcatttggttagcgacgaggaagccgttaatctgggcgagaaggtgcgcggtgtgacagagcggtacacaggattggtggatgccagcgacaacattggggctctgctagccgaatcacgccagggattgcgtcacttggtcttgagctatcaggatctggtggcctggatggaaagtatggaagccgagttgaagcgctttaagtccgttcccgtttacgctgaaaagctgctggaacagatggatcatctgttggagctaaacgagaacattgccggtcacgcttcgaatgtggaatctactgtggaatccggagccgagctgatgaagcacatttccaacgatgaagctatccaactgaaggacaagttagactccctgcaacgtcgctatggcgatttgaccaaccgtggtggagatctgctgaagagtgcacagaatgcactaccattggtgcagcaattccatgaagctcacaaccgtttagtggaatggatgcaaagtgctgaagctgctcttgctcccagcgagccacgtcaagctgatgtgcttcggctggagggtgaattggctgatatgcgtcctattctggacagtatcaatcaagtgggaccccagctgtgtcagctttctccgggagaaggtgctgccaccattgagagcattgtgacccgggacaaccgtcgcttcgattccattgtggagcaaattcaacgcaaggcggagcgtctccacctgagcaaccagcgcgccaaggaagtgacaggtgacattgatgaactgcttgagtggttccgcgaaatggacaccactcttcgtgaagccgatctgcctgccatggagcccaagttggtgcgtgcccaattgcaggagcatcgttctatcaacgatgacatttccagccagaagggacgtgtacgagatgttactgcggcctccaagaaggtgctccgcgagtccccacagagcgagaacaccgccactcttcgtgagaaattggatgatctgaaggagatcgtcgacactgttgctcaattgtgcagcgagcgtctgggcatcctggaacaggctctgcccctgtctgaacatttcgccgattcccatcagggactcaccgcctggttggatgacatggagcagcagatttcgcgattgagcatgccggctttgcgtcctgaccagatcactctgcagcaggacaagaacgaacgtcttcttcaatccatagcggaacataaacctctgctagacaaactgaacaagactggtgaggctttgggtgcattggtggccgatgatgatggtgctaagatcaacgagattttggacacggacaatgcccgttatgccgcactccgcttggaactccgcgaacggcagcaggcgctcgagagtgctctgcaggaatccagccagttctccgataaactggagggcatgctgcgtgctctggccaacaccgtggatcaggtcaatcaattagatcccctgtccgctcttccgcagaagatacgtgagcagatcgaggataatgatgctttgatggacgatctggacaagcgacaggatgccttcagtgctgtgcagcgtgcggccaacgatgttatcgctaaggctggcaacaaagctgatccagctgtgcgtgacattaaggccaagctggagaagctgaacaatctctggaacgatgtacagaatgccaccaagaagcgcggcagctcgttggacgacatcctaagcgtagccgaacccttctggaagcaactgaacagcgtaatgaagaccctaaaggatctagaggaaacactatcttgccaggagccaccagcggcccagcctcaggacattaagaaacaacaggtggcgctgcaggaaatccgccatgagatcgaccagaccaaaccagaggtcgagcaggtgcgacgtcacggaagcaacctgatgaacatgtgcggcgagcccgacaagccagaggtcaagaaacacatcgaggacttggacaacgcatgggacaacatcacggcgctgtatgccaagcgcgaggagaacctcatcgatgccatggagaaggccatggagttccacgagacactgcagaacctcctcaagttcttgaccaaggccgaggacaagtttgcccatctgggagctgtgggttcggacattgatgccgtcaagcgacagattgaacaactcaagtcgttcaaggatgaagtcgatccgcatatggttgaagtagaagcattaaacaggtaaggccttctatatatatttatatatatatattcttattcaatcgaatctattcaaatttaaaaatctaatgttccattgccgtggtgtctatctcaacttgtgaattggcagaggtctcaaaaggcaagatagtttcaaaaaagtctagttcgttcgtgcgttgttgttgtgaatattgattacatttaagtgcttgcaactgcaatgatttaagatctccggtatctttgaacaaagttgagccgagcatgttttttgattgccacagtttatccagttgcatgcaatttcaaaatgaaaacaaaaaacacttgccatttattgtttttgcgcttgcttatgttacactgcagtttttgtaaattcttcggctaattgttaattgaatcttacagacaagctgtggaactgacggaacgcacttcacccgagcaagcggcatcgattcgcgaacccctgtcggtggtcaatcgccgctgggaggccctactccgtggcatggtcgagcgccagaagcaactggagcacgctctgctgcacttgggtcaattccagcatgctctcaacgagctgctggtatggatcaacaagaccgacagcacactggaccaactgaagccggtacgtagatatatatttcatgcttgagagaaacccaaatcattttccattatgtaaacttttagattcctggagatccgcaactgctagaggttgaattggccaagctaaaggtgctggccaacgacattcaggcccaccagaactcagtggacacactgaacgatgcgggccgacagttgattgaaaccgagaagggatctgtggaggcgtctactacccaggagaagctgcgcaaactgaacaacgagtggaagcagcttctgcaaaaggccagcgaccgtcagcatgaactggaggaggctctacgtgaagctcacggatatattgccgaggtccaggatattctgggatggctgggcgatgtagacgcagtgattggagctagcaagcctgtgggcggacttcccgagactgctactgagcaactggaacgtttcatggaggtgtacaacgagctggatgaaaacagacccaaggtggagacgattcaggcccagggccaggagtacatcaagcgtcagaaccaaatgaaggtctcgtccagcaacttacagcatacactccgcacgctgaagcaacgttgggatgccgtggtatcccgtgcatccgacaagaagattaagttggaaattgcactcaaggaagccaccgagttccatgacacactgcaagcctttgttgaatggctgacccaggccgaaaagctgttgtccaatgctgaacccgtctcacgcgttctggaaaccattcaggcccagatggaggagcacaaggtgctgcagaaggatgtgagcactcatcgcgaagccatgctgctgctggacaagaagggaactcaccttaagtacttcagccagaagcaggacgtgatcttgattaagaacctgctcgtgtcggtgcaacatcgttgggaacgagtggttagcaaggctgcggaacgcactcgtgctctggaccatggctacaaagaggctcgcgagttcaacgacgcctggagtggcatgatgcagtatctgcaggaaaccgaacaagtgctggatcaaattatcgaggaagccacagcgtccaaggaaccacaaaagatcaagaagtacattggcaagctgaaagagacgcatcgtcaactgggcgccaagcaatcggtctacgacggaaccatgcgcaccggaaagaatcttttggagcgagctcccaagggcgatcgccctgtgttggacaaaatgctgatcgaactgaaggaacaatggactcgagtgtggtccaagagcatcgatcgccagcgcaagctggaggaggctttgcttctttctggacagttcagcgatgctctgggtgagcttcttgactggttgaagaaggctaagagccgcctgaacgaaaatggaccagtccacggagatttggagacggttcaaggtctatgcgagcaccacaagcacattgagcaggatctgcagaagcgcgctgcgcaaatgcaaggagtgctcaagactggacgcgacctggagcgatctggaaacaatcccgaagttggacgtcagctcgatgagatgcagtccatttgggaggaggtcaagagtgccgtcgccaaacgcggcgagcgtctccaggtggcccttgttgatgccgagaagcttaatgcccgtgtccaggctctctttgattggctggatcatgccgagcacaagctacgatatgccaagaatgcccctgatgacgagaaggtgtcccgtgaaatgatggacatccacatggacttcatgaaggacctgcgagtgcgcgagcgtgaaaagaccgagacttttgagtacgccgaggacattatcaacaaggcctatcccgatgccattccgatcatcaagaactggctttcgattatccagcagcgttgggaggaggtgcgccaatgggccatcaatcgtgagtcgaagctggagcagcatctgcagtcgctcaaggatttggacgacaccattgaggagctgttggcttggctcagcggactcgagggcaccttgttgagtaagtattgattattaaattatttgagatagattttaattgacgttctctgcagacctgaagcacgaacagctgccggacgagattccacccgtggagaaattgatcgaggaccacaaggagttcatggaaaacactgctcgccgtcaaaacgaagtggaccgcgcatgcaaaccaagacagttgccaccaggagcgcgcaagccgtcgcgcagcggcaagacgccagtgtgagtagaataatagattcgcaagtagctgccgaaactgtagctctgctgtacatatccttggtatattattattattttgtatatttattttttccaatttctttttgtatactttcttttgtatccaccaccttattgctacaatattccaaacaaaaaccaaaaaacccccgcaacgtcttgcacacctatctctctgcctatccaaaaaccacaccaaccaatgaaccaactacctaccgaccaacagtcgtggctccagtcacgatctgcgtgagcagtcacccgacggcaccctgaggcgtcaaaggtttggccgcaagtttatactgtaatgcttgctactcgtttcatccacttgccaagtggcaaatgtgcttactcaccatctaatcacgaatggagttagtgattgcctaacatctgatataccgaaaccataccaagatacttgtttaaatccccaaagtagcgctaaaatacgtagctgctaacgcacaattcataccaaccgagcactcgtcaaaataaaaaaaaaaacaccctgcttaatcactgccgcttaacctattgcttgtttaatccgatacctaagtataattttgtaactaacgatatatattctcttttttcacagctttaagggatctcgtgaccagggactcaatgcccgcaagggaaggtgagttctcgttgggcttgtattattttttttgtaattcaagaatagatagattccgcatgtacttcgaaattctcaaatcgaatttgttttgttttcaacttttcaactacttttggaaatgctgcgtctacaactattcgaaatatttgtatatttaaatttgtaatatccatgtattatctatgttaatgtgttttgcgtattttgttcgttactgtaccattttgttttgtctctttttgattctactttcatcttgtctacacactacgctactacgtaaacgttgctcataccgctcgaatatcaaatatcaaaactttgcatcttgccgctttatttgcctatgtctatgtcaaaaaccaaaatctctgagcagtcgtatcacgcccacacgtgacacgcccgacagagatcgcctgccgcactatggcccccgattctcgccaaggtaagtccttgaaatcctccaaaatcatccatatcatctcaagctgtgcatgtccagtacaattgtttgtatttagtttggttcatgatgttcaccgggtttgaagaacttctaattaacagaaatatcacattttaatatagcacctcgggaccggaactggaattccgttcgccacgcgcgaagcttctgtggaccaagtggcgcgatgtctggatgctctcatgggagcgccagcggctgcttaacgatcatcttctgtatctgaaggatgtggagcgtgcccgcaacttcagctgggacgattggcgcaagcgcgtaagtatttttaactaacagtacttcactaagaatatgatttttaatatttctatccattcatagttcctcaagtacatgaaccacaagaagtcgcgcttgacggatctgttccggaaaatggataaggataacaatggcatgattccgcgcgatgtcttcatcgatggcatactcaatacgagtaagttcctccgatgcttatccttctatactaaactatattaacaacaaatataatttccttagaattcgatacatctggcttggaaatgaaggctgtagccgatttgttcgatcgcaatggcgaaggcctcatcgactggcaagagttcattgctgcccttcgtcccgattggcaagagcgtaagccagccaatgattcggacaaaatacacgatgaggtcaaacgtctggtcatgctgtgtacctgccgacagaagttccgtgtgttccaagttggcgagggcaagtacagagtaagtagcaagagtagtgtgtcacctggtcggcagttactaatgtgtaaaataacttatttcagtttggagactcccagaaactgcgcctcgttcgtatccttcgcagcactgttatggtgcgcgtgggtggcggttgggttgccctggatgaattcctgcagaagaacgatccttgtcgcggtaagtggtccatctatccatccgagtttagtcaaaacaccctatttagttgtgttgcgtacacacaatctcgaaatttgttggatttcatccattccacatccataccagccacataaattccatacatatatctaaaataataatctagcgtaatctagtagttcacatttttaatattccacccaaatcatgcattttgtctatacccagatactgtgcatcgtttgctcatatcatttaaatgcattcatatcacatctaggtacagttgtgcttaacaactaattatactataatgccaaataataataataataatattaccaaacggatatggtcatttaaccaaccaacaaacaaccaaccaacaataaactactgtgcctaaaataactagtcaatgaacccggaatataaaaagagaaacctttgttaaaacctcatcattaattcaggtccaaaagttgcctaaacaagctaaaatgatattaacagtgtgccttagggcgaattttacctttaattgccattcagccagcgccaaaagccacatcatatacacaattacccagcaaccaaaaccaattaaatataaaactgaccaatctagccaagggttgtaccatctactctactcatgctcatttttgtcgcttctatctaactgcgtaccaactagctgctataagaccatgaaaacacacacaaacgctcaccaaaaatatcccgccaattgtaggttcttctatttcctattagttagtgttattaaccaggtttctccacccaattcttagtcgtagttacattaaccctttgtttttaaccattagttgagaatgatattttgttaatcctatcctgctttcaaactaacatcctgctttatttgtttaacagtctagcatgctctgttaactaacagggtttgtgcacactgtacttcatgtcacccattttatgtttgaatcctcatcaatttcgttgtacgtcctgtatttaaattaaaattgttgtattaatttgtgttatttgtttttcgttttttactaatcaaactttatgtttacccctttttctttttttccaaaatggttttctttattataccgaaaatcgattgaatcttgataaaccgaacccgataaatatacatatatgtatactctacgcttgcgctgcccgctcgccacgcccacgaccacgcccgacatgcacccgcctgtgcccacaccaaatactaaacaacaaaaaaacaaaaatgttgtaaaacacaccatactgaaaacaaactgtgacaaatactttgcggtaacgaactttcgttgttattgttgttgtttatatgttcgccctacaacaaaacattgcctatccgtgtaaatgtgttatatgtgggtgcatctgccatgccaatgcgtacaaatgcgtatataaatgcatctgtgcatctgccactgcaactgcaatcgctaccaaaaccaatgccactgttatccgggagcagccaaaggacgcactaacatagagctacgcgagcaattcatattggccgatggcgtctcgcagagcatggccgcattcacgcccagacgttccacgccaaatgcggccgccactgcctcctcctcaccccatgcccacaatggcggcagctccaacttgcccccatatatgagtggacagggtcccatcatcaaggtaaatcaatcagcaaattgaatctgcaacggaaagtaaaggggagcctaagtgtcacaccgaatccatttccatcgtttttgtcgccaatcggaattaacttcttttgaagaacttaatacccaattatctactcttaaatattctttacttaaaaaccctcaaaattctaaactttggtcaaatcaatatgatatgtatattcacttaaaatcatttcaactaacctattatatttctgtttgctttaaacattttaactttctttaaatttaactataatatccaaaaagtattttaaaaagaggttctagctttatagaagaacaaatattctattatttctgaaaatgacaaatttaaacgaaattgagaaatgagaagaggtgccaaagtgttaagtggttaacgtcaaagggttaaacccttgctcaaatcccgatcccaatccatttacccatccaaacatatttccatccagcgagggcacaaggtaagtgctcctttcgtccttttttttgggttcgttgtgtgtgttgttgacaaagaaaagctattgctgctgcgccgccgactcttaaaatataatttctatatatctgcatgagaaccgaatacttggtaacaatgtgttcacattttttttgtatttgtatttgattaagtaattgcgacattttttagttaatgctagagcatacatatagtacaccccacactattcattgatgaggctatgaggtttttaggccaggttaggttgttgtccacggcttaaatgatcataaaccgtttgccaaatgaaatgcgttaattcattgttggttaaacatatcgaaattatatccttagccgacgaacacttggccgaactaatgccaatatttgagaaaatccgcgctcaagaccaggttccatgcgcctttcccattcacatgggtgccggcggcacggtattcgtccgttgcaataccagccgttcggtgccgctgagtccacacgtgctgcattgtcatccaacaacacactgggtaagttcgcaggcagcaggagcagaagacgccgaagctgctccagcaggagtgcccgatattggtttcatctttcacgggagagggggtgctaaacctacatgaatgatcccacattataatatttgtttatttatttttctgtaaaggtacgcgagcgctccgtccgctcgattcccatgtcacgaccgtcgcgctcctcactttcggccagcactcccgactccctgagcgacaacgagggtagccatggaggaccttccggccggtacacaccacgcaaggtcacctacacgagcacgcgcacgggtctcacgccaggaggctctcgtgccggctccaagcccaactcgcgcccgctcagcagacagggatcaaagccgccatcgcgacatggctccacgctgtcgctagatagcacgggttagtagcaagcaaatgagctcgtttgcagatctttggctgactggcatgtacttcctatttttgtagacgatcacacgccctcacgcattccgcaacgcaagccttcaacgggcagcacagccagcggtaccactccgcgtccggcgcgactttcggtgaccaccaccacgactcccggcagtcgtctcaatggcaccagcaccattacccgcaaaaccgcctccggatcggctagtccggcgcccacaaggtagggattttattattaaggcatctcatcgaatcaaatcgaaaatagcggggaaagtgggtgggatcaaacactattaattattcaaactcttattaatttattatttttattttcacactattttcggtttaccgcattaactattgaccactcacacaaaacaatcaacatcatgaaacgctaacttacaactgcaattggcatttgaaccatttgaaatttgcttgaacgcaactaaaaaaatgcaactaaaactcgtgcctgacaccaccgcccctcccaaaacaaacaaaaaaaaaaatatcaaaaaatgaaacagcaacggaggcatgagtagatcatccagtataccagcactaacaggcttcggcttcaaaccaattaggtaatacagccacgaacggcatagaacacgtaacataaatacatactcataagtttaggctagatttaagatcgatcatgtatcttaggcagcggttatggtttatctttgctaactatcgttgtacttactacctcccccaacataccaaaaagccggccatcacggataccgattaagataccctcattcgattccaagtcaacatcgcccagctcgactacgaatccaaccagcttggggtaaagttgataagcttacaacaaagacatttactagtcaatttcaactcagtctatagcaagtaattattatttgatacccgtctaaagttattgttaagtttcctcgtttgttcaaccttttccgcgcatgtgtatgttgatgtgcatgtccatgccacaaaaagaaaaaaaaaacagaataacaagcaaaaaatgctttcgactaatgcttaagttcgattaccagattacaatacatatttttgttatttttatgtgttatattgttgtgatcaactattgaaagaacagtcactaatcctgatacttttcgatcccaggcgaaacatcagcggtagctcaacgccctccgggatgcaaacgccgcgaaagagctcagcggagcccacattcagctccacaatgagacgcacttcgcggggaaccacaccgacggagaagcgtgagccattccggctataggaagccaccgttatggctgaggacgacgacgatagagaagcaaaagaatgccaatatttaaaccacatacaaaacactcaactctacgtactaactacgcactgaagttctaaactaaaccccccaaaaaccactccccaaactaatcgaggctacattagcaatgaatgtagcagcaggaacagcacacagttctacaaaagagactaactttgaagtgccctaatggattggtggagcgaaacaatttatagatgtttatactatatatattttgtaaaagacacagttaagatgaaagttatgcagacatatagctagcacacaaagttgatcagacaagcaacctacttacgagtactactactactaatactaccttttgctactactaatttgtaatgcccactacctttattcactagttatacacgtttccaaaattatgatttgtatatacttataaagcgaaaagcaagcgtaaattaatgaaaaatacactccaagtgctctacggcaattaaacaaacaaaaacaaaaaaaatacaaacaaaaacacataaaaaatatcgaaaaacttaagtgaaaaaaataaaacattcgaatgaaatgccgcggtctctgctgcaaaccatcttgagtctcagttctccactggaatcgccagtccggtggaattctagccaggagtggcacgtggcagaggcggaacggccaaaaaaataataactaaacccgttaaagagataaaatttgattttgttctgttattaaactaataggaaagtgaaaattgtaagccgcataaagaaaatatttaattatatactaaaagtcattactataagtttaattaatatttaactgttaagcgacaaacacacacacacacacagattttgtattgcataattattatgttttttatatgcaatatatcagcgaatgaattacgatgcagatgcagaagggcgaaagaaatcgaacccgtttctataaatactgtaaaatactaatactaaattattttgttgtacgaaacgaaagaaatgcattaaaactcgtgttttgtaattctatttaattaaaacaattcaaatgcgaaataaacatttacaaaaaaaaaaaataacaacataacccgacgactttttactttaatacccggcgataagaaataaaacccatgattctgttgattttcgaatttgatttattcattgaagttctcaatcgtagtagttatttgacacattgaaattgaattttcgatataataccatgatcgatccgtgcggatcactatttggttttctacaaaacactcaattaattgtgatatttaaatatgtgtgcatgcatgctaatgcagatgccctgtatcggggttactcctcctcctcctcctccttctacgttccctctattctgaccaccatttactgactagaaatgccgcttcaactttaatcatccaactaactcaagtacaagctgggttcatacgtttctttgtgctatgggctgccagagggggtttcatttcgactaaactttgaagtgcagttgcagattatgcgtaagtggatatcaataccgtctcctcctcgttcgtcccgatgctgtggtgtaatctcgtcaacgccagcgctgccagttggtgctcctaaatacatgctgctgctctacgcgctagctttcaaaggccctaataatatcggcttggcatgatgccgcaagtcttttgtaaattattataaatatcattatagttaaggtacaactaaatatcatcattaatatagtccaaattagctaacacggctcgctaaagctaactaaacataaatacataaatacatatatacgaacgtacgaacacaaacaaagtcacagaagtgcgcctcataaaactaaacctgggccgtttgggttggtgcttcattgtgtattagcagcatggcaacgcaatgggtatccggatccccatttctaccggaagccatcgtcacctggcaagcccggaactggctgactgggccttcgcctgcttgctattcgtgttgaccgcattcgatgtggagccacctgcgttggctggagctgcagccgcattctgctccccccgt

SEQ ID NO: 28103 - DNA, 12995 bp, DROSOPHILA
ctagttgatcccttccaaatgcatccagatatcatccggcggcgcaagttcacgctggccgaggccattggctcaggtctggttgatccatcgtcgacagtggtgcgtgaccccagcactggagtcattgtcccactgacggctgccattagcagtggtctaatcgatgccaccgagggacgcctgaccgatgccaacgagccgaagaacaacatcgacctagtgaaggccgccgagaagggtctgctcctgccggcagaacagaggacatatatagcaagcagtattcgagaagttcaacatgtgcgaagagaatgtcaacgatctgttgaaatgggttaccactgtggaacagaaaatctcaagtgtcggcggacctcgtgaaaagattgatgagttacgcaaccagattaatgcccttaagcaaatcaaggatgagatcgagtctcagcaacggccagttgccacttgtttggagcaaatccgtcagatcgtgctcaccggtggtgatgttttgtctgcccccgaagtgaccactctggagaactctggccgggagttgcgttcgcgtgtggatcgtgtcaacgatcgcaccgtgcgtttgctccggcgcctggaagcaggtcgagatgagctcaccaaactgcgcagcgaattggatgtattctccgattggttgcaagtcgcccgacgcactttggaggacaaggaacgttccctgtccgatttgactcggctgccctctcaggccgattcggttcgtgagtttgtcagcgatgtgattgggcaccaggccgatctgcggttcatcacaatggccgcacagaagtttgtggacgagagcaaggagttcttggccatactgaacgacttccgtacttcactgcccgaacgcttgccacatgttgagccactgtccagtgccgagagtcccatacgccaagaggtatcgctggtctcggcacagtacaaggatctgttgaaccgtgtgaatgctctgcaagatcgcgtctccggtttgggtggacgccagcgtgagtaccaggatgcattggacaaggctaacgagtggctgaggagtgtacatccgcgtgtgtcgcgcattatctctgaaccgattgccggcgatcctaagggagtacaggatcagatgaacgaggccaaggctctacacaatgagctgctttctagtggtcgcttggtggacaatgcgcaacaggcacttgataatctgctgcgcagccttggtggccaactcagtcccatggagatcaatcagttggaactgcctattgccgatctgaagaacaactaccagcagcttctggataatcttggtgagcactgcaaaactctggacaaaactttggtgcaatcgcagggcgtacaggatgccttggacagtcttgtgggatgggttaaccaggccgaggataagttcaagatgaatctgcgacccgcctcgcttatcaaggagcgtctgcaggagcagatccgcgagcacaaggtcctgctagccgatcttcaatctcaccaggccagcatcgacagcgttcaagtttcggccaaacatctgcttgccagcgcatcgaatgcacgcattgccaagaaggtggaatcgaatctaaacgatgtgaccgtcaagtttgagaagctctacgagaaggccaacaaacgtggtgaattcttagatgacgtttacaaccgattaagccgctatctggatgaaatcagcaccgtggagcagcgtatggccagcttacaggaggctctagatagccgcgagacaagcctgctttcaactgaagagttggctcgccgcatgaacgaactgtcgcgtgacaaggaccaactggctccgcagtttgaggattgcgtgcgcagtggcaaggatctaattagcctgcgtgatgtcaccgatactggagttttgcgcgatcgcatcaaggcactggaatctcagtggcgcaacattaacatcagcatcgatgagcgcgccaagctgtccaagcaaaaggccgaacaacaactggcctacgagggactgaaggatcaggtcctctcctggctggccagcactgaagcgcgagttaacggccttccgccggtagcaatcgatctggacaggattaagcagcagcatgacgagctgaagcccatatgcaaggattaccgcgactatgcaccaactattgataaaattaacgatattggagcacagtacgatgcgctaatccgtccagagagtcctgcccgcaaacgctccacttatagtccgattaagcggaccagtccgttgcgccgcatgtccggagacgctagaagccccagccccaccaagggaggcatcctgtcgccactatcgactggttccagtggattcggtagccgcagatcctcccaggatggtttccagctgtctgagctatctccggtgcagcagcagctgagcgagatcaacaatcgctacgggctgattggcgtgcgtctcaatgaccgccaacacgagctggacaacctgaacgaggaacttcgcaagcagtacgagaatctgaagggactagctcagttcctggagcgcattcagcgccaattgcccaaggagtccgtatcaaacaaggatgaggccgagcgctgcattaagcaggcgcgcaagatcctcgaagacatgtacgagaagcagagtcttcttgacaccaccaaggctcaggtgaaggatatcctccgccgcaagtcagatgtgcccggtgccgaacaattgcgccaggagaacgatagcatccaagagaagtggaagaatctcaacgacatctgcaagaatcgcattgccttctccgagaagctgcgtgactttttggacacccatggaaatctgaagagctggctggacagtaaggaacgtatgttaaccgtgctgggacccatctcttccgatccccgtatggtccagagccaggtgcagcaggtgcaagtgcttcgcgaggaattccgcactcagcaaccacaactgaagcatttccaggagcttggacatgatgttgtcgaccatttggccggcacacccgatgctcaggcggtcgaaatcaaactgaaggacattctgggcaagtgggatgatctggttggaaagttagacgaccgggccaatagtttgggcggtgctgctgacagttccaaggagttcgatgctgctgtaaatcgcttgcgtgaggctctgcagaacataagcgataatctggatactttgcccacggatggcgatcaccaggagaatctccgcaaaatcgagaacctggagcgacagcttgagggtcaacgcccgctgttagccgatgtggaacaatccgccgccactctatgcaacattctgggtgatcccgcctcgcgcgctgatgtcaactctcgtgtcgcagctctggagaaacagtatttggcccttcagaagaaactggataccaagaaggcagaaacagaggcttcccttcgggatggccgccactttgccgagaattgctcaaagactcttggttggttgggcggagagctctccaacctgaccgacaggcttttggtctctgcacacaagccaacactgcagcaccagattgacacccatgagccgatctatcgtgaggtaatggcccgtgagcatgaggttattatgctaatcaacaagggcaaggatctaaccgatcgccagcaggatcgcggagttaaacgtgatttggatcgcatccagcagcagtgggagaaactgcgccgtgaagccgtcgatcgacacacacgactgcagacgtgcatggagcactgcaagaagtactcccaaacttcggagacattcctggcctggctgcgtaccgcggaggataagttggctgatcttacacccggcgtattgtcgaaggcaaagctggagacgcgtctgcgtgatctgcagaccttccgtagtgaggtttggaagcattccggtgaattcgaaaacaccaagggattgggagagacattcctcagcagctgcgacatcgataaggaacccattaaggcggaacttcaagacatccgcgatcgttgggagagactcaacaatgatctgattgcccgtgctcatgaaattgaaaactgctcgcgtcgtttggacgattttaatgatgagttgcgaaacctggatcattctttaggtcgttgcgaggatcgacttgctgcccacgatgctctcggtggagctgccaaggatcccaaacttttggagcgtgttaaggccatacgcgaagagctcactaacttgagcaagcctttgcagtcacttaaggctctggccaaggatatcagtgctgaggctagagctgctggcggagatgctgatcatttgaccagtgaagtcgatggcctggccgaccgcatgtccgagctacagggtcgcctggatgatcgctgcggagaactgcaatctgcagccaccgccgtatcccaattcaacgaacaaatgaagagtttgggcattgatctgaacgatctggagaccgagattgaaaagctttcaccgcccggtcgagaaatcaagattgtccaagtgcaaatcgacgatgttggcaagatccagaccaaattggatcgccttgtgggtcgtttggaggatgcagaacgtgccgctgatgttttggtagatgcaggattcgctgcagacaccacccagacccgtgagcaaatctccacgctgcgtaagacattgggtcgtttggacaacagagttcgcgatcacgaggataatcttcattccactttgaaagcacttcgcgaattctacgaccatcaatcgcaaactctggatgacattcaagacgtaagcgatgagttcaagcgcatgaagcccgttggctcggagttggatcagattcgccgccagcaagaggacttccgtaacttcagggagcgcaaggtggaaccactggccatcaatgtggacaaggtaaacgttgctggcagagacctagtgcgttcggctggcagtggtgtttctaccacggccattgagaaggatctggaaaagctaaacgaccgctggaacgatttgaaggagcgaatgaacgagcgcgatcgccgtttggatgtggctctgctgcaatctggaaagttccaggaggcgttggccggtttatccaagtggctcagcgacaccgaggagatggtggctaatcagaagccgcctagctccgattataaggtggtaaaggcacagcttcaggagcaaaagttcctcaagaaaatgcttttggatcgtcaaaactctatgggctctctagccaatctcggcaaggaagttgccaaccactgtgaacccggcgaacgtgcctccattgagaaacagttgaacgatttgatgaaacgctttgatgccctgaccgacggagccgagcaacgtgagttggatcttgaggaagccatggaagtggctaagcgattccatgacaagattagtcccttggaactttggctggacaacacggagcgatctgttaaggcaatggaactgatacctactgacgaagagaagatccagcagcgaatccgcgaacacgaccgtctacacgacgaaatcttgggaaagaagcccgacttttccgaccttgccgatgtcaccgcccagctgatgcatttggttagcgacgaggaagccgttaatctgggcgagaaggtgcgcggtgtgacagagcggtacacaggattggtggatgccagcgacaacattggggctctgctagccgaatcacgccagggattgcgtcacttggtcttgagctatcaggatctggtggcctggatggaaagtatggaagccgagttgaagcgctttaagtccgttcccgtttacgctgaaaagctgctggaacagatggatcatctgttggagctaaacgagaacattgccggtcacgcttcgaatgtggaatctactgtggaatccggagccgagctgatgaagcacatttccaacgatgaagctatccaactgaaggacaagttagactccctgcaacgtcgctatggcgatttgaccaaccgtggtggagatctgctgaagagtgcacagaatgcactaccattggtgcagcaattccatgaagctcacaaccgtttagtggaatggatgcaaagtgctgaagctgctcttgctcccagcgagccacgtcaagctgatgtgcttcggctggagggtgaattggctgatatgcgtcctattctggacagtatcaatcaagtgggaccccagctgtgtcagctttctccgggagaaggtgctgccaccattgagagcattgtgacccgggacaaccgtcgcttcgattccattgtggagcaaattcaacgcaaggcggagcgtctccacctgagcaaccagcgcgccaaggaagtgacaggtgacattgatgaactgcttgagtggttccgcgaaatggacaccactcttcgtgaagccgatctgcctgccatggagcccaagttggtgcgtgcccaattgcaggagcatcgttctatcaacgatgacatttccagccagaagggacgtgtacgagatgttactgcggcctccaagaaggtgctccgcgagtccccacagagcgagaacaccgccactcttcgtgagaaattggatgatctgaaggagatcgtcgacactgttgctcaattgtgcagcgagcgtctgggcatcctggaacaggctctgcccctgtctgaacatttcgccgattcccatcagggactcaccgcctggttggatgacatggagcagcagatttcgcgattgagcatgccggctttgcgtcctgaccagatcactctgcagcaggacaagaacgaacgtcttcttcaatccatagcggaacataaacctctgctagacaaactgaacaagactggtgaggctttgggtgcattggtggccgatgatgatggtgctaagatcaacgagattttggacacggacaatgcccgttatgccgcactccgcttggaactccgcgaacggcagcaggcgctcgagagtgctctgcaggaatccagccagttctccgataaactggagggcatgctgcgtgctctggccaacaccgtggatcaggtcaatcaattagatcccctgtccgctcttccgcagaagatacgtgagcagatcgaggataatgatgctttgatggacgatctggacaagcgacaggatgccttcagtgctgtgcagcgtgcggccaacgatgttatcgctaaggctggcaacaaagctgatccagctgtgcgtgacattaaggccaagctggagaagctgaacaatctctggaacgatgtacagaatgccaccaagaagcgcggcagctcgttggacgacatcctaagcgtagccgaacccttctggaagcaactgaacagcgtaatgaagaccctaaaggatctagaggaaacactatcttgccaggagccaccagcggcccagcctcaggacattaagaaacaacaggtggcgctgcaggaaatccgccatgagatcgaccagaccaaaccagaggtcgagcaggtgcgacgtcacggaagcaacctgatgaacatgtgcggcgagcccgacaagccagaggtcaagaaacacatcgaggacttggacaacgcatgggacaacatcacggcgctgtatgccaagcgcgaggagaacctcatcgatgccatggagaaggccatggagttccacgagacactgcagaacctcctcaagttcttgaccaaggccgaggacaagtttgcccatctgggagctgtgggttcggacattgatgccgtcaagcgacagattgaacaactcaagtcgttcaaggatgaagtcgatccgcatatggttgaagtagaagcattaaacagacaagctgtggaactgacggaacgcacttcacccgagcaagcggcatcgattcgcgaacccctgtcggtggtcaatcgccgctgggaggccctactccgtggcatggtcgagcgccagaagcaactggagcacgctctgctgcacttgggtcaattccagcatgctctcaacgagctgctggtatggatcaacaagaccgacagcacactggaccaactgaagccgattcctggagatccgcaactgctagaggttgaattggccaagctaaaggtgctggccaacgacattcaggcccaccagaactcagtggacacactgaacgatgcgggccgacagttgattgaaaccgagaagggatctgtggaggcgtctactacccaggagaagctgcgcaaactgaacaacgagtggaagcagcttctgcaaaaggccagcgaccgtcagcatgaactggaggaggctctacgtgaagctcacggatatattgccgaggtccaggatattctgggatggctgggcgatgtagacgcagtgattggagctagcaagcctgtgggcggacttcccgagactgctactgagcaactggaacgtttcatggaggtgtacaacgagctggatgaaaacagacccaaggtggagacgattcaggcccagggccaggagtacatcaagcgtcagaaccaaatgaaggtctcgtccagcaacttacagcatacactccgcacgctgaagcaacgttgggatgccgtggtatcccgtgcatccgacaagaagattaagttggaaattgcactcaaggaagccaccgagttccatgacacactgcaagcctttgttgaatggctgacccaggccgaaaagctgttgtccaatgctgaacccgtctcacgcgttctggaaaccattcaggcccagatggaggagcacaaggtgctgcagaaggatgtgagcactcatcgcgaagccatgctgctgctggacaagaagggaactcaccttaagtacttcagccagaagcaggacgtgatcttgattaagaacctgctcgtgtcggtgcaacatcgttgggaacgagtggttagcaaggctgcggaacgcactcgtgctctggaccatggctacaaagaggctcgcgagttcaacgacgcctggagtggcatgatgcagtatctgcaggaaaccgaacaagtgctggatcaaattatcgaggaagccacagcgtccaaggaaccacaaaagatcaagaagtacattggcaagctgaaagagacgcatcgtcaactgggcgccaagcaatcggtctacgacggaaccatgcgcaccggaaagaatcttttggagcgagctcccaagggcgatcgccctgtgttggacaaaatgctgatcgaactgaaggaacaatggactcgagtgtggtccaagagcatcgatcgccagcgcaagctggaggaggctttgcttctttctggacagttcagcgatgctctgggtgagcttcttgactggttgaagaaggctaagagccgcctgaacgaaaatggaccagtccacggagatttggagacggttcaaggtctatgcgagcaccacaagcacattgagcaggatctgcagaagcgcgctgcgcaaatgcaaggagtgctcaagactggacgcgacctggagcgatctggaaacaatcccgaagttggacgtcagctcgatgagatgcagtccatttgggaggaggtcaagagtgccgtcgccaaacgcggcgagcgtctccaggtggcccttgttgatgccgagaagcttaatgcccgtgtccaggctctctttgattggctggatcatgccgagcacaagctacgatatgccaagaatgcccctgatgacgagaaggtgtcccgtgaaatgatggacatccacatggacttcatgaaggacctgcgagtgcgcgagcgtgaaaagaccgagacttttgagtacgccgaggacattatcaacaaggcctatcccgatgccattccgatcatcaagaactggctttcgattatccagcagcgttgggaggaggtgcgccaatgggccatcaatcgtgagtcgaagctggagcagcatctgcagtcgctcaaggatttggacgacaccattgaggagctgttggcttggctcagcggactcgagggcaccttgttgaacctgaagcacgaacagctgccggacgagattccacccgtggagaaattgatcgaggaccacaaggagttcatggaaaacactgctcgccgtcaaaacgaagtggaccgcgcatgcaaaccaagacagttgccaccaggagcgcgcaagccgtcgcgcagcggcaagacgccagtctttaagggatctcgtgaccagggactcaatgcccgcaagggaagtcgtatcacgcccacacgtgacacgcccgacagagatcgcctgccgcactatggcccccgattctcgccaagcacctcgggaccggaactggaattccgttcgccacgcgcgaagcttctgtggaccaagtggcgcgatgtctggatgctctcatgggagcgccagcggctgcttaacgatcatcttctgtatctgaaggatgtggagcgtgcccgcaacttcagctgggacgattggcgcaagcgcttcctcaagtacatgaaccacaagaagtcgcgcttgacggatctgttccggaaaatggataaggataacaatggcatgattccgcgcgatgtcttcatcgatggcatactcaatacgaaattcgatacatctggcttggaaatgaaggctgtagccgatttgttcgatcgcaatggcgaaggcctcatcgactggcaagagttcattgctgcccttcgtcccgattggcaagagcgtaagccagccaatgattcggacaaaatacacgatgaggtcaaacgtctggtcatgctgtgtacctgccgacagaagttccgtgtgttccaagttggcgagggcaagtacagatttggagactcccagaaactgcgcctcgttcgtatccttcgcagcactgttatggtgcgcgtgggtggcggttgggttgccctggatgaattcctgcagaagaacgatccttgtcgcgccgacgaacacttggccgaactaatgccaatatttgagaaaatccgcgctcaagaccaggttccatgcgcctttcccattcacatgggtgccggcggcacggtattcgtccgttgcaataccagccgttcggtgccgctgagtccacacgtgctgcattgtcatccaacaacacactgggtacgcgagcgctccgtccgctcgattcccatgtcacgaccgtcgcgctcctcactttcggccagcactcccgactccctgagcgacaacgagggtagccatggaggaccttccggccggtacacaccacgcaaggtcacctacacgagcacgcgcacgggtctcacgccaggaggctctcgtgccggctccaagcccaactcgcgcccgctcagcagacagggatcaaagccgccatcgcgacatggctccacgctgtcgctagatagcacggacgatcacacgccctcacgcattccgcaacgcaagccttcaacgggcagcacagccagcggtaccactccgcgtccggcgcgactttcggtgaccaccaccacgactcccggcagtcgtctcaatggcaccagcaccattacccgcaaaaccgcctccggatcggctagtccggcgcccacaagcaacggaggcatgagtagatcatccagtataccagcactaacaggcttcggcttcaaaccaattaggcgaaacatcagcggtagctcaacgccctccgggatgcaaacgccgcgaaagagctcagcggagcccacattcagctccacaatgagacgcacttcgcggggaaccacaccgacggagaagcgtgagccattccggctataggaagccaccgttatggctgaggacgacgacgatagagaagcaaaagaatgccaatatttaaaccacatacaaaacactcaactctacgtactaactacgcactgaagttctaaactaaaccccccaaaaaccactccccaaactaatcgaggctacattagcaatgaatgtagcagcaggaacagcacacagttctacaaaagagactaactttgaagtgccctaatggattggtggagcgaaacaatttatagatgtttatactatatatattttgtaaaagacacagttaagatgaaagttatgcagacatatagctagcacacaaagttgatcagacaagcaacctacttacgagtactactactactaatactaccttttgctactactaatttgtaatgcccactacctttattcactagttatacacgtttccaaaattatgatttgtatatacttataaagcgaaaagcaagcgtaaattaatgaaaaatacactccaagtgctctacggcaattaaacaaacaaaaacaaaaaaaatacaaacaaaaacacataaaaaatatcgaaaaacttaagtgaaaaaaataaaacattcgaatgaaatgccgcggtctctgctgcaaaccatcttgagtctcagttctccactggaatcgccagtccggtggaattctagccaggagtggcacgtggcagaggcggaacggccaaaaaaataataactaaacccgttaaagagataaaatttgattttgttctgttattaaactaataggaaagtgaaaattgtaagccgcataaagaaaatatttaattatatactaaaagtcattactataagtttaattaatatttaactgttaagcgacaaacacacacacacacacagattttgtattgcataattattatgttttttatatgcaatatatcagcgaatgaattacgatgcagatgcagaagggcgaaagaaatcgaacccgtttctataaatactgtaaaatactaatactaaattattttgttgtacgaaacgaaagaaatgcattaaaactcgtgttttgtaattctatttaattaaaacaattcaaatgcgaaataaacatttacaaaaaaaaaaaa

SEQ ID NO: 28104 - protein, 3854 aa, DROSOPHILA
MCEENVNDLLKWVTTVEQKISSVGGPREKIDELRNQINALKQIKDEIESQQRPVATCLEQIRQIVLTGGDVLSAPEVTTLENSGRELRSRVDRVNDRTVRLLRRLEAGRDELTKLRSELDVFSDWLQVARRTLEDKERSLSDLTRLPSQADSVREFVSDVIGHQADLRFITMAAQKFVDESKEFLAILNDFRTSLPERLPHVEPLSSAESPIRQEVSLVSAQYKDLLNRVNALQDRVSGLGGRQREYQDALDKANEWLRSVHPRVSRIISEPIAGDPKGVQDQMNEAKALHNELLSSGRLVDNAQQALDNLLRSLGGQLSPMEINQLELPIADLKNNYQQLLDNLGEHCKTLDKTLVQSQGVQDALDSLVGWVNQAEDKFKMNLRPASLIKERLQEQIREHKVLLADLQSHQASIDSVQVSAKHLLASASNARIAKKVESNLNDVTVKFEKLYEKANKRGEFLDDVYNRLSRYLDEISTVEQRMASLQEALDSRETSLLSTEELARRMNELSRDKDQLAPQFEDCVRSGKDLISLRDVTDTGVLRDRIKALESQWRNINISIDERAKLSKQKAEQQLAYEGLKDQVLSWLASTEARVNGLPPVAIDLDRIKQQHDELKPICKDYRDYAPTIDKINDIGAQYDALIRPESPARKRSTYSPIKRTSPLRRMSGDARSPSPTKGGILSPLSTGSSGFGSRRSSQDGFQLSELSPVQQQLSEINNRYGLIGVRLNDRQHELDNLNEELRKQYENLKGLAQFLERIQRQLPKESVSNKDEAERCIKQARKILEDMYEKQSLLDTTKAQVKDILRRKSDVPGAEQLRQENDSIQEKWKNLNDICKNRIAFSEKLRDFLDTHGNLKSWLDSKERMLTVLGPISSDPRMVQSQVQQVQVLREEFRTQQPQLKHFQELGHDVVDHLAGTPDAQAVEIKLKDILGKWDDLVGKLDDRANSLGGAADSSKEFDAAVNRLREALQNISDNLDTLPTDGDHQENLRKIENLERQLEGQRPLLADVEQSAATLCNILGDPASRADVNSRVAALEKQYLALQKKLDTKKAETEASLRDGRHFAENCSKTLGWLGGELSNLTDRLLVSAHKPTLQHQIDTHEPIYREVMAREHEVIMLINKGKDLTDRQQDRGVKRDLDRIQQQWEKLRREAVDRHTRLQTCMEHCKKYSQTSETFLAWLRTAEDKLADLTPGVLSKAKLETRLRDLQTFRSEVWKHSGEFENTKGLGETFLSSCDIDKEPIKAELQDIRDRWERLNNDLIARAHEIENCSRRLDDFNDELRNLDHSLGRCEDRLAAHDALGGAAKDPKLLERVKAIREELTNLSKPLQSLKALAKDISAEARAAGGDADHLTSEVDGLADRMSELQGRLDDRCGELQSAATAVSQFNEQMKSLGIDLNDLETEIEKLSPPGREIKIVQVQIDDVGKIQTKLDRLVGRLEDAERAADVLVDAGFAADTTQTREQISTLRKTLGRLDNRVRDHEDNLHSTLKALREFYDHQSQTLDDIQDVSDEFKRMKPVGSELDQIRRQQEDFRNFRERKVEPLAINVDKVNVAGRDLVRSAGSGVSTTAIEKDLEKLNDRWNDLKERMNERDRRLDVALLQSGKFQEALAGLSKWLSDTEEMVANQKPPSSDYKVVKAQLQEQKFLKKMLLDRQNSMGSLANLGKEVANHCEPGERASIEKQLNDLMKRFDALTDGAEQRELDLEEAMEVAKRFHDKISPLELWLDNTERSVKAMELIPTDEEKIQQRIREHDRLHDEILGKKPDFSDLADVTAQLMHLVSDEEAVNLGEKVRGVTERYTGLVDASDNIGALLAESRQGLRHLVLSYQDLVAWMESMEAELKRFKSVPVYAEKLLEQMDHLLELNENIAGHASNVESTVESGAELMKHISNDEAIQLKDKLDSLQRRYGDLTNRGGDLLKSAQNALPLVQQFHEAHNRLVEWMQSAEAALAPSEPRQADVLRLEGELADMRPILDSINQVGPQLCQLSPGEGAATIESIVTRDNRRFDSIVEQIQRKAERLHLSNQRAKEVTGDIDELLEWFREMDTTLREADLPAMEPKLVRAQLQEHRSINDDISSQKGRVRDVTAASKKVLRESPQSENTATLREKLDDLKEIVDTVAQLCSERLGILEQALPLSEHFADSHQGLTAWLDDMEQQISRLSMPALRPDQITLQQDKNERLLQSIAEHKPLLDKLNKTGEALGALVADDDGAKINEILDTDNARYAALRLELRERQQALESALQESSQFSDKLEGMLRALANTVDQVNQLDPLSALPQKIREQIEDNDALMDDLDKRQDAFSAVQRAANDVIAKAGNKADPAVRDIKAKLEKLNNLWNDVQNATKKRGSSLDDILSVAEPFWKQLNSVMKTLKDLEETLSCQEPPAAQPQDIKKQQVALQEIRHEIDQTKPEVEQVRRHGSNLMNMCGEPDKPEVKKHIEDLDNAWDNITALYAKREENLIDAMEKAMEFHETLQNLLKFLTKAEDKFAHLGAVGSDIDAVKRQIEQLKSFKDEVDPHMVEVEALNRQAVELTERTSPEQAASIREPLSVVNRRWEALLRGMVERQKQLEHALLHLGQFQHALNELLVWINKTDSTLDQLKPIPGDPQLLEVELAKLKVLANDIQAHQNSVDTLNDAGRQLIETEKGSVEASTTQEKLRKLNNEWKQLLQKASDRQHELEEALREAHGYIAEVQDILGWLGDVDAVIGASKPVGGLPETATEQLERFMEVYNELDENRPKVETIQAQGQEYIKRQNQMKVSSSNLQHTLRTLKQRWDAVVSRASDKKIKLEIALKEATEFHDTLQAFVEWLTQAEKLLSNAEPVSRVLETIQAQMEEHKVLQKDVSTHREAMLLLDKKGTHLKYFSQKQDVILIKNLLVSVQHRWERVVSKAAERTRALDHGYKEAREFNDAWSGMMQYLQETEQVLDQIIEEATASKEPQKIKKYIGKLKETHRQLGAKQSVYDGTMRTGKNLLERAPKGDRPVLDKMLIELKEQWTRVWSKSIDRQRKLEEALLLSGQFSDALGELLDWLKKAKSRLNENGPVHGDLETVQGLCEHHKHIEQDLQKRAAQMQGVLKTGRDLERSGNNPEVGRQLDEMQSIWEEVKSAVAKRGERLQVALVDAEKLNARVQALFDWLDHAEHKLRYAKNAPDDEKVSREMMDIHMDFMKDLRVREREKTETFEYAEDIINKAYPDAIPIIKNWLSIIQQRWEEVRQWAINRESKLEQHLQSLKDLDDTIEELLAWLSGLEGTLLNLKHEQLPDEIPPVEKLIEDHKEFMENTARRQNEVDRACKPRQLPPGARKPSRSGKTPVFKGSRDQGLNARKGSRITPTRDTPDRDRLPHYGPRFSPSTSGPELEFRSPRAKLLWTKWRDVWMLSWERQRLLNDHLLYLKDVERARNFSWDDWRKRFLKYMNHKKSRLTDLFRKMDKDNNGMIPRDVFIDGILNTKFDTSGLEMKAVADLFDRNGEGLIDWQEFIAALRPDWQERKPANDSDKIHDEVKRLVMLCTCRQKFRVFQVGEGKYRFGDSQKLRLVRILRSTVMVRVGGGWVALDEFLQKNDPCRADEHLAELMPIFEKIRAQDQVPCAFPIHMGAGGTVFVRCNTSRSVPLSPHVLHCHPTTHWVRERSVRSIPMSRPSRSSLSASTPDSLSDNEGSHGGPSGRYTPRKVTYTSTRTGLTPGGSRAGSKPNSRPLSRQGSKPPSRHGSTLSLDSTDDHTPSRIPQRKPSTGSTASGTTPRPARLSVTTTTTPGSRLNGTSTITRKTASGSASPAPTSNGGMSRSSSIPALTGFGFKPIRRNISGSSTPSGMQTPRKSSAEPTFSSTMRRTSRGTTPTEKREPFRL

SEQ ID NO: 28105 - DNA, 3270 bp, DROSOPHILA
tccataggataactcccactgttcctgtaacaaggaaggcgtcacgaccaaatcctcttcaggagaacggggagtgcgtggttccccaactgccaaacgttatggttaagcacttcacagatgcaatcctcactgtaggatcaagggtagccaatggcacccgtatctactacgactgcccggcggagcacagactgaaaggcgagaaccagaacatttgccaggacgcattgtgggctaggaagtttccttactgtgaaagtaagttgtgtatttatcaaaagtttcttcattaatactaatttatttacttttagcaccccaagcgtatgttttcagcttggttatagtaatattctgcttcctaatcgtggtattggtgtttctaatttggcgggtgcgtcgagaaaatggctcaagaaggcaacgagaggagcacatttggctggtggagaccagcagtaatcttccccagacatcttcaataccaaaggtctaggaattaatttttacaaagctaaacatgtgatcacgcatacttacttatttaccagccaagttgttgataaaaagtactgttaatttcaaactatctaggcttatcttatgtaaataatgttatttcaagttctccataaaaattaaaagcttaaatacgaatgtatatttatttttagagtaaaacgtgagaagtagtattatattgtaaatatattaaaacagatttaagaacataataattgtgttattaggttgcacattttaatttcggctgttaacaatacttttgcgttaacagctgtaatgctagaaccacttgttgctgcgacccaaactgtgactgaaacagtgactggaaatagtggcatttctggtgggagcgaacgcggtcacacctgccccactagtgcgccaatattgctccagtgcttcgcagcgtaagtatcccaagttctagagtggctccatgccagataccgccacagattagataacgaattgcacttgcagccggctcagagttccttcaattgaaaatggccaacattgctaagatcttcgctagccgcgcccagtgcgtcctgcaggcagccgcccgtcagccacaggtggccacccgtttcagcagctcctgtaagtagatggttgattgcgagggatcaaagtccacgcgattgatgcccagctccaacctaagccggaatatcaagatatcaagtgccgccggtttcttggcgacatcttttgtacttttccaggcaaataaacattgattgcgtaacattcgcgcacatacgatcacctcatttatgatgccatctcttttcagccaccaacaacaactgggagtacatcaagaccgaagtggccggcgagggcaagaacgtaggcgtgatcaccctgaaccgccccaaggccctgaatgccctctgcaatggcctgatgaaggagctgtccaccgcattgcagcaattcagcaaggataagaccatctccgccatcgttttgacgggcagcgagaaggccttcgccgctggcgctgatattaaggagatggtgggcaacacctactcgcagtgcatccagggcaacttcttgaacgactggacagaggtggcccgcacccagaagcccatcattgctgccgtgaatggttacgccttgggcggtggctgtgagctggccatgatgtgcgacatcatatatgccggtgacaaggccaagtttggtcagcctgaaattgccctgggcaccattcccggtgccggtggcacccagcgtctgacccgcgtcgttggcaagtccaaggccatggaaatgtgcctcaccggcaatatgatcggcgcccaggaggctgagaagctgggtctggccagcaaggtggtgcccgccgaccagttattgggcgaggccgtcaagctgggcgagaagatcggcacccactccaatctgatcgtgcagctgtgcaaggaggcggttaacacggcttacgagaccactctccaagagggcctgaagttcgagcgtcgcaccttccatgccacgttctccacggttagttcaagtttaaatatctgcttaacactatttaatctcttgtattttctttcatccaataggccgatcgcaaggagggcatgaccgctttcgccgagaagcgccctgccaagtttaccaacgagtaaatactaccctaatcaatcccagccagctttgcatttatattatctaaaagaaaaactgttgtttctacgcaattaaaactttaatcgtgataatttgaaaatgaacaatttaccataatttgtcattagtatatgaggtatgctagtccgcatgtcaggtggtaatccattagtataaacatggtatggccacttgacagtcggcttgctagcccgattatcctcctatttctaatcgaaacaaaataagtgcttaggtgacttccatggttgtgtcttgttgctttcgagtttggaaggcatgttttttggaaaattgtgcgctgtgtagcgttgccttcgtgaagaatattcaatctcatggaaatctatacctccccgtatccttctcgagccatgtggatttttatagtgcctggaggcatcggagtcatcgcaacaacgagctaaatgtcgataatttcgtgaccgtgagtagttcttatccctgtgcatgggacaatgttctgtaaatcggaaacgattcccctttggttcaatcacacagggatcacttagttcggtggtaaactcgtagtttcgatatgtaaccaatcctcgacgtatgcccggattttgtgactcagttggccgtgaggtgagcaagtaatctgtgcacggcctgcatttctctacatgcctcttagcccgctttttgcgctcccgatgttcctcccactcccgctgggcacgggataccaaaggctgaggaacttgacagggagctgtctggcgtgtatcatttgagtggcagctccaatgactgcaactatccgaggaacaacttctgttacgtagtggggatttctttgcttgcgacttctgataattcctgcctcttggtggccgcctggaacaggatggttgcccaaaggaggagttggtactcctgtacgtaacgatttctgagcccgatgtgtgcgtatttcgtatcgaattgcctcttttctttatagttgtagaccataacttgggatctcttggtccgcgtatatccaggatactgtcctgatccctgaaggagattttcctgtccaaaggattc

SEQ ID NO: 28106 - DNA, 1009 bp, DROSOPHILA
tgcacttgcagccggctcagagttccttcaattgaaaatggccaacattgctaagatcttcgctagccgcgcccagtgcgtcctgcaggcagccgcccgtcagccacaggtggccacccgtttcagcagctcctccaccaacaacaactgggagtacatcaagaccgaagtggccggcgagggcaagaacgtaggcgtgatcaccctgaaccgccccaaggccctgaatgccctctgcaatggcctgatgaaggagctgtccaccgcattgcagcaattcagcaaggataagaccatctccgccatcgttttgacgggcagcgagaaggccttcgccgctggcgctgatattaaggagatggtgggcaacacctactcgcagtgcatccagggcaacttcttgaacgactggacagaggtggcccgcacccagaagcccatcattgctgccgtgaatggttacgccttgggcggtggctgtgagctggccatgatgtgcgacatcatatatgccggtgacaaggccaagtttggtcagcctgaaattgccctgggcaccattcccggtgccggtggcacccagcgtctgacccgcgtcgttggcaagtccaaggccatggaaatgtgcctcaccggcaatatgatcggcgcccaggaggctgagaagctgggtctggccagcaaggtggtgcccgccgaccagttattgggcgaggccgtcaagctgggcgagaagatcggcacccactccaatctgatcgtgcagctgtgcaaggaggcggttaacacggcttacgagaccactctccaagagggcctgaagttcgagcgtcgcaccttccatgccacgttctccacggccgatcgcaaggagggcatgaccgctttcgccgagaagcgccctgccaagtttaccaacgagtaaatactaccctaatcaatcccagccagctttgcatttatattatctaaaagaaaaactgttgtttctacgcaattaaaactttaa

SEQ ID NO: 28107 - protein, 295 aa, DROSOPHILA; identical to SEQ ID NO: 14199

SEQ ID NO: 28108 - DNA, 3966 bp, DROSOPHILA
tcaactgataaccacgacgagtatatcagctaccagccatatatgtacgatgatcggaggtttaattaggcgcggctgtaacatgaacattcataattccgctggcattcaatcaatgcagacgtgaacaattccagtagtgaccgagtgttcgacttagccagcgatctcgtgcaaagtgtacagtgtctcaatcgtagtcaataccaattctcaaccaagaaaatcgatactcaaaacatacgtagaaatagaagttactaaaatccaagcatatgatggcgcaaagtgattctggaaattgctgtgccaagcttaataaaggtaagaattcataaatatttaatagtgattgtgcacagttaaatctgcaatctgcaacagatgagtgctgccagaagacaaaggatgtgatcttgagcggcgtatctcccaaaatgtttcccgacaaaatctacaagtctgttcaacccaaaggagaggatgccaccggaatgacctgcgaatgcggtgtttttgcagccatcgcttgcggggattacccaacacaagtaagaacaaaatatttttttttttaatgtaatatgtaatataggacagataggacatatagtatagaaaaacacaaaggtaaaaatttgggtttaagaaaaaatgtttaaagcaaaattaaacttaaatataatacttggaaaattccggaaaaatatgtgtagcagattacaatcaattgttaatatataataaatattactaggacatagtagatagccaccatgaaatgccgatcataactatatcaatatctcgaagtcattggggctgtcacaagcccatcatcacccgtttagcaagatcctatggacgaccatgtagtacgtcagacgtatgccaatcaatggttagtgggtcaatggttagccccgttcagatacaccccctgctgatcttctaacgatgtccatctatctgtggccaatgcccagtggctgcggtgacgtcagtgagatcgaactgaatcgcatggatttggtttgccgtgcggttgtaatctctgttgttcatgtttttattgctcgactgtaatgaaatggaaaataacagaaagtactggtgtattcacggtcggaaatcggcatacagttatctgttttgctagtcaactgattggaattagcattactaaactatcttatatgttgggctaggtatgcagaaaaaaaagtattaagttgctttgatctgatgtgatttgattcaagaaaatgctgaataactaagcttaaaataacaattcttaatactgagtttggaaaatgatacgccatatcgatgcacagcaccccctggtctttattattcaatattcacgtttattattatattgtaaaaaaaataaggaaaataaagtactaaatgggatttttctgctttcagctggacatagcacagatgatctgcctcggtctggtggctctgcagcatcgtggccaggagtcggcgggaatagtgaccagtttgggcaagtcctccaagaatttcagcgtacacaagggcatgggcatgatcaacaatctgttcaatgacgaggcgatcaggaagttaaagggtaacctgggaataggacacacccggtattccacggccgcagcctcggaagttgtgaactgccagccgtttgtggtgcacactgcccatggagcactggccattgcccacaatggtgagctagtgaactgcgagtccctgaggagggaggtcctggagcgaggagtgggcctgtctacgcacagtgacagtgaacttattgcccaatccctgtgctgtgcaccagaggatgtgtcggagcacgatggacccaattggccggccagaattcgccatttcatgaccctggctccactctcctactccctggtcgtgatgcacaaggataagatctacgctgtccgcgattcctatggcaatagaccgctgtgcttgggaaaaatcgtgcccgttgatgcaggacatgcgaatatcaatgaccaactggccgagggttgggtggtcagtagtgaaagctgcggattcctctccatcggagccagatatgttcgcgaggtggagcccggtgagatcatcgagctgtcacgaaatggttatagaaccgtggatatcgttgaaagaccggactataagcgcatggcattctgcatctttgagtacgtctactttgcccgcagtgattccatgttcgagggtcagatggtttactcagcccgcctgcaatgtggtcgccagttggccagggaatcgccattagatgcggatttggtcagctcggttccggaatcgggcacagcagctgcccatggttatgccagggagtcgggactgccattcggggaagttctctgcaagaatcgctatgtgggccgcacgttcatccaaccctcgacgagattgcgacagttgggcgtggccaaaaagtttggtgccctggctcaaaatgtcgagggcaagcggatcgtgctagtcgatgactccatagtgaggggaaataccattggaccgattatcaaactcctgcgagatgccggcgccaccgaggtgcacattcgcattgccagtcctccgctgcaatatccctgctacatgggtatcaatatacccactcgtgaggagctaatagccaacaaattgaatgcggatcagctggcggatcacgtgggtgcggatagtctggcctatttgagtgtggagggtctggtcaaggccgtccagatgaacaaggcccatgtgaatccactcaaagctggctactgcaccgcttgcctaacgggcgagtatcctggcggattgccggaggagctcagctggtagaatctctcagcaattattaatttcataggattaaggtagttcttagcttcagcttgtatataaataaatatatttaaaatttcgggtctttgacctatcacaaaaaatgttgtttttaattaagcaatatagaggtttttgtttcgagataaggaataataagtaggacatatatttgaacgcttcaaacattctggaaaataacaaacacaagcagttacatatattatatataaaatacatatatatattaaaatatcttaaagaagacataattttaacatttttttgttaccacctttaacttatttactagttataaccatttaaaatttttttatttatttcctcactttatttgactttctcgcaggcaaggaacacatactctaaatgctaatgggccacatcaacgtctgattattttcaaaactgtctaatgccataacttcaattcatttcaatttatatttccaagctctgtgtgccgagggattcaggggcagtggaggaagtagagtcgcccgcttccggttatagccgcgctcagatatagccccatatcatacaatatggtaatcgtgtttgcttttttcgccccgtctctttccggctatgtcctgccgcccacccacatccttgtgttccgctctctttcttgcggagtctccccagttggggcgttgcaatgtctaaagcggggcgttaagggcgtttaatcctgcggaagatgtccttgcggttatgcagaggggtatccgtatcctctctcatcgtatacaacttttttctttctttctttcttttatgactcgcgccgggtactggagtcaacaatgtcatcattattcttgaatattgtgttgtattttcgcaaacaatttcgctaagctgcgcggcattggcaaagccggaatgggggtgggggtgaaaaatttgggggtgggaatgggtctgggtgggaaagtgggagtgggtttccctacgctgaagtgtggcgaggacataagagaagaaaataatactgcactgtcattgtaactcgcttgattaattcttgtgaagggtatatactgcaagcagttcaggttttggcaaatg

SEQ ID NO: 28109 - DNA, 1737 bp, DROSOPHILA
tcagtgagatcgaactgaatcgcatggatttggtttgccgtgcggttgtaatctctgttgttcatgtttttattgctcgactgtaatgaaatggaaaataacagaaagtactggtgtattcacggtcggaaatcggcatacagttatctgttttgctagtcaactgattggaattagcattactaaactatcttatatgttgggctagctggacatagcacagatgatctgcctcggtctggtggctctgcagcatcgtggccaggagtcggcgggaatagtgaccagtttgggcaagtcctccaagaatttcagcgtacacaagggcatgggcatgatcaacaatctgttcaatgacgaggcgatcaggaagttaaagggtaacctgggaataggacacacccggtattccacggccgcagcctcggaagttgtgaactgccagccgtttgtggtgcacactgcccatggagcactggccattgcccacaatggtgagctagtgaactgcgagtccctgaggagggaggtcctggagcgaggagtgggcctgtctacgcacagtgacagtgaacttattgcccaatccctgtgctgtgcaccagaggatgtgtcggagcacgatggacccaattggccggccagaattcgccatttcatgaccctggctccactctcctactccctggtcgtgatgcacaaggataagatctacgctgtccgcgattcctatggcaatagaccgctgtgcttgggaaaaatcgtgcccgttgatgcaggacatgcgaatatcaatgaccaactggccgagggttgggtggtcagtagtgaaagctgcggattcctctccatcggagccagatatgttcgcgaggtggagcccggtgagatcatcgagctgtcacgaaatggttatagaaccgtggatatcgttgaaagaccggactataagcgcatggcattctgcatctttgagtacgtctactttgcccgcagtgattccatgttcgagggtcagatggtttactcagcccgcctgcaatgtggtcgccagttggccagggaatcgccattagatgcggatttggtcagctcggttccggaatcgggcacagcagctgcccatggttatgccagggagtcgggactgccattcggggaagttctctgcaagaatcgctatgtgggccgcacgttcatccaaccctcgacgagattgcgacagttgggcgtggccaaaaagtttggtgccctggctcaaaatgtcgagggcaagcggatcgtgctagtcgatgactccatagtgaggggaaataccattggaccgattatcaaactcctgcgagatgccggcgccaccgaggtgcacattcgcattgccagtcctccgctgcaatatccctgctacatgggtatcaatatacccactcgtgaggagctaatagccaacaaattgaatgcggatcagctggcggatcacgtgggtgcggatagtctggcctatttgagtgtggagggtctggtcaaggccgtccagatgaacaaggcccatgtgaatccactcaaagctggctactgcaccgcttgcctaacgggcgagtatcctggcggattgccggaggagctcagctggtagaatctctcagcaattattaatttcataggattaaggtagttcttagcttcagcttgtatataaataaatatatttaaaatttcgggtctttgacctatcac

SEQ ID NO: 28110 - protein, 470 aa, DROSOPHILA; identical to SEQ ID NO: 21378

SEQ ID NO: 28111 - DNA, 9873 bp, DROSOPHILA
ctgaaacacgaacacgaaacagaaacaagagcacaaagagcccaaggatcagtagaaggaccaggaccaaaacgccatcaacgtcatgcccgacatcatcgtcctcatcattgtacagtggagtcaaaggaatagaaagttatgttcaatcgtggaatctgaataaggaaattttagcctaaaacatatccaaattaagtgaaagattacgttaagaaaataccctaaaagttgtcctttaagtcgttataaaaaaattgttgcattatatttttcaactttataaaatgcgaaaatgttttaatgtttactcaactcattgcaatctgtttttagtgtctttaattttctattggttccgaaccactgtccctggggcacaaagatgtggcacattattgactcacgcgccgcatcgaatttccaactcaatcatggacagaaaagttgatggcagaaaaagggaaagtgggtggatagatggttggttggttggttgaatggttggttggatggatggatggatggaaaggggaaggggaaggggaaatggtaaatgcgaaatgggaagtttcgcctgctttatgactggcaactcacgcgacgccactcgccatcgtttacggtatttgcattttaattgaattgaactaaattattttgtttagagttgaaggaattgccagccattgaaagccccaaagtaggcaacagttttgcgagaatgtaaaagccacaagccgctaaaaacttgagtgaaactttgacataagactctcgccgcaggaagaaagcaagattgtcagcgaaaacttttctatttgatgggaacagggggtctatacaccgcggctgattggtggatagaatcttatccaaactaaaatcccaagtgccacctagaaattaagagttaagtcgcctcaaaagtgagaagaagcacaaagttggaaataaaagaatgttcttttacgtaggcagctgttcggcaaatctttaaatgatgttgattgccagtgggtaacttagttgcttcacaaatctaaagaacttgctttatatgaaattaattggaagttgtcaggatatatttaatatacattgcaataacccattgcagatgagttctgcgaggagtatccgcacaatctgatgcccactcccggctactggatcgaatgctcccgccagaagatcactatgcccaccccgcacaccatttgggacgagagcgactcggagcacgaggacattcgggcaggaagtgccagcgatgcctatttggagcgcgagtgcagcgatctgtacgaggatgatgaggactctgaggctacgcccaggtgagttccagaagctacttccaaaaaaatagattgctaatcctcccattcccaaatccctgcagtccgcgcaaaaagaccaccatcgaggagcagtgggaccagcagggcgcattcgaactgatctctgtggaacaggagacgtacgagaagtacttctatggcaccgagcactggaactacttcaccagcgatgaggacctgggtccggtcatcctgtccatcaagcaggagacgctcaacggacgggatcagttccgcatcctagtacgggctggttcctacacggtgcacggactgataccggcgtcctgtgtgttcgcagataggtaatatgttccataaataaccgaatgatatatttaaatcgatcaattacttcaaatttatagatataatcgcgaggaggtagttagatctttaggtaaagaagttaatttaaatccacctttaacgttaggacaattacccgatacgccagaggaattattaaaattagatcaggtgcgcctcaatctcatataatatcatataattataataatataacttatatataattttgataggtttttataaaatcagagttaaaagttggcgtcatatttgtcaaagaggatcagtataccgaagagcaaattctggacaataatgaaaattcaccgctcttcgacgaattcctcactcttctgggcgatcgagttcgtctgcgcggatttgataaatacaaaggtggccttgatacggtgcacgacctgacaggtgggcttatacccaatgggatgggatggcactttgtgcatattattgaaacccccaattcttcttgaaggtctcttctccgtctatacgaactggcgcaacatcgagatcatgttccatgtgtccacgttgctgccgtacgagaagcacgatccgcagaagcttcagaggaagcgtcacatcggcaacgatatcgtctgcgtggtattcttggaggcggataacacacgcttcagtcccgcctgcatcaagagccatttcctgcacaccttcatcctggtgagtaccaaaaggatacagcgatactgatttgcttcataccttaggacatctaagcaagtggttttaattgaaatgtactcactagcttaccgtgtatttcctcttttcaaggttcgcgtttcggccaggattaaacacaagcccacgcgatacgaggtgtccgtggtgacgcgtgacgaggtgggcgcctacaagccctatttgtgggagcagtccgtcttcgagaaggggccgatgttccggtaagtttcaaactggcaatgctgtaaaaaaaatcctccaacctcagacaaaaaataacacaaatcccccctaaaaacttgaatatccatagggaatggctgctgaccaagatcgtgaatggagagagagcctcctattcggcaccgaaattcgcgcggatgcaggagcgtacgcgatcgcagatgctcgaggatctggtgatgaatctatcgaatcatgcggaaactggacagataccgaagccatatagacgcggcagttggcgaccgatcggtgaggatgaatatatcaaaatgttgcatgcccgtgtcctagacaacaacacacaccacgagcagcagcagcagttgctgctgcagcagcaacacatgcagcacacgcagcacatgcaacacttgccgtcgcacaacatttgctgctattgcaacaacaatgccactgagctgcacacagcgggtgcaatacacaacaataatgacaacaacaacaccaccaccaccaccacattcacacacagacacaacaacaacaacaataattactctgagcagcagcaacaacaactgccacaacagcagcaacatgacagccaacagcaacaacaattgctgcagccacaacaacaccaactgctacaccaactgcaattgtcgacgtcgtcactcacacacacgtcgtgctgtgccatgttgcacctgtgtgcgaggcatagtatgtgtgacacgcccccacgcccccgaacacacccctttttgcagccgccgcccccactttctttcgacccgcatgtttttttttgcctgactttgataaattacttttcaatatttacaatttccttggcttccgaaaaataaaaacaaacaaatgagatatgcagattattttaaaccaacttgagagagtttttgggaattttcattttatgcaggctatgaaacccgattaaatgcttttaaaagaactaaataatgcacttagtagtagacttaaaaatatttgcagcttgagtaatagacgttcatatcatgcaatgtacatatgaaatcaatcagattggaaacctaaattttaaattttattcaatttcaaaacagatacgtaatttacaacgaattaaatcagtagtagaaaataaatcttctgctactttcgaacattttctgtcaaatgtcttaaagcgaatcgcctagatttctggtcggctttaagaagatttataaacaaatcgcgagaacaaattgcaggcattactggcagcccaaggagaaaaattgaaaatagaaaaaaaaggacatttgcatttggtcctttgtgacacggtttctgtgcgagtatgtttgattaatcgttttgtcttggtttcggttgaactttcgcccgcgaaaagggggcagttggtgggaaaaggggaaggccgggagggtgggtggtagagagagggaggaaggagcgagagaaacacacactgacacttccgtttccgccattaacacatccggctgtgtttgtgcccaccggaagcgtgcagtcgttgctcgaagcaatctcagtgctatctccctctccctctcgctctctccctctctctctctggcccccaaacattgtcttcccttcggctcctttcgctctcctcctcatctgttctgaactttaaccccccgacatggacaatctgctcgtcccttatctacgctcaccgacacttgtccggcaaagaaatattgttcatgtttgtgttattttatcagtggggatatctattgttccagccacccatcaccgcccattaccacccaccagcagacaccacccacccaaggatgttgttcgtgttgttgatgttgttctcattgttgttgttgttgttgttgttgttgtggtggtgtgtcgttgctgttgctgtttgttgtgattttgtttggatttcttgttatttatttgttgctatttgttgcactagacaacacaaatctaatttgatttattcatgcacacccacacacccacacacacacgcacagagtaccccaccaacactcacaaccaagcgcacacacactgagaaaatgcggaagtgatccccaatggaaactatccgtattgaaattatgcaaattactgctccaatagtttggcatttccatctcaatgcgattggggaactgcataaatttcggcgcacacacactaacatacacatgtacatacatacatacacagctgggatctgaataatagaaatgggaaagcagacagctttaaaaagatatattaaaaaataaataggtgattctattgaagccaaatccatttgtaactatttgagtgtgaatgcctatggcaagcaatttcataaattcaactagaaacgtaatcaaacagcccccataacaaaatgtgtgtttcggaggttgcaaagtaaatgaatctccaggaatatgtatgtcaaaaactgacaaggctatttctttttcttgcataacgttttaatataataaaatccatatttctaggcttacaactgaagaagcatgttggttgcatgagttttaacttttaaatacactttttttcagcgaatatacatatatatcccagtgtttcaatcaacaggaaaatagttgaatatttacttattaaaacgaaaaattattttaatttctcgcaggtcacatgcgaccctcgtcaccgctgctggattccgttcgcgatcaattcgaggactacgatcagttggccaaggactttacccgcgtatttctaaacgaagaaccatcgtgcctgaccaacgcccatctcttcgatgtcgtattcctggtgggtcagtccaagcaaaaggctcgatttattggagttcgagctattctcggagtacggagtcgagtctttcaggtgagtttcaaagaatgcaggataatttgttcgcctggaggtaaattagacaaatgagtgaaaaaaaaaacatgggcaacagtgcgtatgagtgatgagcatagacaacagtgcgtatgagtaatgagcatacacaacggggcgtatgagtgatatatgtagacatcagtgcgtatgagtaataatatgtaataaaattcatattacacatacgcactgtgggctctattttacagctcatttgccatacgaaacgtttatgcttgactactattatttattgttatcattccggattattgcaataatatttattttttttttttttaggaaatgctctatggcattcagaccggcttcggatcgccgcagattccggttgcggaaatctttgcgcgaccagctccatcgctggtctccccgcaaaaccagaaaccgaagagcaacaactatctgaccgttcccgattccgattcgatacgaccgaaaagtgtgccctcgtcgccgatggtgaagagggccttctcccgactgggaaccattacggccggatggggtcggtccatacggaacaagaacaccaaccaactgaatccggatgacaagaagaagtggatatcgtcgacagattgttcgagtaagggttttcattcggtgcaatgcaaccatatcgatgcgtgttcttttctctccgctctcttttgttctcttctctcctctctctcctgtgcgacttgtgttgatttttcgcatttccacgtccaccgtctgcgtccttgcgtccttaaaaataaaaactttaacttttgcatccttaaaaatgtcgataaaaaataaaacaaacatccaaatacccgcaactcaaaaaacgcacgccgcacatttttgcctcaacctaaaactaaaaactgcgtactcgtactctatataaccatcacacgatctcaactgacttatatatatatatacatatatgaatatctatatgttccgaacctttataaatacacccgatcgaatgtcttgtatcgaccgaccaccaaacctcattgatgtcctttgttaccctttgatttatcgcataaaatattctggacatggttctttcgttaaaaaaaatcctcttgacaatgcatcccctgtacaattggccaattaactaattttaaaacgtatttttaattatttataatgcacttgatgtgattttgaatacaccttatcaaatatcataaaccaaacttcataaatgataattcatgttacctgcccaaatacctttgtaattatttcatgtttttttttttattttaattatttatttgttttcgtactgaaaataaataaacacaacattaatttgcgtaaacctaacatgaatccatctaacatccatccatttcatttcacctctactcaccaccactgcttgcatttttactgttatgtgaaattttattgcaattggatttaacaccaaactaattttgaactttctctactaacactttcaccacctgacttgatccttgatttaactatccccttccgtcgctctctacaatctctactctatatctctctttcttctgttaatctcaactggaaacaacaaacaaaaaaatttaaattaaacaacaaacaaaattttgtcattctctcatctcacttgactcgcaaaacgccttaccatttccacaaaaaaaaaatataaaaaaaatccgtcgtttaacgccactcaacataaacttcttaactttatgcttttggtttcatcattaatttcattgccgaccgacaaatcgtttgattttccctattatttgcaatcgattatgttgcgattattctaatttcgacgataaccaatcacccacgacgaactaccgataaacgttgaccgattgacgaaatgactcgcccactcgcaactcgataacaccatcaccgactggcgcctgcagacagggacagcaaggacaaggacaaggacaaaccgggcaataaccagctggccgtgccacgcctctccgtctgcgccgacgcccagaaggtcgatcgcgccaaattggcccaaacggagttcaacatcatcgaattcgatccggacacattccgagttctgctcgactacctgcacacgggcacctgtccgctgacctgcgtctccataccaggtaactatattaaagctatacgaggaattcttaagcatttaagcttaatgcatatattgaactactataatcttattatggagtttcttttatagttgaagaacacagcaaatcaaataatatatatatatatttaaccaacttttaagggttactatgtgccgcggagcactacgacctgccggagctgttgcaggcgtgcttccatcactgcaagcagtttctgcgcatcgaggtggtctgcccgatgctcatctcgctggagaactactactggcgctacacatccgcctccgagctggtcaacatgatcctgtcgttcgtggagagcaaggcgcactcgctgttcaagtgcccggagtttctgcacctatccgaatcgatggtgcagatgatcatgtgccgggagttgcagacgcccgagatacgaaagtttgaggcaatgctggcgtgggcccaacacaaggtgggcaaactgaaaaatcatccgaacaaggacacccagttcgagttcgaatgcattatggagcggctgacgcgtgatctgaatctgtgccggatctcgcccagcgaactgctcaccgtcgtcctgccctccaaatcgatgaagaacgaacgcatcatggagacgctcatggtgcaggtgaatctggggacctaccggatgcccgagttggatgcgtatcgtcagcagttgcgccagcaggagtccgccgaggccaccgtccaggtccaccggggtggatgagacagtaagaatgtgagtttcgatttggatcaccaacagcagcagcaacagcaccagcagcatgatcagcaatcggattcggatgccacagtgtccaataataataatctcgtagcccatcagaaccaccacaatccgccacccatcgatgcccgtgcctatgccatggcctccctggccgccgcccttgagatgcagaattcgtcgaatcccctacagtcgaacgccgcccgcgatgccgccgacgaggaggtggagctatatgccagttttgataatgcacccagcaccagtcgggtggccgcccaaatgcaggccgccaaggaggcgcgccggaagcgatgggcggccgatggggccagcgggagcagcggggacggcggatgcgccagcgggagcagcggcagcgggcggcgctactaattggatggatgtgttcccgtatgactggtcctaagacttatggctaacacacatagaaattcgccattaactatataagaaaactacaaattgtgaaaaattttttctcagccataaccttttggaaattgtaatgataattcggaagaaaattttgaaaatatttggataaattatatagaattgcagtggcgaatttctttaatttgagcgtactttcattatgattgtggcgaataattctgagcagtgattgcgaaaataccgattttatttacaaataaactcagttaagttcaaggcagttcgctagattagctattgcaaaaaaaaaaaacataatgctttaattcaattgtatatgggttattcatacattataaaatgtcgcttaaaggtggcttgatcaatcatttttacaaatgccccaaatttcaagaattttaagatgaagggggtaaatttctataaaaaagttccttacatttgataaacatattttctagttagtaattcatagagaatatttctaaactcaatgttcatatctatatacttagataggctattggttttttggggtatgattgaagcttttaagtatacttttcaacactgtgcgaatatgactggcttgtgtgtgtgtgtgtgcatatgtgtgttttttgtgtatgtgagtggttttgagtgagtgtgtgagtggttttgagagtgtgtgtgtgtgtgtgcgtctaaccaacccatcgctcgaaagacgcccgaactatccaaatcgaaactgacattgttaactcttacattcaccccggaatgacaagagcccccaattttttgggggatgcatatagagagagagcggagggagacggcggcccaaaacccaccccctcccgccccccctctacaagagataatgttaaaagcataagcattttctacaagtattacccaacatacatacatacataaatgtgtacgtcgtgcaaaattgtcctaggaa

SEQ ID NO: 28112 - DNA, 3318 bp, DROSOPHILA
atgatgttgattgccaatgagttctgcgaggagtatccgcacaatctgatgcccactcccggctactggatcgaatgctcccgccagaagatcactatgcccaccccgcacaccatttgggacgagagcgactcggagcacgaggacattcgggcaggaagtgccagcgatgcctatttggagcgcgagtgcagcgatctgtacgaggatgatgaggactctgaggctacgcccagtccgcgcaaaaagaccaccatcgaggagcagtgggaccagcagggcgcattcgaactgatctctgtggaacaggagacgtacgagaagtacttctatggcaccgagcactggaactacttcaccagcgatgaggacctgggtccggtcatcctgtccatcaagcaggagacgctcaacggacgggatcagttccgcatcctagtacgggctggttcctacacggtgcacggactgataccggcgtcctgtgtgttcgcagataggacaattacccgatacgccagaggaattattaaaattagatcagagttaaaagttggcgtcatatttgtcaaagaggatcagtataccgaagagcaaattctggacaataatgaaaattcaccgctcttcgacgaattcctcactcttctgggcgatcgagttcgtctgcgcggatttgataaatacaaaggtggccttgatacggtgcacgacctgacaggtctcttctccgtctatacgaactggcgcaacatcgagatcatgttccatgtgtccacgttgctgccgtacgagaagcacgatccgcagaagcttcagaggaagcgtcacatcggcaacgatatcgtctgcgtggtattcttggaggcggataacacacgcttcagtcccgcctgcatcaagagccatttcctgcacaccttcatcctggttcgcgtttcggccaggattaaacacaagcccacgcgatacgaggtgtccgtggtgacgcgtgacgaggtgggcgcctacaagccctatttgtgggagcagtccgtcttcgagaaggggccgatgttccgggaatggctgctgaccaagatcgtgaatggagagagagcctcctattcggcaccgaaattcgcgcggatgcaggagcgtacgcgatcgcagatgctcgaggatctggtgatgaatctatcgaatcatgcggaaactggacagataccgaagccatatagacgcggcagttggcgaccgatcggtgaggatgaatatatcaaaatgttgcatgcccgtgtcctagacaacaacacacaccacgagcagcagcagcagttgctgctgcagcagcaacacatgcagcacacgcagcacatgcaacacttgccgtcgcacaacatttgctgctattgcaacaacaatgccactgagctgcacacagcgggtgcaatacacaacaataatgacaacaacaacaccaccaccaccaccacattcacacacagacacaacaacaacaacaataattactctgagcagcagcaacaacaactgccacaacagcagcaacatgacagccaacagcaacaacaattgctgcagccacaacaacaccaactgctacaccaactgcaattgtcgacgtcgtcactcacacacacgtcgtgctgtgccatgttgcacctgtgtgcgaggcatagtcacatgcgaccctcgtcaccgctgctggattccgttcgcgatcaattcgaggactacgatcagttggccaaggactttacccgcgtatttctaaacgaagaaccatcgtgcctgaccaacgcccatctcttcgatgtcgtattcctggtgggtcagtccaagcaaaaggctcgatttattggagttcgagctattctcggagtacggagtcgagtctttcaggaaatgctctatggcattcagaccggcttcggatcgccgcagattccggttgcggaaatctttgcgcgaccagctccatcgctggtctccccgcaaaaccagaaaccgaagagcaacaactatctgaccgttcccgattccgattcgatacgaccgaaaagtgtgccctcgtcgccgatggtgaagagggccttctcccgactgggaaccattacggccggatggggtcggtccatacggaacaagaacaccaaccaactgaatccggatgacaagaagaagtggatatcgtcgacagattacagggacagcaaggacaaggacaaggacaaaccgggcaataaccagctggccgtgccacgcctctccgtctgcgccgacgcccagaaggtcgatcgcgccaaattggcccaaacggagttcaacatcatcgaattcgatccggacacattccgagttctgctcgactacctgcacacgggcacctgtccgctgacctgcgtctccataccagggttactatgtgccgcggagcactacgacctgccggagctgttgcaggcgtgcttccatcactgcaagcagtttctgcgcatcgaggtggtctgcccgatgctcatctcgctggagaactactactggcgctacacatccgcctccgagctggtcaacatgatcctgtcgttcgtggagagcaaggcgcactcgctgttcaagtgcccggagtttctgcacctatccgaatcgatggtgcagatgatcatgtgccgggagttgcagacgcccgagatacgaaagtttgaggcaatgctggcgtgggcccaacacaaggtgggcaaactgaaaaatcatccgaacaaggacacccagttcgagttcgaatgcattatggagcggctgacgcgtgatctgaatctgtgccggatctcgcccagcgaactgctcaccgtcgtcctgccctccaaatcgatgaagaacgaacgcatcatggagacgctcatggtgcaggtgaatctggggacctaccggatgcccgagttggatgcgtatcgtcagcagttgcgccagcaggagtccgccgaggccaccgtccaggtccaccgggcccatcagaaccaccacaatccgccacccatcgatgcccgtgcctatgccatggcctccctggccgccgcccttgagatgcagaattcgtcgaatcccctacagtcgaacgccgcccgcgatgccgccgacgaggaggtggagctatatgccagttttgataatgcacccagcaccagtcgggtggccgcccaaatgcaggccgccaaggaggcgcgccggaagcgatgggcggccgatggggccagcgggagcagcggggacggcggatgcgccagcgggagcagcggcagcgggcggcgctactaa

SEQ ID NO: 28113 - protein, 1104 aa, DROSOPHILA
MLIANEFCEEYPHNLMPTPGYWIECSRQKITMPTPHTIWDESDSEHEDIRAGSASDAYLERECSDLYEDDEDSEATPSPRKKTTIEEQWDQQGAFELISVEQETYEKYFYGTEHWNYFTSDEDLGPVILSIKQETLNGRDQFRILVRAGSYTVHGLIPASCVFADRTITRYARGIIKIRSELKVGVIFVKEDQYTEEQILDNNENSPLFDEFLTLLGDRVRLRGFDKYKGGLDTVHDLTGLFSVYTNWRNIEIMFHVSTLLPYEKHDPQKLQRKRHIGNDIVCVVFLEADNTRFSPACIKSHFLHTFILVRVSARIKHKPTRYEVSVVTRDEVGAYKPYLWEQSVFEKGPMFREWLLTKIVNGERASYSAPKFARMQERTRSQMLEDLVMNLSNHAETGQIPKPYRRGSWRPIGEDEYIKMLHARVLDNNTHHEQQQQLLLQQQHMQHTQHMQHLPSHNICCYCNNNATELHTAGAIHNNNDNNNTTTTTTFTHRHNNNNNNYSEQQQQQLPQQQQHDSQQQQQLLQPQQHQLLHQLQLSTSSLTHTSCCAMLHLCARHSHMRPSSPLLDSVRDQFEDYDQLAKDFTRVFLNEEPSCLTNAHLFDVVFLVGQSKQKARFIGVRAILGVRSRVFQEMLYGIQTGFGSPQIPVAEIFARPAPSLVSPQNQKPKSNNYLTVPDSDSIRPKSVPSSPMVKRAFSRLGTITAGWGRSIRNKNTNQLNPDDKKKWISSTDYRDSKDKDKDKPGNNQLAVPRLSVCADAQKVDRAKLAQTEFNIIEFDPDTFRVLLDYLHTGTCPLTCVSIPGLLCAAEHYDLPELLQACFHHCKQFLRIEVVCPMLISLENYYWRYTSASELVNMILSFVESKAHSLFKCPEFLHLSESMVQMIMCRELQTPEIRKFEAMLAWAQHKVGKLKNHPNKDTQFEFECIMERLTRDLNLCRISPSELLTVVLPSKSMKNERIMETLMVQVNLGTYRMPELDAYRQQLRQQESAEATVQVHRAHQNHHNPPPIDARAYAMASLAAALEMQNSSNPLQSNAARDAADEEVELYASFDNAPSTSRVAAQMQAAKEARRKRWAADGASGSSGDGGCASGSSGSGRRY
